United States Patent Application Publication US 2011/0183924 A1 - sequence listing, part 131

SEQ ID NO: 359742 - DNA, 3526 bp, Homo sapiens
acggcatgcactgcggcgcccagccggtcaccgcctgccggctgcagacgcctgcgagcaggttgtttttataagaggcgtcattggcgcccgagctgtgaccgccgccactggggcagccagcacaatcgggcggaggtggcgctgccccttcagacctgaaagatgtctgaaaattccagtgacagtgattcatcttgtggttggactgtcatcagtcatgaggggtcagatatagaaatgttgaattctgtgacccccactgacagctgtgagcccgccccagaatgttcatctttagagcaagaggagcttcaagcattgcagatagagcaaggagaaagcagccaaaatggcacagtgcttatggaagaaactgcttatccagctttggaggaaaccagctcaacaattgaggcagaggaacaaaagatacccgaagacagtatctatattggaactgccagtgatgattctgatattgttacccttgagccacctaagttagaagaaattggaaatcaagaagttgtcattgttgaagaagcacagagttcagaagactttaacatgggctcttcctctagcagccagtatactttctgtcagccagaaactgtattttcatctcagcctagtgacgatgaatcaagtagtgatgaaaccagtaatcagcccagtcctgcctttagacgacgccgtgctaggaagaagaccgtttctgcttcagaatctgaagaccggctagttgctgaacaagaaactgaaccttctaaggagttgagtaaacgtcagttcagtagtggtctcaataagtgtgttatacttgctttggtgattgcaatcagcatgggatttggccatttctatggcacaattcagattcagaagcgtcaacagttagtcagaaagatacatgaagatgaattgaatgatatgaaggattatctttcccagtgtcaacaggaacaagaatcttttatagattataagtcattgaaagaaaatcttgcaaggtgttggacacttactgaagcagagaagatgtcctttgaaactcagaaaacgaaccttgctacagaaaatcagtatttaagagtatccctggagaaggaagaaaaagccttatcctcattacaggaagagttaaacaaactaagagaacagattagaatattggaagataaagggacaagtactgaattagttaaagaaaatcagaaacttaagcagcatttggaagaggaaaagcagaaaaaacacagctttcttagtcaaagggagactctgttgacagaagcaaagatgctaaagagagaactggagagagaacgactagtaactacggctttaaggggggaactccagcagttaagtggtagtcagttacatggcaagtcagattctcccaatgtatatactgaaaaaaaggaaatagcaatcttacgggaaagactcactgagctggaacggaagctaaccttcgaacagcagcgttctgatttgtgggaaagattgtatgttgaggcaaaagatcaaaatggaaaacaaggaacagatggaaaaaagaaagggggcagaggaagccacagggctaaaaataagtcaaaggaaacatttttgggttcagttaaggaaacatttgatgccatgaagaattctaccaaggagtttgtaaggcatcataaagagaaaattaagcaggctaaagaagctgtgaaggaaaatctgaaaaaattctcagattcagttaaatccactttcagacactttaaagataccaccaagaatatctttgatgaaaagggtaataaaagatttggtgctacaaaagaagcagctgaaaaaccaagaacagtttttagtgactatttacatccacagtataaggcacctacagaaaaccatcataatagaggccctactatgcaaaatgatggaaggaaagaaaagccagttcactttaaagaattcagaaaaaatacaaattcaaagaaatgcagtcctgggcatgattgtagagaaaattctcattctttcagaaaggcttgttctggtgtatttgattgtgctcaacaagagtccatgagcctttttaacacagtggtgaatcctataaggatggatgaatttagacagataattcaaaggtacatgttaaaagaactggatactttttgtcactggaacgaacttgatcagttcatcaataagtttttcctaaacggtgtctttatacatgatcagaagctcttcactgactttgttaatgatgttaaagattatcttagaaacatgaaggaatatgaagtagataatgatggagtatttgagaagttggatgaatatatatatagacacttctttggtcacactttttcccctccatatggacccagtcgacctgataaaaagcaacgtatggtaaatattgaaaactccaggcatcgaaaacaagagcagaagcaccttcagccacagccttataaaagggaaggtaaatggcataaatatggtcgcactaatggaagacaaatggcaaatcttgaaatagaattggggcaattaccttttgatcctcaatactgattcacaattgagttaaattagacaactgtaagagaaaaatttatgctttgtataatgtttggtattgaaactaatgaaattaccaagatgacaatgtcttttcttttgtttctaagtatcagtttgataactttatattattcctcagaagcattatggaaatgttcaactgtagttttattaaggaagccaggcatgcaacagattttgtgcatgaaatgagacttcctttcagtgtaagagcttaaagcaagctcagtcatacatgacaaagtgtaattaacactgatgtttgtgttaaatttgcagcagagcttgagaaaagtacattgttctggaatttcatcattaacattttataatcttacactcacttcttgtctttttgtgggttcaagagccctctgacttgtgaagaatttgctgccctcttaagagcttgctgacttgttttcttgtgaaattttttgcacatctgaatatcgtggaagaaacaataaaactacaccatgaggaaaactaaaggtctttatttaaaatctggcattgtattaacatgtaattttatactatgtggtattttatacatttcctcagtagtgatatttggtaaagcagttcatacagcttttttctaagttccatgaatcttacccagtgtttaccgaagtatttaagcagcatctgaatatttccacccagcaatgttaatttatctaggaaagttcagaatttcatcttcatgttgaatttcccttttaacttccgttcatagacatatatgtgacttccaattcgaccctctggcaagtgagtgtggaagaaaacagcagttcttttataattgcttgaaattaggaaagcgcttatttcctagaagcaaataaatgtttaagtaaataaaggctacattttgctgagtactgtttcagtcaat

SEQ ID NO: 359743 - DNA, 2992 bp, Homo sapiens
acggcatgcactgcggcgcccagccggtcaccgcctgccggctgcagacgcctgcgagcaggttgtttttataagaggcgtcattggcgcccgagctgtgaccgccgccactggggcagccagcacaatcgggcggaggtggcgctgccccttcagacctgaaagatgtctgaaaattccagtgacagtgattcatcttgtggttggactgtcatcagtcatgaggggtcagatatagaaatgttgaattctgtgacccccactgacagctgtgagcccgccccagaatgttcatctttagagcaagaggagcttcaagcattgcagatagagcaaggagaaagcagccaaaatggcacagtgcttatggaagaaactgcttatccagctttggaggaaaccagctcaacaattgaggcagaggaacaaaagatacccgaagacagtatctatattggaactgccagtgatgattctgatattgttacccttgagccacctaagttagaagaaattggaaatcaagaagttgtcattgttgaagaagcacagagttcagaagactttaacatgggctcttcctctagcagccagtatactttctgtcagccagaaactgtattttcatctcagcctagtgacgatgaatcaagtagtgatgaaaccagtaatcagcccagtcctgcctttagacgacgccgtgctaggaagaagaccgtttctgcttcagaatctgaagaccggctagttgctgaacaagaaactgaaccttctaaggagttgagtaaacgtcagttcagtagtggtctcaataagtgtgttatacttgctttggtgattgcaatcagcatgggatttggccatttctatggcacaattcagattcagaagcgtcaacagttagtcagaaagatacatgaagatgaattgaatgatatgaaggattatctttcccagtgtcaacaggaacaagaatcttttatagattataagtcattgaaagaaaatcttgcaaggtgttggacacttactgaagcagagaagatgtcctttgaaactcagaaaacgaaccttgctacagaaaatcagtatttaagagtatccctggagaaggaagaaaaagccttatcctcattacaggaagagttaaacaaactaagagaacagattagaatattggaagataaagggacaagtactgaattagttaaagaaaatcagaaacttaagcagcatttggaagaggaaaagcagaaaaaacacagctttcttagtcaaagggagactctgttgacagaagcaaagatgctaaagagagaactggagagagaacgactagtaactacggctttaaggggggaactccagcagttaagtggtagtcagttacatggcaagtcagattctcccaatgtatatactgaaaaaaaggaaatagcaatcttacgggaaagactcactgagctggaacggaagctaaccttcgaacagcagcgttctgatttgtgggaaagattgtatgttgaggcaaaagatcaaaatggaaaacaaggaacagatggaaaaaagaaagggggcagaggaagccacagggctaaaaataagtcaaaggaaacatttttgggttcagttaaggaaacatttgatgccatgaagaattctaccaaggagtttgtaaggcatcataaagagaaaattaagcaggctaaagaagctgtgaaggaaaatctgaaaaaattctcagattcagttaaatccactttcagacactttaaagataccaccaagaatatctttgatgaaaagggtaataaaagatttggtgctacaaaagaagcagctgaaaaaccaagaacagtttttagtgactatttacatccacagtataaggcacctacagaaaaccatcataatagaggccctactatgcaaaatgatggaaggaaagaaaagccagttcactttaaagaattcagaaaaaatacaaattcaaagaaatgcagtcctgggcatgattgtagagaaaattctcattctttcagaaaggcttgttctggtgtatttgattgtgctcaacaagagtccatgagcctttttaacacagtggtgaatcctataaggatggatgaatttagacagataattcaaaggtacatgttaaaagaactggatactttttgtcactggaacgaacttgatcagttcatcaataagtttttcctaaacggtgtctttatacatgatcagaagctcttcactgactttgttaatgatgttaaagattatcttagaaacatgaaggaatatgaagtagataatgatggagtatttgagaagttggatgaatatatatatagacacttctttggtcacactttttcccctccatatggacccaggtcggtttacataaaaccgtgtcattacagtagtttgtaacatttgtagattggatagcatttttatgatttgatgagtttcttgtaaggttaccgtttctaagagttgtgctttatggccactgagagaattcagaataaattgaaagatggagtctaaaaattattagctgttacaaatggaacatttcattataacgtgatcactttgacttgagcaaatggtttaatttttatcttaaaaatcagttaagaatatataaaatcctactttggccaagtttgtttcttttcattatagtttatatgaaaagatcaccttaagtgaaattattttcctttaatcttttatgtatttattcacttttggaagctaggaatgagcaacacaaattttactctgatgggagaagatggccagtcttctcccatcagccggagaaaaacaattaataaaactaactaaataagctttccttacttactcatccagcacagattgttatttgaattgaacaaatggtaatttgcaagattgtatgagcctagtaatgagcagcacactgatgggggctagacggatcctctagatg

SEQ ID NO: 359744 - DNA, 935 bp, Homo sapiens
acggcatgcactgcggcgcccagccggtcaccgcctgccggctgcagacgcctgcgagcaggttgtttttataagaggcgtcattggcgcccgagctgtgaccgccgccactggggcagccagcacaatcgggcggaggtggcgctgccccttcagacctgaaagatgtctgaaaattccagtgacagtgattcatcttgtggttggactgtcatcagtcatgaggggtcagatatagaaatgttgaattctgtgacccccactgacagctgtgagcccgccccagaatgttcatctttagagcaagaggagcttcaagcattgcagatagagcaaggagaaagcagccaaaatggcacagtgcttatggaagaaactgcttatccagctttggaggaaaccagctcaacaattgaggcagaggaacaaaagatacccgaagacagtatctatattggaactgccagtgatgattctgatattgttacccttgagccacctaagttagaagaaattggaaatcaagaagttgtcattgttgaagaagcacagagttcagaagactttaacatgggctcttcctctagcagccagtatactttctgtcagccagaaactgtattttcatctcagcctagtgacgatgaatcaagtagtgatgaaaccagtaatcagcccagtcctgcctttagacgacgccgtgctaggaagaagaccgtttctgcttcagaatctgaagaccggctagttgctgaacaagaaactgaaccttctaaggagttgagtaaacgtcagttcagtagtggtctcaataagtgtgttatacttgctttggtgattgcaatcagcatgggatttggccatttctatggcacattcagattcagaagcgtcacagttagtccaaggcagacaggggatcctctagtacgccg

SEQ ID NO: 359745 - DNA, 906 bp, Homo sapiens
gctgggtgtgatggctcacccctgtaatcccagctactaggaagctgaggcaggagaatcaattgaacccgggagacagaggttgcagtgagccgagatcacgctactgcactccaacccgggtgacagagcgagactccgtctacaaaaaaaaaagattccgtggttgtgaagtgtctagcacttgacgaacatgcagtaagtgttgctccttaacccctagcctatgtttcaagcaatttctgcatgtgacccacataatgttgaggctcaaagggctctgggaagatcatcttttatgagccctttgttttccagataaaaatatcaagattggggaagggacagaatggattggtggtaaaaccatttgtgtggcaaacacccagaggctgtaaaaggagcatgggtctcagagtcagcctgctgcccctcactcagtgaccctggatgagttgctgaacctccgtcagcctcagtttccttttctgtaaagtggggatgttggtgttttcggcaggattgctatgaagccacttgaattaatgtttatcaagtccctcaaggactgtcttgcagttacttataccttaattccacattggatacctgagaacactctgtcctgctgcccctcaggctgccccatatctctccagagtcactagtagggccagcagcagcccttctggcctgtgaggtttgggggcaatgaggctgctggggtggggatggagtgtgggctttgaaatcagatggacctgggccaggcaccattgctcacgcctgtaatcccaacacttcggtaggccaaggtgggaggattgcttgaacccaggagtttgagaccagcctgggcaacatggcgagatcctgtctctataaaaaatacaaaaatttggccag

SEQ ID NO: 359746 - DNA, 509 bp, Homo sapiens
ctgcaggaagaaaatacgcccctacctacaaaacttaaaagaccatttttcttgtccccaagtcgatgatgactgttggatggggcccatccaggtgactcgcatttttattacaatgattcaactttagcttcaaataaaaggggctttctttttcttttctttgttctcgaagttatttaaagaatctcattcaggtgtagaacccaaaaatttggatccaaaatgccaagtgaggcaagcagtactccactgccttcttgtgttccagagagtgaaaggaaagaataatcagctctcagcactgatagtacagaacagtcagttttaatgagaaataaccaacaggtggggtggatttcaacacacagagagggggccttagtgacgcccctgctgctgcaaggctgtgcccgcccttgagggttgggctggctctgagcagatgcagccgcgctaaacagaagggcgagtgacaccgcagggggcagcttctcgcactctctcca

SEQ ID NO: 359747 - DNA, 211 bp, Homo sapiens
ggcggggacttatcaggatcctgaacccctgaaatcactcgggagatgaggagagcttcggtgtccgccgcccagcgccgcagtctgcaatctccctggttgcggggctctgccctgccgtggccgaacgcttcgggagctcagaccacggtggcagggaggaaatggttgtttatgggtttggatgaaaggcaccacatgaatggatttt

SEQ ID NO: 359748 - DNA, 493 bp, Homo sapiens
cataactccgtgcgctctcccctcccgtcctctttccgccatctttccgcgccgccacaatggtgcgcatgaatgtcctggcagatgctctcaagagtatcaacaatgccgaaaagagaggcaaacgccaggtgcttattaggccgtgctccaaagtcatcgtccggtttctcactgtgatgatgaagcatggttacattggcgaatttgaaatcattgatgaccacagagctgggaaaattgttgtgaacctcacaggcaggctaaacaagtgtggggtgatcagccccagatttgacgtgcaactcaaagacctggaaaaatggcagaataatctgcttccatcccgccagtttggtttcattgtactgacaacctcagctggcatcatggaccatgaagaagcaagacgaaaacacacaggagggaaaatcctgggattctttttctagggatgtaatacatatatttacaaataaaatgcctcatggac

SEQ ID NO: 359749 - DNA, 481 bp, Homo sapiens
gagaggcgcggggggctctctttccgccatctttccgcgccgccacaatggtgcgcatgaatgtcctggcagatgctctcaagagtatcaacaatgccgaaaagagaggcaaacgccaggtgcttattaggccgtgctccaaagtcatcgtccggtttctcactgtgatgatgaagcatggttacattggcgaatttgaaatcattgatgaccacagagctgggaaaattgttgtgaacctcacaggcaggctaaacaagtgtggggtgatcagccccagatttgacgtgcaactcaaagacctggaaaaatggcagaataatctgcttccatcccgccagtttggtttcattgtactgacaacctcagctggcatcatggaccatgaagaagcaagacgaaaacacacaggagggaaaatcctgggattctttttctagggatgtaatacatatatttacaaataaaatgcctcatggac

SEQ ID NO: 359750 - DNA, 482 bp, Homo sapiens
  misc_feature (29)..(29): n is a, c, g, or t
aaattacggctagtacgaggcctgggtgngtctttccgcgccgccacaatggtgcgcatgaatgtcctggcagatgctctcaagagtatcaacaatgccgaaaagagaggcaaacgccaggtgcttattaggccgtgctccaaagtcatcgtccggtttctcactgtgatgatgaagcatggttacattggcgaatttgaaatcattgatgaccacagagctgggaaaattgttgtgaacctcacaggcaggctaaacaagtgtggggtgatcagccccagatttgacgtgcaactcaaagacctggaaaaatggcagaataatctgcttccatcccgccagtttggtttcattgtactgacaacctcagctggcatcatggaccatgaagaagcaagacgaaaacacacaggagggaaaatcctgggattctttttctagggatgtaatacatatatttacaaataaaatgcctcatggac

SEQ ID NO: 359751 - DNA, 545 bp, Homo sapiens
  misc_feature (1)..(1): n is a, c, g, or t
  misc_feature (14)..(14): n is a, c, g, or t
  misc_feature (47)..(47): n is a, c, g, or t
  misc_feature (67)..(67): n is a, c, g, or t
  misc_feature (73)..(73): n is a, c, g, or t
nccccgggaaacgnctttgaccttgattccgaatttaatccgactcncttatggggaatttggcccntcgagnccaagaattcggaacgagggtctttccgcgccgccacaatggtgcgcatgaatgtcctggcagatgctctcaagagtatcaacaatgccgaaaagagaggcaaacgccaggtgcttattaggccgtgctccaaagtcatcgtccggtttctcactgtgatgatgaagcatggttacattggcgaatttgaaatcattgatgaccacagagctgggaaaattgttgtgaacctcacaggcaggctaaacaagtgtggggtgatcagccccagatttgacgtgcaactcaaagacctggaaaaatggcagaataatctgcttccatcccgccagtttggtttcattgtactgacaacctcagctggcatcatggaccatgaagaagcaagacgaaaacacacaggagggaaaatcctgggattctttttctagggatgtaatacatatatttacaaataaaatgcctcatggac

SEQ ID NO: 359752 - DNA, 849 bp, Homo sapiens
  misc_feature (29)..(29): n is a, c, g, or t
aaattacggctagtacgaggcctgggtgngtctttccgcgccgccacaatggtgcgcatgaatgtcctggcagatgctctcaagagtatcaacaatgccgaaaagagaggcaaacgccaggtgcttattaggccgtgctccaaagtcatcgtccggtttctcactgtgatgatgaagcatggttacattggcgaatttgaaatcattgatgaccacagagctgggaaaattgttgtgaacctcacaggcaggctaaacaagtgtggggtgatcagccccagatttgacgtgcaactcaaagacctggaaaaatggcagaataatctgcttccatcccgccagtttggtttcattgtactgacaacctcagctggcatcatggaccatgaagaagcaagacgaaaacacacaggagggaaaatcctgggattctttttctagggatgtaatacatatatttacaaataaaatgcctcatggactctggtgcttccacttggtcgttttgagcctttacagcagtgtagccacagcttctgcggcagcatgcagttgcttcgtttatcggtgaatgcgattccctgaagtgactaatacagccaagggaaaaagttcttatgaaaccagtatgcctaagaaacagtcacccctgctgtctgccaaaaccaggtatttgacactaaatattttagttgtatttcagttttttttttttttttcttttttggagacagagtctgactctattgctcaggctggagtgcagtggcgcgatcttggcccactgcaacctccacctcccgggttcaagtgattgtcctgtctcagccgcctgagtaactgggatta

SEQ ID NO: 359753 - DNA, 759 bp, Homo sapiens
gagaggcgcggggggctctctttccgccatctttccgcgccgccacaatggtgcgcatgaatgtcctggcagatgctctcaagagtatcaacaatgccgaaaagagaggcaaacgccaggtgcttattaggccgtgctccaaagtcatcgtccggtttctcactgtgatgatgaagcatggttacattggcgaatttgaaatcattgatgaccacagagctgggaaaattgttgtgaacctcacaggcaggctaaacaagtgtggggtgatcagccccagatttgacgtgcaactcaaagacctggaaaaatggcagaataatctgcttccatcccgccagtttggtttcattgtactgacaacctcagctggcatcatggaccatgaagaagcaagacgaaaacacacaggagggaaaatcctgggattctttttctagggatgtaatacatatatttacaaataaaatgcctcatggactctggtgcttccacttggtcgttttgagcctttacagcagtgtagccacagcttctgcggcagcatgcagttgcttcgtttatcggtgaatgcgattcccagattcaagtagttctcgtgcctcagcctcctgagtagctgggattacaggtgtgtgccaccatgtctggctgatttttgtatttttagtagaggtggggtttcaccatgttggccaggctggtctcgaactcctgatctcaagtgatctgcctgccttggtctcccaaagtgctggg

SEQ ID NO: 359754 - DNA, 1196 bp, Homo sapiens
  misc_feature (1)..(1): n is a, c, g, or t
  misc_feature (14)..(14): n is a, c, g, or t
  misc_feature (47)..(47): n is a, c, g, or t
  misc_feature (67)..(67): n is a, c, g, or t
  misc_feature (73)..(73): n is a, c, g, or t
  misc_feature (682)..(682): n is a, c, g, or t
  misc_feature (687)..(687): n is a, c, g, or t
nccccgggaaacgnctttgaccttgattccgaatttaatccgactcncttatggggaatttggcccntcgagnccaagaattcggaacgagggtctttccgcgccgccacaatggtgcgcatgaatgtcctggcagatgctctcaagagtatcaacaatgccgaaaagagaggcaaacgccaggtgcttattaggccgtgctccaaagtcatcgtccggtttctcactgtgatgatgaagcatggttacattggcgaatttgaaatcattgatgaccacagagctgggaaaattgttgtgaacctcacaggcaggctaaacaagtgtggggtgatcagccccagatttgacgtgcaactcaaagacctggaaaaatggcagaataatctgcttccatcccgccagtttggtttcattgtactgacaacctcagctggcatcatggaccatgaagaagcaagacgaaaacacacaggagggaaaatcctgggattctttttctagggatgtaatacatatatttacaaataaaatgcctcatggacaaaaaaaaaaaaaaaaaaaaaaaaaaaaaaaaaaaaaaaaaaaaaaaaaaaaaaaaaaaaaaaaaaaaaaaaaaaaaaaaaacaaaaaaaagaaaaaaaaaaacaaaaaagaaaacaaaaaaaaaacaagaaaaaanaaaanacaaagagagcgggggcccactatagcacattatatgtcgcacagagcgagagacaaacctatacgtccactaccacgccatacttattttacagcagacagtgcccctaaaattgataggtgtacttatctgaaagaagagaggcgaggccgagactcggatattatctactcctctgtggtgtgacagcacaatggacttgttagcggatgacttatctagcgtagagaagcgaaccacaaccagacgagaggcggacggcaagcacaacatatgaatgaaacacgacaacccacccacgcaacaagagctgaactacttaactgcgacatggaaccgaacatagtaactaaactaactaccacctagcatgagatgataatcaagatgatagatgacgcataacaaaaccacgaagaatataccgcacgcacgaggacacagaaagcaagagccatccctagcacagctgaatcactatagagaacacaataaaattttacgccgc

SEQ ID NO: 359755 - DNA, 376 bp, Homo sapiens
  misc_feature (4)..(4): n is a, c, g, or t
  misc_feature (15)..(16): n is a, c, g, or t
  misc_feature (23)..(23): n is a, c, g, or t
cccngtgccttattnnggccccntgccccccaaagtccatccgtcccggtttcctcactgtgatgatgaagcatggttacattggcgaatttgaaatcattgatgaccacagagctgggaaaattgttgtgaacctcacaggcaggctaaacaagtgtggggtgatcagccccagatttgacgtgcaactcaaagacctggaaaaatggcagaataatctgcttccatcccgccagtttggtttcattgtactgacaacctcagctggcatcatggaccatgaagaagcaagacgaaaacacacaggagggaaaatcctgggattctttttctagggatgtaatacatatatttacaaataaaatgcctcatggac

SEQ ID NO: 359756 - DNA, 390 bp, Homo sapiens
  misc_feature (51)..(51): n is a, c, g, or t
gttaataactattttccctttttttatttttattggagagtttcgtgtggncgtgatcgccccatatttgacgtgcaactcaaagacctggaaaaatggcgaatttgaaatcattgatgaccacagagctgggaaaattgttgtgaacctcacaggcaggctaaacaagtgtggggtgatcagccccagatttgacgtgcaactcaaagacctggaaaaatggcagaataatctgcttccatcccgccagtttggtttcattgtactgacaacctcagctggcatcatggaccatgaagaagcaagacgaaaacacacaggagggaaaatcctgggattctttttctagggatgtaatacatatatttacaaataaaatgcctcatggac

SEQ ID NO: 359757 - DNA, 299 bp, Homo sapiens
  misc_feature (18)..(18): n is a, c, g, or t
cctactactactaaattngcggccgctcgacacagagctgggaaaattgttgtgaacctcacaggcaggctaaacaagtgtggggtgatcagccccagatttgacgtgcaactcaaagacctggaaaaatggcagaataatctgcttccatcccgccagtttggtttcattgtactgacaacctcagctggcatcatggaccatgaagaagcaagacgaaaacacacaggagggaaaatcctgggattctttttctagggatgtaatacatatatttacaaataaaatgcctcatggac

SEQ ID NO: 359758 - DNA, 419 bp, Homo sapiens
tttttagccgggtgtggtggctcacgcctgtaatcccaacactttgggaggccgaggtgggcagatcacttgatgtcaggggtttgagacgagcctggccaacatggtgaaaccccgtctctactaaaaatacaaaaattagccgggtgtgatggcgggcgcctgtaatctcagcctccctagtagctgagattacagtgtggggtgatcagccccagatttgacgtgcaactcaaagacctggaaaaatggcagaataatctgcttccatcccgccagtttggtttcattgtactgacaacctcagctggcatcatggaccatgaagaagcaagacgaaaacacacaggagggaaaatcctgggattctttttctagggatgtaatacatatatttacaaataaaatgcctcatggac

SEQ ID NO: 359759 - DNA, 287 bp, Homo sapiens
tcaacgctttatactttcatccacgtttttaacttcttgtgtcttgtaactgctcggctcatacagtgtggggtgatcagccccagatttgacgtgcaactcaaagacctggaaaaatggcagaataatctgcttccatcccgccagtttggtttcattgtactgacaacctcagctggcatcatggaccatgaagaagcaagacgaaaacacacaggagggaaaatcctgggattctttttctagggatgtaatacatatatttacaaataaaatgcctcatggac

SEQ ID NO: 359760 - DNA, 556 bp, Homo sapiens
  misc_feature (29)..(29): n is a, c, g, or t
aaattacggctagtacgaggcctgggtgngtctttccgcgcccatccgtctgccatcggcgccatcctgcaatctaaaggttcggtctcggtgtcctgcgaggaggctggtccccaccttggccgaggatcctggccttgccggttcctggacaggcatagaggagagccatggctgggcgccccagactgtgcactcaggggatcccggtccgtggggtgcaggccgcagcgcgggcgggagccggagccttcgactgcccagctaggcggtagctccggttcgggccgcagcgtctggatctccctttagtgctgaggcagcgccttggccccgggcggcgggcaacatcggggctggtgggccgtgcagcttctcactgctgcggccgcgctgggagcttgggaggctgaggccacccagcagccacaatggtgcgcatgaatgtcctggcagatgctctcaaggaagttacttcaaaccaaattggccccgaacacaaacggcaagggaccacggggggggcccaaaagaaaccgaccccaaggttgcccgc

SEQ ID NO: 359761 - DNA, 264 bp, Homo sapiens
  misc_feature (51)..(51): n is a, c, g, or t
gttaataactattttccctttttttatttttattggagagtttcgtgtggncgtgatcgccccatatttgacgtgcaactcaaagacctggaaaaagcagaataatctgcttccatcccgccagtttggtttcattgtactgacaacctcagctggcatcatggaccatgaagaagcaagacgaaaacacacaggagggaaaatcctgggattctttttctagggatgtaatacatatatttacaaataaaatgcctcatggac

SEQ ID NO: 359762 - DNA, 438 bp, Homo sapiens
gcagtctccttttgaaataggttgtctgtacatgttctaatgttttgtagaacacgtgtgcctgtttaagtgtattgatgtgaataatattaaatatcctaattatttaattcattgtattgtttctgagaagttgggaaattaccattatacatttacaacctaatgacttttgtattttatttttcaaaataaaagctttcaatgtgaaaaaaaaaaaaaaaaagggcggcgctcgcatctagaaccggacgcgtgggtggaaaaatggcagaataatctgcttccatcccgccagtttggtttcattgtactgacaacctcagctggcatcatggaccatgaagaagcaagacgaaaacacacaggagggaaaatcctgggattctttttctagggatgtaatacatatatttacaaataaaatgcctcatggac

SEQ ID NO: 359763 - DNA, 220 bp, Homo sapiens
gcggccgcctactactactaaattcacagccggtcgacaagacctggaaaaagcagaataatctgcttccatcccgccagtttggtttcattgtactgacaacctcagctggcatcatggaccatgaagaagcaagacgaaaacacacaggagggaaaatcctgggattctttttctagggatgtaatacatatatttacaaataaaatgcctcatggac

SEQ ID NO: 359764 - DNA, 199 bp, Homo sapiens
  misc_feature (18)..(18): n is a, c, g, or t
cctactactactaaattngcggccgctcgacgcagaataatctgcttccatcccgccagtttggtttcattgtactgacaacctcagctggcatcatggaccatgaagaagcaagacgaaaacacacaggagggaaaatcctgggattctttttctagggatgtaatacatatatttacaaataaaatgcctcatggac

SEQ ID NO: 359765 - DNA, 893 bp, Homo sapiens
  misc_feature (15)..(15): n is a, c, g, or t
  misc_feature (23)..(23): n is a, c, g, or t
ggacgcgtgggtcgncccactcntccatctttccgcgccggtgagtagcactctctgagagctccaatttcatccgtctgccatcggcgccatcctgcaatctaaaggttcggtctcggtgtcctgcgaggaggctggtccccaccttggccgaggatcctggccttgccggttcctggacaggcatagaggagagccatggctgggcgccccagactgtgcactcaggggatcccggtccgtggggtgcaggccgcagcgcgggcgggagccggagccttcgactgcccagctaggcggtagctccggttcgggccgcagcgtctggatctccctttagtgctgaggcagcgccttggccccgggcggcgggcaacatcggggctggtgggccgtgcagcttctcactgctgcggccgcgctgggagcttgggaggctgaggccacccagcagccacaatggtgcgcatgaatgtcctggcagatgctctcaagagtatcaacaatgccgaaaagagaggcaaacgccaggtgcttattaggccgtgctccaaagtcatcgtccggtttctcactgtgatgatgaagcatggttacattggcgaatttgaaatcattgatgaccacagagctgggaaaattgttgtgaacctcacaggcaggctaaacaagtgtggggtgatcagccccagatttgacgtgcaactcaaagacctggaaaaatggcagaataatctgcttccatcccgccagtttggtttcattgtactgacaacctcagctggcatcatggaccatgaagaagcaagacgaaaacacacaggagggaaaatcctgggattctttttctagggatgtaatacatatatttacaaataaaatgcctcatggac

SEQ ID NO: 359766 - DNA, 944 bp, Homo sapiens
aatcgccacacaccagcaaagccaggctatgctatagtacaagccactagcccgcctctcagaacctctcatttcctttccatcgtggaaatctatcctcaaggaaataacttctcagtgtttcatctgctattctactactcctcagtgattattcaggccccctcccttccctacacatcaagctccaggatttgcccccacccaggactggccttgccggttcctggacaggcatagaggagagccatggctgggcgccccagactgtgcactcaggggatcccggtccgtggggtgcaggccgcagcgcgggcgggagccggagccttcgactgcccagctaggcggtagctccggttcgggccgcagcgtctggatctccctttagtgctgaggcagcgccttggccccgggcggcgggcaacatcggggctggtgggccgtgcagcttctcactgctgcggccgcgctgggagcttgggaggctgaggccacccagcagccacaatggtgcgcatgaatgtcctggcagatgctctcaagagtatcaacaatgccgaaaagagaggcaaacgccaggtgcttattaggccgtgctccaaagtcatcgtccggtttctcactgtgatgatgaagcatggttacattggcgaatttgaaatcattgatgaccacagagctgggaaaattgttgtgaacctcacaggcaggctaaacaagtgtggggtgatcagccccagatttgacgtgcaactcaaagacctggaaaaatggcagaataatctgcttccatcccgccagtttggtttcattgtactgacaacctcagctggcatcatggaccatgaagaagcaagacgaaaacacacaggagggaaaatcctgggattctttttctagggatgtaatacatatatttacaaataaaatgcctcatggac

SEQ ID NO: 359767 - DNA, 919 bp, Homo sapiens
cccactctcctctttccggggacgttgtctgcaggcactcagaatggtccagcgtttgacataccgacgtaggctttcctacaatacagcctctaacaaaactaggctgtcccgaacccctggtaatagaattgtttacctttataccaagaaggttgggaaagcaccaaaatctgcatgtggggtgtgccctcgtgccgcccactctcctctttccgccatctttccgcgccgccacaatggtgcgcatgaatgtcctggcagatgctctcaagagtatcaacaatgccgaaaagagaggcaaacgccaggtgcttattaggccgtgctccaaagtcatcgtccggtttctcactgtgatgatgaagcatggttacattggcgaatttgaaatcattgatgaccacagagctgggaaaattgttgtgaacctcacaggcaggctaaacaagtgtggggtgatcagccccagatttgacgtgcaactcaaagacctggaaaaatggcagaataatctgcttccatcccgccagtttggtttcattgtactgacaacctcagctggcatcatggaccatgaagaagcaagacgaaaacacacaggagggaaaatcctgggattctttttctagggatgtaatacatatatttacaaataaaatgcctcatggactctggtgcttccacttggtcgttttgagcctttacagcagtgtagccacagcttctgcggcagcatgcagttgcttcgtttatcggtgaatgcgattccctgaagtgactaatacagccaagggaaaaagttcttatgaaaccagtatgcctaagaaacagtcacccctgctgtctgccaaaaccaggttgcctcaatgaaataaaagaggatacaaacaaatggaagaacattccatgctcatgg

SEQ ID NO: 359768 - DNA, 885 bp, Homo sapiens
cccactctcctctttccggggacgttgtctgcaggcactcagaatggtccagcgtttgacataccgacgtaggctttcctacaatacagcctctaacaaaactaggctgtcccgaacccctggtaatagaattgtttacctttataccaagaaggttgggaaagcaccaaaatctgcatgtggggtgtgccctcgtgccgcccactctcctctttccgccatctttccgcgccgccacaatggtgcgcatgaatgtcctggcagatgctctcaagagtatcaacaatgccgaaaagagaggcaaacgccaggtgcttattaggccgtgctccaaagtcatcgtccggtttctcactgtgatgatgaagcatggttacattggcgaatttgaaatcattgatgaccacagagctgggaaaattgttgtgaacctcacaggcaggctaaacaagtgtggggtgatcagccccagatttgacgtgcaactcaaagacctggaaaaatggcagaataatctgcttccatcccgccagtttggtttcattgtactgacaacctcagctggcatcatggaccatgaagaagcaagacgaaaacacacaggagggaaaatcctgggattctttttctagggatgtaatacatatatttacaaataaaatgcctcatggacaaaaaaaaaaaaaaaaaaaaaaaaaaaaaaaaaaaaaaaaaaaaaaaaaacaaaaaaaaaaaaaaaaaaaaaaaaagaaaaaaaacgcttggccccctttttttttaatttgggagagtttttttgttcgggccaattttaggctcttttggccaattgccctttgggaggcggataaaacaaccggggccggttttacacgggggagaggg

SEQ ID NO: 359769 - DNA, 916 bp, Homo sapiens
cccactctcctctttccggggacgttgtctgcaggcactcagaatggtccagcgtttgacataccgacgtaggctttcctacaatacagcctctaacaaaactaggctgtcccgaacccctggtaatagaattgtttacctttataccaagaaggttgggaaagcaccaaaatctgcatgtggggtgtgccctcgtgccgcccactctcctctttccgccatctttccgcgccgccacaatggtgcgcatgaatgtcctggcagatgctctcaagagtatcaacaatgccgaaaagagaggcaaacgccaggtgcttattaggccgtgctccaaagtcatcgtccggtttctcactgtgatgatgaagcatggttacattggcgaatttgaaatcattgatgaccacagagctgggaaaattgttgtgaacctcacaggcaggctaaacaagtgtggggtgatcagccccagatttgacgtgcaactcaaagacctggaaaaatggcagaataatctgcttccatcccgccagtttggtttcattgtactgacaacctcagctggcatcatggaccatgaagaagcaagacgaaaacacacaggagggaaaatcctgggattctttttctagggatgtaatacatatatttacaaataaaatgcctcatggacaaaaaaaaaaaaaaaaaaaaaaaaaaaaaaaaaaaaaaaaaaaaaaaaaagccctggcggggcctatttttctgggggggggaaaaaagggtgttaaaaaaggggcactggggaaagtgtgttttccgtggcaccagtttttttttaaaaaggggggaaatatcggggggccccccatatagggggcatataaattcagaaaacccggttacctgtatatttttgttcaaaaacgcggaagaa

SEQ ID NO: 359770 - DNA, 1098 bp, Homo sapiens
cccactctcctctttccggggacgttgtctgcaggcactcagaatggtccagcgtttgacataccgacgtaggctttcctacaatacagcctctaacaaaactaggctgtcccgaacccctggtaatagaattgtttacctttataccaagaaggttgggaaagcaccaaaatctgcatgtggggtgtgccctcgtgccgcccactctcctctttccgccatctttccgcgccgccacaatggtgcgcatgaatgtcctggcagatgctctcaagagtatcaacaatgccgaaaagagaggcaaacgccaggtgcttattaggccgtgctccaaagtcatcgtccggtttctcactgtgatgatgaagcatggttacattggcgaatttgaaatcattgatgaccacagagctgggaaaattgttgtgaacctcacaggcaggctaaacaagtgtggggtgatcagccccagatttgacgtgcaactcaaagacctggaaaaatggcagaataatctgcttccatcccgccagtttggtttcattgtactgacaacctcagctggcatcatggaccatgaagaagcaagacgaaaacacacaggagggaaaatcctgggattctttttctagggatgtaatacatatatttacaaataaaatgcctcatggacaaaaaaaaaaaaaaaaaaaaaaaaaaaaaaaaaaaaaaaaaaaaaaaaaagggggggggcgccgcaaaaaaaatcccacggagagggacaccaattgttaccgcaccccccgcgttttttattaaaagaagggggccccccttatggggcgcggtttattatatacacgcgcgcggcgcggccgccccggtgttaaaaaaccgcgtgcgtcggtcggaggaacaaagcgcggtcgcgtggagctcttttttggagagagcccccatccttcctcgggggggggcgccacattggctcggccaccaccctccctctaggggatgtttttcccccctctcggggggtaatattacaccttttgccggcttcatttggctggctgtaccccccggcctattttttctgtgcgtccgttaggagacctt

SEQ ID NO: 359771 - DNA, 727 bp, Homo sapiens
gagaggcgcggggggctctctttccgccatctttccgcgccgccacaatggtgcgcatgaatgtcctggcagatgctctcaagagtatcaacaatgccgaaaagagaggcaaacgccaggtgcttattaggccgtgctccaaagtcatcgtccggtttctcactgtgatgatgaagcatggttacattggcgaatttgaaatcattgatgaccacagagctgggaaaattgttgtgaacctcacaggcaggctaaacaagtgtggggtgatcagccccagatttgacgtgcaactcaaagacctggaaaaatggcagaataatctgcttccatcccgccagtttggtttcattgtactgacaacctcagctggcatcatggaccatgaagaagcaagacgaaaacacacaggagggaaaatcctgggattctttttctagggatgtaatacatatatttacaaataaaatgcctcatggactctggtgcttccacttggtcgttttgagcctttacagcagtgtagccacagcttctgcggcagcatgcagttgcttcgtttatcggtgaatgcgattccctgaagtgactaatacagccaagggaaaaagttcttatgaaaccagtatgcctaagaaacagtcacccctgctgtctgccaaaaccaggttgcctcaatgaaataaaagaggatacaaacaaatggaagaacattccatgctcatgg

SEQ ID NO: 359772 - DNA, 1088 bp, Homo sapiens
  misc_feature (696)..(696): n is a, c, g, or t
  misc_feature (701)..(701): n is a, c, g, or t
  misc_feature (897)..(897): n is a, c, g, or t
  misc_feature (920)..(920): n is a, c, g, or t
  misc_feature (927)..(927): n is a, c, g, or t
  misc_feature (1007)..(1008): n is a, c, g, or t
  misc_feature (1013)..(1013): n is a, c, g, or t
  misc_feature (1016)..(1017): n is a, c, g, or t
  misc_feature (1019)..(1019): n is a, c, g, or t
  misc_feature (1022)..(1022): n is a, c, g, or t
  misc_feature (1024)..(1024): n is a, c, g, or t
  misc_feature (1034)..(1034): n is a, c, g, or t
  misc_feature (1037)..(1037): n is a, c, g, or t
  misc_feature (1044)..(1044): n is a, c, g, or t
cccactctcctctttccggggacgttgtctgcaggcactcagaatggtccagcgtttgacataccgacgtaggctttcctacaatacagcctctaacaaaactaggctgtcccgaacccctggtaatagaattgtttacctttataccaagaaggttgggaaagcaccaaaatctgcatgtggggtgtgccctcgtgccgcccactctcctctttccgccatctttccgcgccgccacaatggtgcgcatgaatgtcctggcagatgctctcaagagtatcaacaatgccgaaaagagaggcaaacgccaggtgcttattaggccgtgctccaaagtcatcgtccggtttctcactgtgatgatgaagcatggttacattggcgaatttgaaatcattgatgaccacagagctgggaaaattgttgtgaacctcacaggcaggctaaacaagtgtggggtgatcagccccagatttgacgtgcaactcaaagacctggaaaaatggcagaataatctgcttccatcccgccagtttggtttcattgtactgacaacctcagctggcatcatggaccatgaagaagcaagacgaaaacacacaggagggaaaatcctgggattctttttctagggatgtaatacatatatttacaaataaaatgcctcatggacaaaaaaaaaaaaaaaaaaaaacncgggnaaacaagttctctcttctctctccccgaaagggaaaaaaggccaggggaaaagaaggggggccccggccccagttgtccgtgaaaaaaccaggaggctaaagaaagggggtgaacccccgtgtttggaaaaagggcctaaaaattggggcatgggacaggacatccagcccaaaagagacctcacccgttttggtnaaatgggccccgaaatatcaggntggcagngcggaaaagagccatcctatataaaggggctgaaagtgcccccggggaataccagttcacccaggccctggaccgcaaanngtacncanngntangnggcccaagtncgnccgaganaggcgagaaaacgcaaatgtgccggcgaaaaggcgcgccaggga

SEQ ID NO: 359773 - DNA, 1258 bp, Homo sapiens
cccactctcctctttccggggacgttgtctgcaggcactcagaatggtccagcgtttgacataccgacgtaggctttcctacaatacagcctctaacaaaactaggctgtcccgaacccctggtaatagaattgtttacctttataccaagaaggttgggaaagcaccaaaatctgcatgtggggtgtgccctcgtgccgcccactctcctctttccgccatctttccgcgccgccacaatggtgcgcatgaatgtcctggcagatgctctcaagagtatcaacaatgccgaaaagagaggcaaacgccaggtgcttattaggccgtgctccaaagtcatcgtccggtttctcactgtgatgatgaagcatggttacattggcgaatttgaaatcattgatgaccacagagctgggaaaattgttgtgaacctcacaggcaggctaaacaagtgtggggtgatcagccccagatttgacgtgcaactcaaagacctggaaaaatggcagaataatctgcttccatcccgccagtttggtttcattgtactgacaacctcagctggcatcatggaccatgaagaagcaagacgaaaacacacaggagggaaaatcctgggattctttttctagggatgtaatacatatatttacaaataaaatgcctcatggacaaaaaaaaaaaaaaaaattctgggcacccggttacggcccaaaaccaaaggtccccggagaatccgggatgtaacaagggatggagcgaatcggggcccactcccacatccgggggactgggggctgggacagatgcctgggagcctcggaaggcttcgcaggggcatggggggtcagtggcggcacggcgggcgggtgcgtgttgctgaaaatgatccgggacgggaagatggccggcgggcagccttatgttggccagccgggcccggggaagacggcatccgcatggattggggagaggcctgggccgtgaaagcattcaaagcatcgccggaggggaaacctccccgggagatgagcaaacccagcgtgacgcgagctccgggggacacggcgcgatagaggaaccggagaccccgaggggggggggaacccaattgcaccgcagggcggcccaggggatgccaaaacaagatggacattagcgggcagaatgctctcgaggaggcggggcgaccgcgggggaaacaggggcaacgcgaatgcacactggcagggcacaagggggcaacccgcgtaggaag

SEQ ID NO: 359774 - DNA, 1308 bp, Homo sapiens
cccactctcctctttccggggacgttgtctgcaggcactcagaatggtccagcgtttgacataccgacgtaggctttcctacaatacagcctctaacaaaactaggctgtcccgaacccctggtaatagaattgtttacctttataccaagaaggttgggaaagcaccaaaatctgcatgtggggtgtgccctcgtgccgcccactctcctctttccgccatctttccgcgccgccacaatggtgcgcatgaatgtcctggcagatgctctcaagagtatcaacaatgccgaaaagagaggcaaacgccaggtgcttattaggccgtgctccaaagtcatcgtccggtttctcactgtgatgatgaagcatggttacattggcgaatttgaaatcattgatgaccacagagctgggaaaattgttgtgaacctcacaggcaggctaaacaagtgtggggtgatcagccccagatttgacgtgcaactcaaagacctggaaaaatggcagaataatctgcttccatcccgccagtttggtttcattgtactgacaacctcagctggcatcatggaccatgaagaagcaagacgaaaacacacaggagggaaaatcctgggattctttttctagggatgtaatacatatatttacaaataaaatgcctcatggacaaaaaaaaaaaaaaaaaaaaaaaaaaaaatgtgtgtgtgcggcgcgcgcccgcgcggccccctgcggaaaagctttcttgagaaaccattcgcgttgtgggcgccgcggggggcccacagaaggggataacgtggaaccacgtgcggcaataagcggtgttacccaagaggagaaactcggtggctcagaaacaaggtggatgggagactcctcacccaattataaaaagcaccccgcggcgggacaacaccagagagcggggtctagcggaacaaatctccccaaagatgaggggcactccccggagggcgccactactacagcgggggactcttataacaacaggagagggtccacacagcagagacgccgcgacaattatacaaaagatataacgcccccggaacgcggggagccaccaacacacgacgccacgcagggcaacgcacacccgaccaaaccaccaggggaacacgaaacacacacagaagcacgacgagccagctcccaacgggcccccaagaggcacgaagaccacccaggcaacaacaggcccgcggcgaagcagaacaccactcacccacaagcagccggaaaccacccgacgcacgccaccacagggaaaagccgaaca

SEQ ID NO: 359775 - DNA, 832 bp, Homo sapiens
cccactctcctctttccggggacgttgtctgcaggcactcagaatggtccagcgtttgacataccgacgtaggctttcctacaatacagcctctaacaaaactaggctgtcccgaacccctggtaatagaattgtttacctttataccaagaaggttgggaaagcaccaaaatctgcatgtggggtgtgccctcgtgccgcccactctcctctttccgccatctttccgcgccgccacaatggtgcgcatgaatgtcctggcagatgctctcaagagtatcaacaatgccgaaaagagaggcaaacgccaggtgcttattaggccgtgctccaaagtcatcgtccggtttctcactgtgatgatgaagcatggttacattggcgaatttgaaatcattgatgaccacagagctgggaaaattgttgtgaacctcacaggcaggctaaacaagtgtggggtgatcagccccagatttgacgtgcaactcaaagacctggaaaaatggcagaataatctgcttccatcccgccagtttggtttcattgtactgacaacctcagctggcatcatggaccatgaagaagcaagacgaaaacacacaggagggaaaatcctgggattctttttctagggatgtaatacatatatttacaaataaaatgcctcatggactctggtgcttccaaaaaaaaaaaaaaaaaccggggactagttcctctctctcgagagagagaactagtcctcgagttttttcttttcttttcccagggtctccaactctggtttaaactcttctataccgggtcccctttttttccccccttttttccg

SEQ ID NO: 359776 - DNA, 820 bp, Homo sapiens
cccactctcctctttccggggacgttgtctgcaggcactcagaatggtccagcgtttgacataccgacgtaggctttcctacaatacagcctctaacaaaactaggctgtcccgaacccctggtaatagaattgtttacctttataccaagaaggttgggaaagcaccaaaatctgcatgtggggtgtgccctcgtgccgcccactctcctctttccgccatctttccgcgccgccacaatggtgcgcatgaatgtcctggcagatgctctcaagagtatcaacaatgccgaaaagagaggcaaacgccaggtgcttattaggccgtgctccaaagtcatcgtccggtttctcactgtgatgatgaagcatggttacattggcgaatttgaaatcattgatgaccacagagctgggaaaattgttgtgaacctcacaggcaggctaaacaagtgtggggtgatcagccccagatttgacgtgcaactcaaagacctggaaaaatggcagaataatctgcttccatcccgccagtttggtttcattgtactgacaacctcagctggcatcatggaccatgaagaagcaagacgaaaacacacaggagggaaaatcctgggattctttttctagggatgtaatacatatatttacaaataaaatgcctcatggacaaatacgttctacggtcctaccaattattccccattgtcaatcacttggcccggtttggggtccaaaacctcaagggggggccgggaccccaattctccttatagcgagtcttattacactttactgcccgtggttttcaaacgctc

SEQ ID NO: 359777 - DNA, 704 bp, Homo sapiens
  misc_feature (15)..(15): n is a, c, g, or t
  misc_feature (23)..(23): n is a, c, g, or t
ggacgcgtgggtcgncccactcntccatctttccgcgccggtgagtagcactctctgagagctccaatttcatccgtctgccatcggcgccatcctgcaatctaagccacaatggtgcgcatgaatgtcctggcagatgctctcaagagtatcaacaatgccgaaaagagaggcaaacgccaggtgcttattaggccgtgctccaaagtcatcgtccggtttctcactgtgatgatgaagcatggttacattggcgaatttgaaatcattgatgaccacagagctgggaaaattgttgtgaacctcacaggcaggctaaacaagtgtggggtgatcagccccagatttgacgtgcaactcaaagacctggaaaaatggcagaataatctgcttccatcccgccagtttggtttcattgtactgacaacctcagctggcatcatggaccatgaagaagcaagacgaaaacacacaggagggaaaatcctgggattctttttctagggatgtaatacatatatttacaaataaaatgcctcatggactctggtgcttccaaaaaaaaaaaaaaaaaccggggactagttcctctctctcgagagagagaactagtcctcgagttttttcttttcttttcccagggtctccaactctggtttaaactcttctataccgggtcccctttttttccccccttttttccg

SEQ ID NO: 359778 - DNA, 738 bp, Homo sapiens
  misc_feature (15)..(15): n is a, c, g, or t
  misc_feature (23)..(23): n is a, c, g, or t
ggacgcgtgggtcgncccactcntccatctttccgcgccggtgagtagcactctctgagagctccaatttcatccgtctgccatcggcgccatcctgcaatctaagccacaatggtgcgcatgaatgtcctggcagatgctctcaagagtatcaacaatgccgaaaagagaggcaaacgccaggtgcttattaggccgtgctccaaagtcatcgtccggtttctcactgtgatgatgaagcatggttacattggcgaatttgaaatcattgatgaccacagagctgggaaaattgttgtgaacctcacaggcaggctaaacaagtgtggggtgatcagccccagatttgacgtgcaactcaaagacctggaaaaatggcagaataatctgcttccatcccgccagtttggtttcattgtactgacaacctcagctggcatcatggaccatgaagaagcaagacgaaaacacacaggagggaaaatcctgggattctttttctagggatgtaatacatatatttacaaataaaatgcctcatggacaaaaaaaaaaaaaaaaaaaaacttccggggctttttatattgtcggggtggcgggaaaaagggtgttttggaattgggcccttgggcctataagtctgttccctggacccagtttttttggtccaagggggaagtctggcccggtcccctaataggggagccgtataaattccgaaaagccgggtacccgcta

SEQ ID NO: 359779 - DNA, 746 bp, Homo sapiens
cccactctcctctttccggggacgttgtctgcaggcactcagaatggtccagcgtttgacataccgacgtaggctttcctacaatacagcctctaacaaaactaggctgtcccgaacccctggtaatagaattgtttacctttataccaagaaggttgggaaagcaccaaaatctgcatgtggggtgtgccctcgtgccgcccactctcctctttccgccatctttccgcgccgccacaatggtgcgcatgaatgtcctggcagatgctctcaagagtatcaacaatgccgaaaagagaggcaaacgccaggtgcttattaggccgtgctccaaagtcatcgtccggtttctcactgtgatgatgaagcatggttacattggcgaatttgaaatcattgatgaccacagagctgggaaaattgttgtgaacctcacaggcaggctaaacaagtgtggggtgatcagccccagatttgacgtgcaactcaaagacctggaaaaatggcagaataatctgcttccatcccgccagtttggaatttataccctccaaattatgcgtctggtgccttggttgaaagtattctcacttcatggttgctgtattacgtttcattgtactgacaacctcagctggcatcatggaccatgaagaagcaagacgaaaacacacaggagggaaaatcctgggattctttttctagggatgtaatacatatatttacaaataaaatgcctcatggac

SEQ ID NO: 359780 - DNA, 1210 bp, Homo sapiens
ttggcttcttggcctcgagcagtcctccccgctcagcctcttgtggatttgggaatacaggcgcctgccaccgtgcctggctatttgccacatttcatgtgttgagcttcaggttctgagaggcacatgagagcttagactggcagaaaaggggggtcgtgtccactttcatgtctgcccttttggctcactgcagatagttccctgtgatcccagatgagggccagaatcagttctaagcctaggcctttgggaaaacttagtttgggagtctttgtccttaaaagcctatctgagttcaaacccttgtttttctgctttaaagccatgagatcttgggcaagtcacagccttgatttcttcatccgtaaaagtggtaatagttcctctgtttatcacctgatttaattttggtaaagcactttatgagctgacacagtaaatgtgtatctttgtggttaagaatttataccctccaaattatgcgtctggtgccttggttgaaagtattctcacttcatggttgctgtattacaggtacggtattctcaccaaaatcatttctctttgtaattatgatactgattttaatgccgcacatttgcatactatatgcttgttacagtgatccccacagtaactcatgaagcagccactcattgtacaaatgaacgtctccatataatagtttagctattatacagtacatggcagaaacacaattcaaactcaagtttatacgaatactttcaagtctccttacctgagagcagaaagtgacatttaaatttaaaggagttcccagcctttgttttcagtgcagtttgtttcatggtgtaggcagaagtcagggctgtgtgattgtgtggctgggctctctggatttggctctttgggttgcaggagtcatggctcatacgctacatgaggcaccagctcatgtaggcactgtcagttcctatgtgccccacaggaaagcgcccttaaccactgatgagtgttgatgtttttctgcactagaaggcactatgttgaactattaaacttaccagcactttctttttccactccatagtttcattgtactgacaacctcagctggcatcatggaccatgaagaagcaagacgaaaacacacaggagggaaaatcctgggattctttttctagggatgtaatacatatatttacaaataaaatgcctcatggac

SEQ ID NO: 359781 - DNA, 548 bp, Homo sapiens
gcggccgcgctgggagcttgggaggctgaggccacccagcacaggtaaaagctgcatcgtgccggggttggcagtttgctgggtgccaacttggatcttctgggccgcagagtttttctttagacacttttgaacttaaggaatttaagttctactctttactattggcactttggtctttcaaaacttcagtgtagtgtgcggttcttgcccattagaagagagtccagtctgacaagcatgtaaaatgtttctgtttgccactgtggctcttgctgttggacgcaattttaaatggcacgaagatggatgtttaatagttagatgtgttcattgtaggtgagagtgaactgatttaaagtacaatgttaatagtatggaatctgctgattttcagcaatttggaaaatgttgccgatgatactctgcttctgttctgaatcactgatcgactatacccgatgttttccttccggtagctggcagtttctgccagttctcacgttgtcttgtgtcaagtggattttgtcccacattttattatctcc

SEQ ID NO: 359782 - DNA, 713 bp, Homo sapiens
aggcggaggttacagtgagctgagatcgcaccactgcactccagcctgggtaacagggcaagactccctaagatttgaagaacttgcaagggtaattttcagtatgtcatgttttgttctagttgtagccattagaaccccacctcaaaataggattgatttatttttatttatatttcttttgagatagtcttgctctggttgaggctggagtgcagtggcgccatcttggctcactgcagcttccctagctcaagccatcctcccacctcagcctcctgagtagctggggaatacaggtgcattccactgtgactgctgatttttctttaacttttttgtagaggtggggtctcgctatgttgcttaggtttgtcttggactcatgggctcaagtgatcctcccacctcagcctcccagagtgctgggattacaggtgtgagtcactgggcccagccgagaaataaatttgaacagagcattctgtaaatggaacttatttgtggcacccttgttctgtggtatgctagtttgaaaaattctagcctacaacagttgatatgcaggccctgctgctctctgcccgttttttgagacggagtctcactctcacccaggttggagtgcagtggcacgatcttggctactgcaacctctgtctcccaggttcaagcgattctcctgcctcagcctccctagtagctgagattac

SEQ ID NO: 359783 - DNA, 912 bp, Homo sapiens
  misc_feature (1)..(1): n is a, c, g, or t
  misc_feature (14)..(14): n is a, c, g, or t
  misc_feature (47)..(47): n is a, c, g, or t
  misc_feature (67)..(67): n is a, c, g, or t
  misc_feature (73)..(73): n is a, c, g, or t
nccccgggaaacgnctttgaccttgattccgaatttaatccgactcncttatggggaatttggcccntcgagnccaagaattcggaacgagggtctttccgcgccgccacaatggtgcgcatgaatgtcctggcagatgctctcaagagtatcaacaatgccgaaaagagaggcaaacgccaggtgcttattaggccgtgctccaaagtcatcgtccggtttctcactgtgatgatgaagcatggttacattggcgaatttgaaatcattgatgaccacagagctgggaaaattgttgtgaacctcacaggcaggctaaacaagtgtggggtgatcagccccagatttgacgtgcaactcaaagacctggaaaaatggcagaataatctgcttccatcccgccagtttggtttcattgtactgacaacctcagctggcatcatggaccatgaagaagcaagacgaaaacacacaggagggaaaatcctgggattctttttctagggatgtaatacatatatttacaaataaaatgcctcatggactctggtgcttccacttggtcgttttgagcctttacagcagtgtagccacagcttctgcggcagcatgcagttgcttcgtttatcggtgaatgcgattccctgaagtgactaatacagccaagggaaaaagttcttatgaaaccagtatgcctaagaaacagtcacccctgctgtctgccaaaaccaggtatttgacactaaatattttagttgtatttcagttttttttttttttttcttttttggagacagagtctgactctattgctcaggctggagtgcagtggcgcgatcttggcccactgcaacctccacctcccgggttcaagtgattgtcctgtctcagccgcctgagtaactgggatta

SEQ ID NO: 359784 - DNA, 1130 bp, Homo sapiens
  misc_feature (15)..(15): n is a, c, g, or t
  misc_feature (23)..(23): n is a, c, g, or t
ggacgcgtgggtcgncccactcntccatctttccgcgccggtgagtagcactctctgagagctccaatttcatccgtctgccatcggcgccatcctgcaatctaagccacaatggtgcgcatgaatgtcctggcagatgctctcaagagtatcaacaatgccgaaaagagaggcaaacgccaggtgcttattaggccgtgctccaaagtcatcgtccggtttctcactgtgatgatgaagcatggttacattggcgaatttgaaatcattgatgaccacagagctgggaaaattgttgtgaacctcacaggcaggctaaacaagtgtggggtgatcagccccagatttgacgtgcaactcaaagacctggaaaaatggcagaataatctgcttccatcccgccagtttggtttcattgtactgacaacctcagctggcatcatggaccatgaagaagcaagacgaaaacacacaggagggaaaatcctgggattctttttctagggatgtaatacatatatttacaaataaaatgcctcatggacaaaaaaaaaaaaaaaaattctgggcacccggttacggcccaaaaccaaaggtccccggagaatccgggatgtaacaagggatggagcgaatcggggcccactcccacatccgggggactgggggctgggacagatgcctgggagcctcggaaggcttcgcaggggcatggggggtcagtggcggcacggcgggcgggtgcgtgttgctgaaaatgatccgggacgggaagatggccggcgggcagccttatgttggccagccgggcccggggaagacggcatccgcatggattggggagaggcctgggccgtgaaagcattcaaagcatcgccggaggggaaacctccccgggagatgagcaaacccagcgtgacgcgagctccgggggacacggcgcgatagaggaaccggagaccccgaggggggggggaacccaattgcaccgcagggcggcccaggggatgccaaaacaagatggacattagcgggcagaatgctctcgaggaggcggggcgaccgcgggggaaacaggggcaacgcgaatgcacactggcagggcacaagggggcaacccgcgtaggaag

SEQ ID NO: 359785 - DNA, 673 bp, Homo sapiens
cccactctcctctttccggggacgttgtctgcaggcactcagaatggtccagcgtttgacataccgacgtaggctttcctacaatacagcctctaacaaaactaggctgtcccgaacccctggtaatagaattgtttacctttataccaagaaggttgggaaagcaccaaaatctgcatgtggggtgtgccctcgtgccgcccactctcctctttccgccatctttccgcgccgccacaatggtgcgcatgaatgtcctggcagatgctctcaagagtatcaacaatgccgaaaagagaggcaaacgccaggtgcttattaggccgtgctccaaagtcatcgtccggtttctcactgtgatgatgaagcatggttacattggcgaatttgaaatcattgatgaccacagagctgggaaaattgttgtgaacctcacaggcaggctaaacaagtgtggggtgatcagccccagatttgacgtgcaactcaaagacctggaaaaatggcagaataatctgcttccatcccgccagtttggtttcattgtactgacaacctcagctggcatcatggaccatgaagaagcaagacgaaaacacacaggagggaaaatcctgggattctttttctagggatgtaatacatatatttacaaataaaatgcctcatggac

SEQ ID NO: 359786 - DNA, 1040 bp, Homo sapiens
cccactctcctctttccggggacgttgtctgcaggcactcagaatggtccagcgtttgacataccgacgtaggctttcctacaatacagcctctaacaaaactaggctgtcccgaacccctggtaatagaattgtttacctttataccaagaaggttgggaaagcaccaaaatctgcatgtggggtgtgccctcgtgccgcccactctcctctttccgccatctttccgcgccgccacaatggtgcgcatgaatgtcctggcagatgctctcaagagtatcaacaatgccgaaaagagaggcaaacgccaggtgcttattaggccgtgctccaaagtcatcgtccggtttctcactgtgatgatgaagcatggttacattggcgaatttgaaatcattgatgaccacagagctgggaaaattgttgtgaacctcacaggcaggctaaacaagtgtggggtgatcagccccagatttgacgtgcaactcaaagacctggaaaaatggcagaataatctgcttccatcccgccagtttggtttcattgtactgacaacctcagctggcatcatggaccatgaagaagcaagacgaaaacacacaggagggaaaatcctgggattctttttctagggatgtaatacatatatttacaaataaaatgcctcatggactctggtgcttccacttggtcgttttgagcctttacagcagtgtagccacagcttctgcggcagcatgcagttgcttcgtttatcggtgaatgcgattccctgaagtgactaatacagccaagggaaaaagttcttatgaaaccagtatgcctaagaaacagtcacccctgctgtctgccaaaaccaggtatttgacactaaatattttagttgtatttcagttttttttttttttttcttttttggagacagagtctgactctattgctcaggctggagtgcagtggcgcgatcttggcccactgcaacctccacctcccgggttcaagtgattgtcctgtctcagccgcctgagtaactgggatta

SEQ ID NO: 359787 - DNA, 1044 bp, Homo sapiens
cccactctcctctttccggggacgttgtctgcaggcactcagaatggtccagcgtttgacataccgacgtaggctttcctacaatacagcctctaacaaaactaggctgtcccgaacccctggtaatagaattgtttacctttataccaagaaggttgggaaagcaccaaaatctgcatgtggggtgtgccctcgtgccgcccactctcctctttccgccatctttccgcgccgccacaatggtgcgcatgaatgtcctggcagatgctctcaagagtatcaacaatgccgaaaagagaggcaaacgccaggtgcttattaggccgtgctccaaagtcatcgtccggtttctcactgtgatgatgaagcatggttacattggcgaatttgaaatcattgatgaccacagagctgggaaaattgttgtgaacctcacaggcaggctaaacaagtgtggggtgatcagccccagatttgacgtgcaactcaaagacctggaaaaatggcagaataatctgcttccatcccgccagtttggtttcattgtactgacaacctcagctggcatcatggaccatgaagaagcaagacgaaaacacacaggagggaaaatcctgggattctttttctagggatgtaatacatatatttacaaataaaatgcctcatggacaaaaaaaaaaaaaaaaaaaaaaaaaaaaaaaaaaaaaaaaaaaaaaaaaagggggggggggtaaaaaatttcccggggggggcccaattttgggtcccgttttttttggtaaggggggccccatattgaaggaggcgtattataaaagctagggcgggggcgcctgttttataaaacgtgtgtgtagtgggaaaaagggtccgcttggcgacattttgggagaagaaacactactctctgtgggggggacaatttgtgggaaattcttaggagtataaggttccgggaaaataaaatctgggggttagtgtgtgtaacagcgcatatgtgcgtgagaatgtctgggtgtatataatatgggcaacataagt

SEQ ID NO: 359788 - DNA, 1324 bp, Homo sapiens
  misc_feature (810)..(810): n is a, c, g, or t
  misc_feature (815)..(815): n is a, c, g, or t
cccactctcctctttccggggacgttgtctgcaggcactcagaatggtccagcgtttgacataccgacgtaggctttcctacaatacagcctctaacaaaactaggctgtcccgaacccctggtaatagaattgtttacctttataccaagaaggttgggaaagcaccaaaatctgcatgtggggtgtgccctcgtgccgcccactctcctctttccgccatctttccgcgccgccacaatggtgcgcatgaatgtcctggcagatgctctcaagagtatcaacaatgccgaaaagagaggcaaacgccaggtgcttattaggccgtgctccaaagtcatcgtccggtttctcactgtgatgatgaagcatggttacattggcgaatttgaaatcattgatgaccacagagctgggaaaattgttgtgaacctcacaggcaggctaaacaagtgtggggtgatcagccccagatttgacgtgcaactcaaagacctggaaaaatggcagaataatctgcttccatcccgccagtttggtttcattgtactgacaacctcagctggcatcatggaccatgaagaagcaagacgaaaacacacaggagggaaaatcctgggattctttttctagggatgtaatacatatatttacaaataaaatgcctcatggacaaaaaaaaaaaaaaaaaaaaaaaaaaaaaaaaaaaaaaaaaaaaaaaaaaaaaaaaaaaaaaaaaaaaaaaaaaaaaaaaaacaaaaaaaagaaaaaaaaaaacaaaaaagaaaacaaaaaaaaaacaagaaaaaanaaaanacaaagagagcgggggcccactatagcacattatatgtcgcacagagcgagagacaaacctatacgtccactaccacgccatacttattttacagcagacagtgcccctaaaattgataggtgtacttatctgaaagaagagaggcgaggccgagactcggatattatctactcctctgtggtgtgacagcacaatggacttgttagcggatgacttatctagcgtagagaagcgaaccacaaccagacgagaggcggacggcaagcacaacatatgaatgaaacacgacaacccacccacgcaacaagagctgaactacttaactgcgacatggaaccgaacatagtaactaaactaactaccacctagcatgagatgataatcaagatgatagatgacgcataacaaaaccacgaagaatataccgcacgcacgaggacacagaaagcaagagccatccctagcacagctgaatcactatagagaacacaataaaattttacgccgc

SEQ ID NO: 359789 - DNA, 723 bp, Homo sapiens
  misc_feature (688)..(688): n is a, c, g, or t
  misc_feature (698)..(698): n is a, c, g, or t
cccactctcctctttccggggacgttgtctgcaggcactcagaatggtccagcgtttgacataccgacgtaggctttcctacaatacagcctctaacaaaactaggctgtcccgaacccctggtaatagaattgtttacctttataccaagaaggttgggaaagcaccaaaatctgcatgtggggtgtgccctcgtgccgcccactctcctctttccgccatctttccgcgccgccacaatggtgcgcatgaatgtcctggcagatgctctcaagagtatcaacaatgccgaaaagagaggcaaacgccaggtgcttattaggccgtgctccaaagtcatcgtccggtttctcactgtgatgatgaagcatggttacattggcgaatttgaaatcattgatgaccacagagctgggaaaattgttgtgaacctcacaggcaggctaaacaagtgtggggtgatcagccccagatttgacgtgcaactcaaagacctggaaaaatggcagaataatctgcttccatcccgccagtttggtttcattgtactgacaacctcagctggcatcatggaccatgaagaagcaagacgaaaacacacaggagggaaaatcctgggattctttttctagggatgtaatacatatatttacaaataaaatgcctcatggactctggtgaaaaaaanaagtcgagcngccgcgaatttagtagtagtagtcg

SEQ ID NO: 359790 - DNA, 1248 bp, Homo sapiens
cccactctcctctttccggggacgttgtctgcaggcactcagaatggtccagcgtttgacataccgacgtaggctttcctacaatacagcctctaacaaaactaggctgtcccgaacccctggtaatagaattgtttacctttataccaagaaggttgggaaagcaccaaaatctgcatgtggggtgtgccctcgtgccgcccactctcctctttccgccatctttccgcgccgccacaatggtgcgcatgaatgtcctggcagatgctctcaagagtatcaacaatgccgaaaagagaggcaaacgccaggtgcttattaggccgtgctccaaagtcatcgtccggtttctcactgtgatgatgaagcatggttacattggcgaatttgaaatcattgatgaccacagagctgggaaaattgttgtgaacctcacaggcaggctaaacaagtgtggggtgatcagccccagatttgacgtgcaactcaaagacctggaaaaatggcagaataatctgcttccatcccgccagtttggtttcattgtactgacaacctcagctggcatcatggaccatgaagaagcaagacgaaaacacacaggagggaaaatcctgggattctttttctagggatgtaatacatatatttacaaataaaatgcctcatggacaaaaaaaaaaaaaaaaacaaaaaacaaaagaacgcgcgcccaaacacaaaacaaatcacacacaacagagagacaccatgcgaatcaacagcaaaaaccacaacggatcgctgacgacacaaagaggcaccccccaaaacgagaaggctcgaacactacagcacgttgcgaccacgagcccacacagtcacaacggtgacccagacgccgggaacaaccgtgagtcaccagaggcgccgacaaatcggccgcacaccggacaccccccaaccctcgcccaggcaggcaacgaaccacccactcgaggaaaaaagaccaccaccacaaaacaacaaacaaaccaccaacaaggtaacacctcgcaagcgccccccaccccgcgtacacaaagcggcaacacaaggaccgcgagcccccagagcccagaacgacacgccacgcctgcccccgccagcacacgacacgcaagccaacagcacgacacaacgtccccagccaccacgcacgcccccacaccaccccatcccaaaagaacgagaaagaggcgcacgcaccacgagcgacaccgcacgaag

SEQ ID NO: 359791 - DNA, 1274 bp, Homo sapiens
  misc_feature (760)..(760): n is a, c, g, or t
  misc_feature (765)..(765): n is a, c, g, or t
cccactctcctctttccggggacgttgtctgcaggcactcagaatggtccagcgtttgacataccgacgtaggctttcctacaatacagcctctaacaaaactaggctgtcccgaacccctggtaatagaattgtttacctttataccaagaaggttgggaaagcaccaaaatctgcatgtggggtgtgccctcgtgccgcccactctcctctttccgccatctttccgcgccgccacaatggtgcgcatgaatgtcctggcagatgctctcaagagtatcaacaatgccgaaaagagaggcaaacgccaggtgcttattaggccgtgctccaaagtcatcgtccggtttctcactgtgatgatgaagcatggttacattggcgaatttgaaatcattgatgaccacagagctgggaaaattgttgtgaacctcacaggcaggctaaacaagtgtggggtgatcagccccagatttgacgtgcaactcaaagacctggaaaaatggcagaataatctgcttccatcccgccagtttggtttcattgtactgacaacctcagctggcatcatggaccatgaagaagcaagacgaaaacacacaggagggaaaatcctgggattctttttctagggatgtaatacatatatttacaaataaaatgcctcatggacaaaaaaaaaaaaaaaaaaaaaaaaaaaaaaaacaaaaaaaagaaaaaaaaaaacaaaaaagaaaacaaaaaaaaaacaagaaaaaanaaaanacaaagagagcgggggcccactatagcacattatatgtcgcacagagcgagagacaaacctatacgtccactaccacgccatacttattttacagcagacagtgcccctaaaattgataggtgtacttatctgaaagaagagaggcgaggccgagactcggatattatctactcctctgtggtgtgacagcacaatggacttgttagcggatgacttatctagcgtagagaagcgaaccacaaccagacgagaggcggacggcaagcacaacatatgaatgaaacacgacaacccacccacgcaacaagagctgaactacttaactgcgacatggaaccgaacatagtaactaaactaactaccacctagcatgagatgataatcaagatgatagatgacgcataacaaaaccacgaagaatataccgcacgcacgaggacacagaaagcaagagccatccctagcacagctgaatcactatagagaacacaataaaattttacgccgc

SEQ ID NO: 359792 - DNA, 790 bp, Homo sapiens
cccactctcctctttccggggacgttgtctgcaggcactcagaatggtccagcgtttgacataccgacgtaggctttcctacaatacagcctctaacaaaactaggctgtcccgaacccctggtaatagaattgtttacctttataccaagaaggttgggaaagcaccaaaatctgcatgtggggtgtgccctcgtgccgcccactctcctctttccgccatctttccgcgccgccacaatggtgcgcatgaatgtcctggcagatgctctcaagagtatcaacaatgccgaaaagagaggcaaacgccaggtgcttattaggccgtgctccaaagtcatcgtccggtttctcactgtgatgatgaagcatggttacattggcgaatttgaaatcattgatgaccacagagctgggaaaattgttgtgaacctcacaggcaggctaaacaagtgtggggtgatcagccccagatttgacgtgcaactcaaagacctggaaaaatggcagaataatctgcttccatcccgccagtttggtttcattgtactgacaacctcagctggcatcatggaccatgaagaagcaagacgaaaacacacaggagggaaaatcctgggattctttttctagggatgaaagcctcgacatgaagctttcatcccccttatctatccatttggcttttaattttttgatatagaacaaacaggagagagagtgaaatgtgtggttaagagccttggcatgaaggcgctcgacatgaatcatgtcgaggccctcgatatgaa

SEQ ID NO: 359793 - DNA, 1285 bp, Homo sapiens
cccactctcctctttccggggacgttgtctgcaggcactcagaatggtccagcgtttgacataccgacgtaggctttcctacaatacagcctctaacaaaactaggctgtcccgaacccctggtaatagaattgtttacctttataccaagaaggttgggaaagcaccaaaatctgcatgtggggtgtgccctcgtgccgcccactctcctctttccgccatctttccgcgccgccacaatggtgcgcatgaatgtcctggcagatgctctcaagagtatcaacaatgccgaaaagagaggcaaacgccaggtgcttattaggccgtgctccaaagtcatcgtccggtttctcactgtgatgatgaagcatggttacattggcgaatttgaaatcattgatgaccacagagctgggaaaattgttgtgaacctcacaggcaggctaaacaagtgtggggtgatcagccccagatttgacgtgcaactcaaagacctggaaaaatggcagaataatctgcttccatcccgccagtttggaatttataccctccaaattatgcgtctggtgccttggttgaaagtattctcacttcatggttgctgtattacaggtacggtattctcaccaaaatcatttctctttgtaattatgatactgattttaatgccgcacatttgcatactatatgcttgttacagtgatccccacagtaactcatgaagcagccactcattgtacaaatgaacgtctccatataatagtttagctattatacagtacatggcagaaacacaattcaaactcaagtttatacgaatactttcaagtctccttacctgagagcagaaagtgacatttaaatttaaaggagttcccagcctttgttttcagtgcagtttgtttcatggtgtaggcagaagtcagggctgtgtgattgtgtggctgggctctctggatttggctctttgggttgcaggagtcatggctcatacgctacatgaggcaccagctcatgtaggcactgtcagttcctatgtgccccacaggaaagcgcccttaaccactgatgagtgttgatgtttttctgcactagaaggcactatgttgaactattaaacttaccagcactttctttttccactccatagtttcattgtactgacaacctcagctggcatcatggaccatgaagaagcaagacgaaaacacacaggagggaaaatcctgggattctttttctagggatgtaatacatatatttacaaataaaatgcctcatggac

SEQ ID NO: 359794 - DNA, 1886 bp, Homo sapiens
  misc_feature (1372)..(1372): n is a, c, g, or t
  misc_feature (1377)..(1377): n is a, c, g, or t
cccactctcctctttccggggacgttgtctgcaggcactcagaatggtccagcgtttgacataccgacgtaggctttcctacaatacagcctctaacaaaactaggctgtcccgaacccctggtaatagaattgtttacctttataccaagaaggttgggaaagcaccaaaatctgcatgtggggtgtgccctcgtgccgcccactctcctctttccgccatctttccgcgccgccacaatggtgcgcatgaatgtcctggcagatgctctcaagagtatcaacaatgccgaaaagagaggcaaacgccaggtgcttattaggccgtgctccaaagtcatcgtccggtttctcactgtgatgatgaagcatggttacattggcgaatttgaaatcattgatgaccacagagctgggaaaattgttgtgaacctcacaggcaggctaaacaagtgtggggtgatcagccccagatttgacgtgcaactcaaagacctggaaaaatggcagaataatctgcttccatcccgccagtttggaatttataccctccaaattatgcgtctggtgccttggttgaaagtattctcacttcatggttgctgtattacaggtacggtattctcaccaaaatcatttctctttgtaattatgatactgattttaatgccgcacatttgcatactatatgcttgttacagtgatccccacagtaactcatgaagcagccactcattgtacaaatgaacgtctccatataatagtttagctattatacagtacatggcagaaacacaattcaaactcaagtttatacgaatactttcaagtctccttacctgagagcagaaagtgacatttaaatttaaaggagttcccagcctttgttttcagtgcagtttgtttcatggtgtaggcagaagtcagggctgtgtgattgtgtggctgggctctctggatttggctctttgggttgcaggagtcatggctcatacgctacatgaggcaccagctcatgtaggcactgtcagttcctatgtgccccacaggaaagcgcccttaaccactgatgagtgttgatgtttttctgcactagaaggcactatgttgaactattaaacttaccagcactttctttttccactccatagtttcattgtactgacaacctcagctggcatcatggaccatgaagaagcaagacgaaaacacacaggagggaaaatcctgggattctttttctagggatgtaatacatatatttacaaataaaatgcctcatggacaaaaaaaaaaaaaaaaaaaaaaaaaaaaaaaacaaaaaaaagaaaaaaaaaaacaaaaaagaaaacaaaaaaaaaacaagaaaaaanaaaanacaaagagagcgggggcccactatagcacattatatgtcgcacagagcgagagacaaacctatacgtccactaccacgccatacttattttacagcagacagtgcccctaaaattgataggtgtacttatctgaaagaagagaggcgaggccgagactcggatattatctactcctctgtggtgtgacagcacaatggacttgttagcggatgacttatctagcgtagagaagcgaaccacaaccagacgagaggcggacggcaagcacaacatatgaatgaaacacgacaacccacccacgcaacaagagctgaactacttaactgcgacatggaaccgaacatagtaactaaactaactaccacctagcatgagatgataatcaagatgatagatgacgcataacaaaaccacgaagaatataccgcacgcacgaggacacagaaagcaagagccatccctagcacagctgaatcactatagagaacacaataaaattttacgccgc

SEQ ID NO: 359795 - DNA, 770 bp, Homo sapiens
cccactctcctctttccggggacgttgtctgcaggcactcagaatggtccagcgtttgacataccgacgtaggctttcctacaatacagcctctaacaaaactaggctgtcccgaacccctggtaatagaattgtttacctttataccaagaaggttgggaaagcaccaaaatctgcatgtggggtgtgccctcgtgccgcccactctcctctttccgccatctttccgcgccgccacaatggtgcgcatgaatgtcctggcagatgctctcaagagtatcaacaatgccgaaaagagaggcaaacgccaggtgcttattaggccgtgctccaaagtcatcgtccggtttctcactgtgatgatgaagcatggttacattggcgaatttgaaatcattgatgaccacagagctgggaaaattgttgtgaacctcacaggcaggctaaacaaggttggagtgcagtggcacgatcttggctactgcaacctctgtctcccaggttcaagcgattctcctgcctcagcctccctagtagctgagattacagtgtggggtgatcagccccagatttgacgtgcaactcaaagacctggaaaaatggcagaataatctgcttccatcccgccagtttggtttcattgtactgacaacctcagctggcatcatggaccatgaagaagcaagacgaaaacacacaggagggaaaatcctgggattctttttctagggatgtaatacatatatttacaaataaaatgcctcatggac

SEQ ID NO: 359796 - DNA, 916 bp, Homo sapiens
  misc_feature (15)..(15): n is a, c, g, or t
  misc_feature (23)..(23): n is a, c, g, or t
ggacgcgtgggtcgncccactcntccatctttccgcgccggtgagtagcactctctgagagctccaatttcatccgtctgccatcggcgccatcctgcaatctaagccacaatggtgcgcatgaatgtcctggcagatgctctcaagagtatcaacaatgccgaaaagagaggcaaacgccaggtgcttattaggccgtgctccaaagtcatcgtccggtttctcactgtgatgatgaagcatggttacattggcgaatttgaaatcattgatgaccacagagctgggaaaattgttgtgaacctcacaggcaggctaaacaagtgtggggtgatcagccccagatttgacgtgcaactcaaagacctggaaaaatggcagaataatctgcttccatcccgccagtttggtttcattgtactgacaacctcagctggcatcatggaccatgaagaagcaagacgaaaacacacaggagggaaaatcctgggattctttttctagggatgtaatacatatatttacaaataaaatgcctcatggacaaaaaaaaaaaaaaaaaaaaaaaaaaaaaaaaaaaaaaaaaaaaaaaaaagggggggggggtaaaaaatttcccggggggggcccaattttgggtcccgttttttttggtaaggggggccccatattgaaggaggcgtattataaaagctagggcgggggcgcctgttttataaaacgtgtgtgtagtgggaaaaagggtccgcttggcgacattttgggagaagaaacactactctctgtgggggggacaatttgtgggaaattcttaggagtataaggttccgggaaaataaaatctgggggttagtgtgtgtaacagcgcatatgtgcgtgagaatgtctgggtgtatataatatgggcaacataagt

SEQ ID NO: 359797 - DNA, 545 bp, Homo sapiens
  misc_feature (15)..(15): n is a, c, g, or t
  misc_feature (23)..(23): n is a, c, g, or t
ggacgcgtgggtcgncccactcntccatctttccgcgccggtgagtagcactctctgagagctccaatttcatccgtctgccatcggcgccatcctgcaatctaagccacaatggtgcgcatgaatgtcctggcagatgctctcaagagtatcaacaatgccgaaaagagaggcaaacgccaggtgcttattaggccgtgctccaaagtcatcgtccggtttctcactgtgatgatgaagcatggttacattggcgaatttgaaatcattgatgaccacagagctgggaaaattgttgtgaacctcacaggcaggctaaacaagtgtggggtgatcagccccagatttgacgtgcaactcaaagacctggaaaaatggcagaataatctgcttccatcccgccagtttggtttcattgtactgacaacctcagctggcatcatggaccatgaagaagcaagacgaaaacacacaggagggaaaatcctgggattctttttctagggatgtaatacatatatttacaaataaaatgcctcatggac

SEQ ID NO: 359798 - DNA, 540 bp, Homo sapiens
aaatttagagtcttgctatgttgctcagactgatctcgaactcctgagctcaagtgatcctccttctcagcttcctgagtagctgggactataataggctttgtgccaccatgcccagcttacttttttctatttctgctttattttatcctcatgtctggaccatagatagatcattgttatccaccagcaagaatgtgtcatggcataaaacagtcaagaaatctaagtgaaaccttgactgggctgtctttgggcttgtgcggtaatgcctcacatgcagtgaactctcaacaaatggcttttaaattgaattggaatcttccatttctatattagcacattttgtacctttaggaaaaacttgattttaatgtgttgttttcgtatgtgtttgcttgtttcttgagtagctgatggatttacaactgagtgacagtaactttcgtcgacacatcctgttgcagtatctcattttattccaatatctcaaggggcaggtcaaattcaaaaggtaagataatatgggtagtaaacaat

SEQ ID NO: 359799 - DNA, 448 bp, Homo sapiens
aaaccttgttattttttgaagataatcttttcaaatcacaaagacaatttagcaacattacaaaacatttagaaataagaagggaaaacagtactcttaattcctctacttttaaaagctaccattcatctggtataatggttttagtttctatagtcttttaagaattttttttattgtcataaccatatgtacatacaattttgaatcctgccttttttcacttagcattatatcataagcatttttccaagttattatagtcgttataaccatcatttttaattggctgcattatattcttttgaatagcttagtggtgaagaaaacagactgtggagccagactgcctgggttcgtatcccagctctaccacttactggctctatgatcttggtgaagttatttaacctctctgtgtctcagttttcccattctataaaatgca

SEQ ID NO: 359800 - DNA, 3991 bp, Homo sapiens
agcggcagtggcgggcacgcgcagccgagaagatgtctccgacgccgccgctcttcagtttgcccgaagcgcggacgcggtttacgaagtctaccagagaggccttgaacaacaaaaacatcaagccattgttaagtaccttcagccaggtacctggcagtgaaaatgaaaaaaaatgtacccttgaccaagctttcagaggtattctagaagaagaaattataaatcattcatcatgtgaaaacgttttagctattatttctcttgctattgggggagtaactgaaggtatttgtaccgcatctacaccttttgtattgttgggagatgttttggattgtcttcctttggatcagtgtgacacaatattcacttttgtggaaaaaaatgttgctacttggaaatcaaatacattctattctgctgggaaaaattacttactacgtatgtgcaatgatctcctaagaagattgtctaaatcccagaatacagtcttctgtggacggattcagctctttttggccaggcttttccctctgtctgagaaatcaggtcttaacttgcagagtcagtttaatctggaaaatgtcactgttttcaatacaaatgagcaggaaagcaccctgggtcagaagcacactgaagatagagaagaaggaatggatgtagaagaaggcgaaatgggagatgaggaagctccaacaacgtgctctattccaattgattacaacctgtatcgaaaattctggtcacttcaggattacttcaggaaccctgtgcaatgctatgagaagatttcatggaaaacttttctcaagtattctgaagaagttttagctgtttttaagagttataaattagatgatactcaggcctcaagaaaaaagatggaagaattgaaaacaggaggagaacatgtatattttgcaaaatttttaacaagtgaaaagctgatggatttacaactgagtgacagtaactttcgtcgacacatcctgttgcagtatctcattttattccaatatctcaaggggcaggtcaaattcaaaagttcaaactatgttttaactgatgagcaatcactttggattgaagatactacaaaatcagtttatcaactactatctgaaaacccccccgatggagaaagattttcaaagatggtagagcatatattaaacactgaagaaaactggaactcgtggaaaaatgaaggttgcccaagttttgtgaaagaaagaacatcagataccaaacctacgagaataattcggaagagaacagcacccgaggacttcctagggaaaggacccaccaaaaaaattctgatgggaaatgaggagttaacaaggctttggaatctttgccctgataatatggaagcctgtaaatcagagacaagggaacacatgcccactttggaggaattctttgaagaagccattgaacaggcagaccctgaaaatatggtggaaaatgaatataaggctgtgaacaattcaaattatggttggagagccctgagactattagcacggagaagccctcacttcttccagccaaccaaccagcagtttaaaagtttaccagaatatcttgaaaatatggtaataaagctagccaaggaattaccgcctccttctgaagaaataaaaacaggtgaggatgaagatgaggaagataatgatgctctactgaaggaaaatgaaagtcctgatgttcggcgagacaaacctgtaacaggagaacaaatagaggtatttgccaacaagctgggtgaacaatggaagattctggctccctacttggaaatgaaagactcagaaattaggcagattgagtgtgacagtgaagacatgaagatgagagctaagcagctcctggttgcctggcaagatcaagagggagttcatgcaacacctgagaatctgattaatgcactgaataagtctggattaagtgaccttgcagaaagtctaactaatgacaatgagacaaatagttagcttcttttttttttctttttattaaaactgtgatagattttgttaccaagcagcatttgataagaggtccactggttttggtaaacaataaacatttttataacaattgttgtacagtcggctggtgctctgagaacaatagaacacatattggctcaaaccagagtttggggaggttgggttgagataatgacctaaacgaagtgacctcaagatcacaaaatatatttttttgttaagtagatgtatttataatgaagttaaataagcactatttagggatatgtcgtttcttataccaaattagtttcctgtgtgttgtttgttagtagttttacaaaatttatcctgaaatcccagaataacactttctgaaaccatatgactgctctgttctcacttattcgtgctttcaagcagaggatcaacaaatgatggtttgttctgcctgccacgagtcttgatcattaaaattgtactggcacccagctgtgctcactcataactaactaactaactgtctatggctccagctacactataacaacagcaaagctaaggagctgcagcactttatagcctgcaaagcctgaaataatttactatcaatcatcaatcaatcatcatctatctatctatctatctatctaatctatctatcttgtccattacagaaaatgtttgtttgccaactttaaaagaaatgaagtctaaaacctcacttttccttctagccttacaaaaattgcctgacctctcaagacttttaatcacttcagggattcttgtgacattcaactgagatatatgtgaacacaccctatacacagcaaagcactaagtagtagtagcagaagacagtaccaccgacttttcttgttcccacataagcatttccctttagggctctaagatgaggtcatcatcgtttttaatcctgaagaagggctactgagtgagtgcagattattcggtaaacactcttaggcctaacctagctagtcagtcaagcagtaatctagcacaactctaatgttgagatgatggcctcggtgtgagtggcacagcatataaggcacattcaggaatcaagacttttttttttttggcctactcctctcccttctcaaagaccttacaggcaaggctgaattctaaaatagccttattagttaaaaacaacactggtataactaactcccatttctacttgaaaaaattctttggaataatgcttttttagatcaaataaaaaaatcaagctttttataatgatgataaggaattaattacaatttttaaaattctaatatagtccatacaaggcttatatactttgctctaaacctagctcacctggtctagtagctacaacatttagtagctacagtcagaaaatctaaattctaattgttaaattcatgtcctcaataaaattgttctgaccaaatgagacaatgaataaaaaagactttgcaaagttacaagcatcatacaaatatacatgaatcattataattttcatggtctcatcctgcccattctattcttaatcccctccacaaagtagaaagtattgattgccaagtcaaagtttaggtgaggaagctatttacaaataagtttccctgcaatgcttaatcccctcctagtgttcacagattgcatcacatcagatttgaaagtaaaatggctgttattttctatttttaatagttatcatcagtgttgtgctctgccgagcattaaaacaacatacacaaagatatgagatgttatgataatccccaaactttattataaataactcaaaatcagagccaaactggctggtattctatgctttatcctttccctagcatcagtcaagggtcctggaacaaagatgagtaactattaaaatgtaagaagcctatcatattgaaatacctcatatgcttggtattttctactatcactttaaaatcactaaaattctgaaacag

SEQ ID NO: 359801 - DNA, 3937 bp, Homo sapiens
agcggcagtggcgggcacgcgcagccgagaagatgtctccgacgccgccgctcttcagtttgcccgaagcgcggacgcggtttacgaagtctaccagagaggccttgaacaacaaaaacatcaagccattgttaagtaccttcagccaggtacctggcagtgaaaatgaaaaaaaatgtacccttgaccaagctttcagaggtattctagaagaagaaattataaatcattcatcatgtgaaaacgttttagctattatttctcttgctattgggggagtaactgaaggtatttgtaccgcatctacaccttttgtattgttgggagatgttttggattgtcttcctttggatcagtgtgacacaatattcacttttgtggaaaaaaatgttgctacttggaaatcaaatacattctattctgctgggaaaaattacttactacgtatgtgcaatgatctcctaagaagattgtctaaatcccagaatacagtcttctgtggacggattcagctctttttggccaggcttttccctctgtctgagaaatcaggtcttaacttgcagagtcagtttaatctggaaaatgtcactgttttcaatacaaatgagcaggaaagcaccctgggtcagaagcacactgaagatagagaagaaggaatggatgtagaagaaggcgaaatgggagatgaggaagctccaacaacgtgctctattccaattgattacaacctgtatcgaaaattctggtcacttcaggattacttcaggaaccctgtgcaatgctatgagaagatttcatggaaaacttttctcaagtattctgaagaagttttagctgtttttaagagttataaattagatgatactcaggcctcaagaaaaaagatggaagaattgaaaacaggaggagaacatgtatattttgcaaaatttttaacaagtgaaaagctgatggatttacaactgagtgacagtaactttcgtcgacacatcctgttgcagtatctcattttattccaatatctcaaggggcaggtcaaattcaaaagttcaaactatgttttaactgatgagcaatcactttggattgaagatactacaaaatcagtttatcaactactatctgaaaacccccccgatggagaaagattttcaaagatggtagagcatatattaaacactgaagaaaactggaactcgtggaaaaatgaaggttgcccaagttttgtgaaagaaagaacatcagataccaaacctacgagaataattcggaagagaacagcacccgaggacttcctagggaaaggacccaccaaaaaaattctgatgggaaatgaggagttaacaaggctttggaatctttgccctgataatatggaagcctgtaaatcagagacaagggaacacatgcccactttggaggaattctttgaagaagccattgaacaggcagaccctgaaaatatggtggaaaatgaatataaggctgtgaacaattcaaattatggttggagagccctgagactattagcacggagaagccctcacttcttccagccaaccaaccagcagtttaaaagtttaccagaatatcttgaaaatatggtaataaagctagccaaggaattaccgcctccttctgaagaaataaaaacaggtgaggatgaagatgaggaagataatgatgctctactgaaggaaaatgaaagtcctgatgttcggcgagacaaacctgtaacaggagaacaaatagaggtatttgccaacaagctgggtgaacaatggaagattctggctccctacttggaaatgaaagactcagaaattaggcagattgagtgtgacagtgaagacatgaagatgagagctaagcagctcctggttgcctggcaagatcaagagggagttcatgcaacacctgagaatctgattaatgcactgaataagtctggattaagtgaccttgcagaaagtctaactaatgacaatgagacaaatagttagcttcttttttttttctttttattaaaactgtgatagattttgttaccaagcagcatttgataagaggtccactggttttggtaaacaataaacatttttataacaattgttgtacagtcggctggtgctctgagaacaatagaacacatattggctcaaaccagagtttggggaggttgggttgagataatgacctaaacgaagtgacctcaagatcacaaaatatatttttttgttaagtagatgtatttataatgaagttaaataagcactatttagggatatgtcgtttcttataccaaattagtttcctgtgtgttgtttgttagtagttttacaaaatttatcctgaaatcccagaataacactttctgaaaccatatgactgctctgttctcacttattcgtgctttcaagcagaggatcaacaaatgatggtttgttctgcctgccacgagtcttgatcattaaaattgtactggcacccagctgtgctcactcataactaactaactaactgtctatggctccagctacactataacaacagcaaagctaaggagctgcagcactttatagcctgcaaagcctgaaataatttactatcaatcatcaatcaatcatcatctatctatctatctatctatctaatctatctatcttgtccattacagaaaatgtttgtttgccaactttaaaagaaatgaagtctaaaacctcacttttccttctagccttacaaaaattgcctgacctctcaagacttttaatcacttcagggattcttgtgacattcaactgagatatatgtgaacacaccctatacacagcaaagcactaagtagtagtagcagaagacagtaccaccgacttttcttgttcccacataagcatttccctttagggctctaagatgaggtcatcatcgtttttaatcctgaagaagggctactgagtgagtgcagattattcggtaaacactcttaggcctaacctagctagtcagtcaagcagtaatctagcacaactctaatgttgagatgatggcctcggtgtgagtggcacagcatataaggcacattcaggaatcaagacttttttttttttggcctactcctctcccttctcaaagaccttacaggcaaggctgaattctaaaatagccttattagttaaaaacaacactggtataactaactcccatttctacttgaaaaaattctttggaataatgcttttttagatcaaataaaaaaatcaagctttttataatgatgataaggaattaattacaatttttaaaattctaatatagtccatacaaggcttatatactttgctctaaacctagctcacctggtctagtagctacaacatttagtagctacagtcagaaaatctaaattctaattgttaaattcatgtcctcaataaaattgttctgaccaaatgagacaatgaataaaaacatggtctcatcctgcccattctattcttaatcccctccacaaagtagaaagtattgattgccaagtcaaagtttaggtgaggaagctatttacaaataagtttccctgcaatgcttaatcccctcctagtgttcacagattgcatcacatcagatttgaaagtaaaatggctgttattttctatttttaatagttatcatcagtgttgtgctctgccgagcattaaaacaacatacacaaagatatgagatgttatgataatccccaaactttattataaataactcaaaatcagagccaaactggctggtattctatgctttatcctttccctagcatcagtcaagggtcctggaacaaagatgagtaactattaaaatgtaagaagcctatcatattgaaatacctcatatgcttggtattttctactatcactttaaaatcactaaaattctgaaacag

SEQ ID NO: 359802 - DNA, 3168 bp, Homo sapiens
agcggcagtggcgggcacgcgcagccgagaagatgtctccgacgccgccgctcttcagtttgcccgaagcgcggacgcggtttacgaagtctaccagagaggccttgaacaacaaaaacatcaagccattgttaagtaccttcagccaggtacctggcagtgaaaatgaaaaaaaatgtacccttgaccaagctttcagaggtattctagaagaagaaattataaatcattcatcatgtgaaaacgttttagctattatttctcttgctattgggggagtaactgaaggtatttgtaccgcatctacaccttttgtattgttgggagatgttttggattgtcttcctttggatcagtgtgacacaatattcacttttgtggaaaaaaatgttgctacttggaaatcaaatacattctattctgctgggaaaaattacttactacgtatgtgcaatgatctcctaagaagattgtctaaatcccagaatacagtcttctgtggacggattcagctctttttggccaggcttttccctctgtctgagaaatcaggtcttaacttgcagagtcagtttaatctggaaaatgtcactgttttcaatacaaatgagcaggaaagcaccctgggtcagaagcacactgaagatagagaagaaggaatggatgtagaagaaggcgaaatgggagatgaggaagctccaacaacgtgctctattccaattgattacaacctgtatcgaaaattctggtcacttcaggattacttcaggaaccctgtgcaatgctatgagaagatttcatggaaaacttttctcaagtattctgaagaagttttagctgtttttaagagttataaattagatgatactcaggcctcaagaaaaaagatggaagaattgaaaacaggaggagaacatgtatattttgcaaaatttttaacaagtgaaaagctgatggatttacaactgagtgacagtaactttcgtcgacacatcctgttgcagtatctcattttattccaatatctcaaggggcaggtcaaattcaaaagttcaaactatgttttaactgatgagcaatcactttggattgaagatactacaaaatcagtttatcaactactatctgaaaacccccccgatggagaaagattttcaaagatggtagagcatatattaaacactgaagaaaactggaactcgtggaaaaatgaaggttgcccaagttttgtgaaagaaagaacatcagataccaaacctacgagaataattcggaagagaacagcacccgaggacttcctagggaaaggacccaccaaaaaaattctgatgggaaatgaggagttaacaaggctttggaatctttgccctgataatatggaagcctgtaaatcagagacaagggaacacatgcccactttggaggaattctttgaagaagccattgaacaggcagaccctgaaaatatggtggaaaatgaatataaggctgtgaacaattcaaattatggttggagagccctgagactattagcacggagaagccctcacttcttccagccaaccaaccagcagtttaaaagtttaccagaatatcttgaaaatatggtaataaagctagccaaggaattaccgcctccttctgaagaaataaaaacaggtgaggatgaagatgaggaagataatgatgctctactgaaggaaaatgaaagtcctgatgttcggcgagacaaacctgtaacaggagaacaaatagaggtatttgccaacaagctgggtgaacaatggaagattctggctccctacttggaaatgaaagactcagaaattaggcagattgagtgtgacagtgaagacatgaagatgagagctaagcagctcctggttgcctggcaagatcaagagggagttcatgcaacacctgagaatctgattaatgcactgaataagtctggattaagtgaccttgcagaaagtctaactaatgacaatgagacaaatagttagcttcttttttttttctttttattaaaactgtgatagattttgttaccaagcagcatttgataagaggtccactggttttggtaaacaataaacatttttataacaattgttgtacagtcggctggtgctctgagaacaatagaacacatattggctcaaaccagagtttggggaggttgggttgagataatgacctaaacgaagtgacctcaagatcacaaaatatatttttttgttaagtagatgtatttataatgaagttaaataagcactatttagggatatgtcgtttcttataccaaattagtttcctgtgtgttgtttgttagtagttttacaaaatttatcctgaaatcccagaataacactttctgaaaccatatgactgctctgttctcacttattcgtgctttcaagcagaggatcaacaaatgatggtttgttctgcctgccacgagtcttgatcattaaaattgtactggcacccagctgtgctcactcataactaactaactaactgtctatggctccagctacactataacaacagcaaagctaaggagctgcagcactttatagcctgcaaagcctgaaataatttactatcaatcatcaatcaatcatcatctatctatctatctatctatctaatctatctatcttgtccattacagaaaatgtttgtttgccaactttaaaagaaatgaagtctaaaacctcacttttccttctagccttacaaaaattgcctgacctctcaagacttttaatcacttcagggattcttgtgacattcaactgagatatatgtgaacacaccctatacacagcaaagcactaagtagtagtagcagaagacagtaccaccgacttttcttgttcccacataagcatttccctttagggctctaagatgaggtcatcatcgtttttaatcctgaagaagggctactgagtgagtgcagattattcggtaaacactcttaggcctaacctagctagtcagtcaagcagtaatctagcacaactctaatgttgagatgatggcctcggtgtgagtggcacagcatataaggcacattcaggaatcaagacttttttttttttggcctactcctcagccttgcctgtaaggtctttgagaagggagaggagtaggcca

SEQ ID NO: 359803 - DNA, 4012 bp, Homo sapiens
agcggcagtggcgggcacgcgcagccgagaagatgtctccgacgccgccgctcttcagtttgcccgaagcgcggacgcggtttacgaagtctaccagagaggccttgaacaacaaaaacatcaagccattgttaagtaccttcagccaggtacctggcagtgaaaatgaaaaaaaatgtacccttgaccaagctttcagaggtattctagaagaagaaattataaatcattcatcatgtgaaaacgttttagctattatttctcttgctattgggggagtaactgaaggtatttgtaccgcatctacaccttttgtattgttgggagatgttttggattgtcttcctttggatcagtgtgacacaatattcacttttgtggaaaaaaatgttgctacttggaaatcaaatacattctattctgctgggaaaaattacttactacgtatgtgcaatgatctcctaagaagattgtctaaatcccagaatacagtcttctgtggacggattcagctctttttggccaggcttttccctctgtctgagaaatcaggtcttaacttgcagagtcagtttaatctggaaaatgtcactgttttcaatacaaatgagcaggaaagcaccctgggtcagaagcacactgaagatagagaagaaggaatggatgtagaagaaggcgaaatgggagatgaggaagctccaacaacgtgctctattccaattgattacaacctgtatcgaaaattctggtcacttcaggattacttcaggaaccctgtgcaatgctatgagaagatttcatggaaaacttttctcaagtattctgaagaagttttagctgtttttaagagttataaattagatgatactcaggcctcaagaaaaaagatggaagaattgaaaacaggaggagaacatgtatattttgcaaaatttttaacaagtgaaaagctgatggatttacaactgagtgacagtaactttcgtcgacacatcctgttgcagtatctcattttattccaatatctcaaggggcaggtcaaattcaaaagttcaaactatgttttaactgatgagcaatcactttggattgaagatactacaaaatcagtttatcaactactatctgaaaacccccccgatggagaaagattttcaaagatggtagagcatatattaaacactgaagaaaactggaactcgtggaaaaatgaaggttgcccaagttttgtgaaagaaagtgtatgttttgttcaccacagaacatcagataccaaacctacgagaataattcggaagagaacagcacccgaggacttcctagggaaaggacccaccaaaaaaattctgatgggaaatgaggagttaacaaggctttggaatctttgccctgataatatggaagcctgtaaatcagagacaagggaacacatgcccactttggaggaattctttgaagaagccattgaacaggcagaccctgaaaatatggtggaaaatgaatataaggctgtgaacaattcaaattatggttggagagccctgagactattagcacggagaagccctcacttcttccagccaaccaaccagcagtttaaaagtttaccagaatatcttgaaaatatggtaataaagctagccaaggaattaccgcctccttctgaagaaataaaaacaggtgaggatgaagatgaggaagataatgatgctctactgaaggaaaatgaaagtcctgatgttcggcgagacaaacctgtaacaggagaacaaatagaggtatttgccaacaagctgggtgaacaatggaagattctggctccctacttggaaatgaaagactcagaaattaggcagattgagtgtgacagtgaagacatgaagatgagagctaagcagctcctggttgcctggcaagatcaagagggagttcatgcaacacctgagaatctgattaatgcactgaataagtctggattaagtgaccttgcagaaagtctaactaatgacaatgagacaaatagttagcttcttttttttttctttttattaaaactgtgatagattttgttaccaagcagcatttgataagaggtccactggttttggtaaacaataaacatttttataacaattgttgtacagtcggctggtgctctgagaacaatagaacacatattggctcaaaccagagtttggggaggttgggttgagataatgacctaaacgaagtgacctcaagatcacaaaatatatttttttgttaagtagatgtatttataatgaagttaaataagcactatttagggatatgtcgtttcttataccaaattagtttcctgtgtgttgtttgttagtagttttacaaaatttatcctgaaatcccagaataacactttctgaaaccatatgactgctctgttctcacttattcgtgctttcaagcagaggatcaacaaatgatggtttgttctgcctgccacgagtcttgatcattaaaattgtactggcacccagctgtgctcactcataactaactaactaactgtctatggctccagctacactataacaacagcaaagctaaggagctgcagcactttatagcctgcaaagcctgaaataatttactatcaatcatcaatcaatcatcatctatctatctatctatctatctaatctatctatcttgtccattacagaaaatgtttgtttgccaactttaaaagaaatgaagtctaaaacctcacttttccttctagccttacaaaaattgcctgacctctcaagacttttaatcacttcagggattcttgtgacattcaactgagatatatgtgaacacaccctatacacagcaaagcactaagtagtagtagcagaagacagtaccaccgacttttcttgttcccacataagcatttccctttagggctctaagatgaggtcatcatcgtttttaatcctgaagaagggctactgagtgagtgcagattattcggtaaacactcttaggcctaacctagctagtcagtcaagcagtaatctagcacaactctaatgttgagatgatggcctcggtgtgagtggcacagcatataaggcacattcaggaatcaagacttttttttttttggcctactcctctcccttctcaaagaccttacaggcaaggctgaattctaaaatagccttattagttaaaaacaacactggtataactaactcccatttctacttgaaaaaattctttggaataatgcttttttagatcaaataaaaaaatcaagctttttataatgatgataaggaattaattacaatttttaaaattctaatatagtccatacaaggcttatatactttgctctaaacctagctcacctggtctagtagctacaacatttagtagctacagtcagaaaatctaaattctaattgttaaattcatgtcctcaataaaattgttctgaccaaatgagacaatgaataaaaaagactttgcaaagttacaagcatcatacaaatatacatgaatcattataattttcatggtctcatcctgcccattctattcttaatcccctccacaaagtagaaagtattgattgccaagtcaaagtttaggtgaggaagctatttacaaataagtttccctgcaatgcttaatcccctcctagtgttcacagattgcatcacatcagatttgaaagtaaaatggctgttattttctatttttaatagttatcatcagtgttgtgctctgccgagcattaaaacaacatacacaaagatatgagatgttatgataatccccaaactttattataaataactcaaaatcagagccaaactggctggtattctatgctttatcctttccctagcatcagtcaagggtcctggaacaaagatgagtaactattaaaatgtaagaagcctatcatattgaaatacctcatatgcttggtattttctactatcactttaaaatcactaaaattctgaaacag

SEQ ID NO: 359804 - DNA, 3940 bp, Homo sapiens
agcggcagtggcgggcacgcgcagccgagaagatgtctccgacgccgccgctcttcagtttgcccgaagcgcggacgcggtttacgaagtctaccagagaggccttgaacaacaaaaacatcaagccattgttaagtaccttcagccaggtacctggcagtgaaaatgaaaaaaaatgtacccttgaccaagctttcagaggtattctagaagaagaaattataaatcattcatcatgtgaaaacgttttagctattatttctcttgctattgggggagtaactgaaggtatttgtaccgcatctacaccttttgtattgttgggagatgttttggattgtcttcctttggatcagtgtgacacaatattcacttttgtggaaaaaaatgttgctacttggaaatcaaatacattctattctgctgggaaaaattacttactacgtatgtgcaatgatctcctaagaagattgtctaaatcccagaatacagtcttctgtggacggattcagctctttttggccaggcttttccctctgtctgagaaatcaggtcttaacttgcagagtcagtttaatctggaaaatgtcactgttttcaatacaaatgagcaggaaagcaccctgggtcagaagcacactgaagatagagaagaaggaatggatgtagaagaaggcgaaatgggagatgaggaagctccaacaacgtgctctattccaattgattacaacctgtatcgaaaattctggtcacttcaggattacttcaggaaccctgtgcaatgctatgagaagatttcatggaaaacttttctcaagtattctgaagaagttttagctgtttttaagagttataaattagatgatactcaggcctcaagaaaaaagatggaagaattgaaaacaggaggagaacatgtatattttgcaaaatttttaacaagtgaaaagctgatggatttacaactgagtgacagtaactttcgtcgacacatcctgttgcagtatctcattttattccaatatctcaaggggcaggtcaaattcaaaagttcaaactatgttttaactgatgagcaatcactttggattgaagatactacaaaatcagtttatcaacatatattaaacactgaagaaaactggaactcgtggaaaaatgaaggttgcccaagttttgtgaaagaaagaacatcagataccaaacctacgagaataattcggaagagaacagcacccgaggacttcctagggaaaggacccaccaaaaaaattctgatgggaaatgaggagttaacaaggctttggaatctttgccctgataatatggaagcctgtaaatcagagacaagggaacacatgcccactttggaggaattctttgaagaagccattgaacaggcagaccctgaaaatatggtggaaaatgaatataaggctgtgaacaattcaaattatggttggagagccctgagactattagcacggagaagccctcacttcttccagccaaccaaccagcagtttaaaagtttaccagaatatcttgaaaatatggtaataaagctagccaaggaattaccgcctccttctgaagaaataaaaacaggtgaggatgaagatgaggaagataatgatgctctactgaaggaaaatgaaagtcctgatgttcggcgagacaaacctgtaacaggagaacaaatagaggtatttgccaacaagctgggtgaacaatggaagattctggctccctacttggaaatgaaagactcagaaattaggcagattgagtgtgacagtgaagacatgaagatgagagctaagcagctcctggttgcctggcaagatcaagagggagttcatgcaacacctgagaatctgattaatgcactgaataagtctggattaagtgaccttgcagaaagtctaactaatgacaatgagacaaatagttagcttcttttttttttctttttattaaaactgtgatagattttgttaccaagcagcatttgataagaggtccactggttttggtaaacaataaacatttttataacaattgttgtacagtcggctggtgctctgagaacaatagaacacatattggctcaaaccagagtttggggaggttgggttgagataatgacctaaacgaagtgacctcaagatcacaaaatatatttttttgttaagtagatgtatttataatgaagttaaataagcactatttagggatatgtcgtttcttataccaaattagtttcctgtgtgttgtttgttagtagttttacaaaatttatcctgaaatcccagaataacactttctgaaaccatatgactgctctgttctcacttattcgtgctttcaagcagaggatcaacaaatgatggtttgttctgcctgccacgagtcttgatcattaaaattgtactggcacccagctgtgctcactcataactaactaactaactgtctatggctccagctacactataacaacagcaaagctaaggagctgcagcactttatagcctgcaaagcctgaaataatttactatcaatcatcaatcaatcatcatctatctatctatctatctatctaatctatctatcttgtccattacagaaaatgtttgtttgccaactttaaaagaaatgaagtctaaaacctcacttttccttctagccttacaaaaattgcctgacctctcaagacttttaatcacttcagggattcttgtgacattcaactgagatatatgtgaacacaccctatacacagcaaagcactaagtagtagtagcagaagacagtaccaccgacttttcttgttcccacataagcatttccctttagggctctaagatgaggtcatcatcgtttttaatcctgaagaagggctactgagtgagtgcagattattcggtaaacactcttaggcctaacctagctagtcagtcaagcagtaatctagcacaactctaatgttgagatgatggcctcggtgtgagtggcacagcatataaggcacattcaggaatcaagacttttttttttttggcctactcctctcccttctcaaagaccttacaggcaaggctgaattctaaaatagccttattagttaaaaacaacactggtataactaactcccatttctacttgaaaaaattctttggaataatgcttttttagatcaaataaaaaaatcaagctttttataatgatgataaggaattaattacaatttttaaaattctaatatagtccatacaaggcttatatactttgctctaaacctagctcacctggtctagtagctacaacatttagtagctacagtcagaaaatctaaattctaattgttaaattcatgtcctcaataaaattgttctgaccaaatgagacaatgaataaaaaagactttgcaaagttacaagcatcatacaaatatacatgaatcattataattttcatggtctcatcctgcccattctattcttaatcccctccacaaagtagaaagtattgattgccaagtcaaagtttaggtgaggaagctatttacaaataagtttccctgcaatgcttaatcccctcctagtgttcacagattgcatcacatcagatttgaaagtaaaatggctgttattttctatttttaatagttatcatcagtgttgtgctctgccgagcattaaaacaacatacacaaagatatgagatgttatgataatccccaaactttattataaataactcaaaatcagagccaaactggctggtattctatgctttatcctttccctagcatcagtcaagggtcctggaacaaagatgagtaactattaaaatgtaagaagcctatcatattgaaatacctcatatgcttggtattttctactatcactttaaaatcactaaaattctgaaacag

SEQ ID NO: 359805 - DNA, 4033 bp, Homo sapiens
agcggcagtggcgggcacgcgcagccgagaagatgtctccgacgccgccgctcttcagtttgcccgaagcgcggacgcggtttacgaagtctaccagagaggccttgaacaacaaaaacatcaagccattgttaagtaccttcagccaggtacctggcagtgaaaatgaaaaaaaatgtacccttgaccaagctttcagaggtattctagaagaagaaattataaatcattcatcatgtgaaaacgttttagctattatttctcttgctattgggggagtaactgaagcttagtggtgaagaaaacagactgtggagccagactgcctgggtatttgtaccgcatctacaccttttgtattgttgggagatgttttggattgtcttcctttggatcagtgtgacacaatattcacttttgtggaaaaaaatgttgctacttggaaatcaaatacattctattctgctgggaaaaattacttactacgtatgtgcaatgatctcctaagaagattgtctaaatcccagaatacagtcttctgtggacggattcagctctttttggccaggcttttccctctgtctgagaaatcaggtcttaacttgcagagtcagtttaatctggaaaatgtcactgttttcaatacaaatgagcaggaaagcaccctgggtcagaagcacactgaagatagagaagaaggaatggatgtagaagaaggcgaaatgggagatgaggaagctccaacaacgtgctctattccaattgattacaacctgtatcgaaaattctggtcacttcaggattacttcaggaaccctgtgcaatgctatgagaagatttcatggaaaacttttctcaagtattctgaagaagttttagctgtttttaagagttataaattagatgatactcaggcctcaagaaaaaagatggaagaattgaaaacaggaggagaacatgtatattttgcaaaatttttaacaagtgaaaagctgatggatttacaactgagtgacagtaactttcgtcgacacatcctgttgcagtatctcattttattccaatatctcaaggggcaggtcaaattcaaaagttcaaactatgttttaactgatgagcaatcactttggattgaagatactacaaaatcagtttatcaactactatctgaaaacccccccgatggagaaagattttcaaagatggtagagcatatattaaacactgaagaaaactggaactcgtggaaaaatgaaggttgcccaagttttgtgaaagaaagaacatcagataccaaacctacgagaataattcggaagagaacagcacccgaggacttcctagggaaaggacccaccaaaaaaattctgatgggaaatgaggagttaacaaggctttggaatctttgccctgataatatggaagcctgtaaatcagagacaagggaacacatgcccactttggaggaattctttgaagaagccattgaacaggcagaccctgaaaatatggtggaaaatgaatataaggctgtgaacaattcaaattatggttggagagccctgagactattagcacggagaagccctcacttcttccagccaaccaaccagcagtttaaaagtttaccagaatatcttgaaaatatggtaataaagctagccaaggaattaccgcctccttctgaagaaataaaaacaggtgaggatgaagatgaggaagataatgatgctctactgaaggaaaatgaaagtcctgatgttcggcgagacaaacctgtaacaggagaacaaatagaggtatttgccaacaagctgggtgaacaatggaagattctggctccctacttggaaatgaaagactcagaaattaggcagattgagtgtgacagtgaagacatgaagatgagagctaagcagctcctggttgcctggcaagatcaagagggagttcatgcaacacctgagaatctgattaatgcactgaataagtctggattaagtgaccttgcagaaagtctaactaatgacaatgagacaaatagttagcttcttttttttttctttttattaaaactgtgatagattttgttaccaagcagcatttgataagaggtccactggttttggtaaacaataaacatttttataacaattgttgtacagtcggctggtgctctgagaacaatagaacacatattggctcaaaccagagtttggggaggttgggttgagataatgacctaaacgaagtgacctcaagatcacaaaatatatttttttgttaagtagatgtatttataatgaagttaaataagcactatttagggatatgtcgtttcttataccaaattagtttcctgtgtgttgtttgttagtagttttacaaaatttatcctgaaatcccagaataacactttctgaaaccatatgactgctctgttctcacttattcgtgctttcaagcagaggatcaacaaatgatggtttgttctgcctgccacgagtcttgatcattaaaattgtactggcacccagctgtgctcactcataactaactaactaactgtctatggctccagctacactataacaacagcaaagctaaggagctgcagcactttatagcctgcaaagcctgaaataatttactatcaatcatcaatcaatcatcatctatctatctatctatctatctaatctatctatcttgtccattacagaaaatgtttgtttgccaactttaaaagaaatgaagtctaaaacctcacttttccttctagccttacaaaaattgcctgacctctcaagacttttaatcacttcagggattcttgtgacattcaactgagatatatgtgaacacaccctatacacagcaaagcactaagtagtagtagcagaagacagtaccaccgacttttcttgttcccacataagcatttccctttagggctctaagatgaggtcatcatcgtttttaatcctgaagaagggctactgagtgagtgcagattattcggtaaacactcttaggcctaacctagctagtcagtcaagcagtaatctagcacaactctaatgttgagatgatggcctcggtgtgagtggcacagcatataaggcacattcaggaatcaagacttttttttttttggcctactcctctcccttctcaaagaccttacaggcaaggctgaattctaaaatagccttattagttaaaaacaacactggtataactaactcccatttctacttgaaaaaattctttggaataatgcttttttagatcaaataaaaaaatcaagctttttataatgatgataaggaattaattacaatttttaaaattctaatatagtccatacaaggcttatatactttgctctaaacctagctcacctggtctagtagctacaacatttagtagctacagtcagaaaatctaaattctaattgttaaattcatgtcctcaataaaattgttctgaccaaatgagacaatgaataaaaaagactttgcaaagttacaagcatcatacaaatatacatgaatcattataattttcatggtctcatcctgcccattctattcttaatcccctccacaaagtagaaagtattgattgccaagtcaaagtttaggtgaggaagctatttacaaataagtttccctgcaatgcttaatcccctcctagtgttcacagattgcatcacatcagatttgaaagtaaaatggctgttattttctatttttaatagttatcatcagtgttgtgctctgccgagcattaaaacaacatacacaaagatatgagatgttatgataatccccaaactttattataaataactcaaaatcagagccaaactggctggtattctatgctttatcctttccctagcatcagtcaagggtcctggaacaaagatgagtaactattaaaatgtaagaagcctatcatattgaaatacctcatatgcttggtattttctactatcactttaaaatcactaaaattctgaaacag

SEQ ID NO: 359806 - DNA, 2160 bp, Homo sapiens
agcggcagtggcgggcacgcgcagccgagaagatgtctccgacgccgccgctcttcagtttgcccgaagcgcggacgcggtttacgaagtctaccagagaggccttgaacaacaaaaacatcaagccattgttaagtaccttcagccaggtacctggcagtgaaaatgaaaaaaaatgtacccttgaccaagctttcagaggtattctagaagaagaaattataaatcattcatcatgtgaaaacgttttagctattatttctcttgctattgggggagtaactgaaggtatttgtaccgcatctacaccttttgtattgttgggagatgttttggattgtcttcctttggatcagtgtgacacaatattcacttttgtggaaaaaaatgttgctacttggaaatcaaatacattctattctgctgggaaaaattacttactacgtatgtgcaatgatctcctaagaagattgtctaaatcccagaatacagtcttctgtggacggattcagctctttttggccaggcttttccctctgtctgagaaatcaggtcttaacttgcagagtcagtttaatctggaaaatgtcactgttttcaatacaaatgagcaggaaagcaccctgggtcagaagcacactgaagatagagaagaaggaatggatgtagaagaaggcgaaatgggagatgaggaagctccaacaacgtgctctattccaattgattacaacctgtatcgaaaattctggtcacttcaggattacttcaggaaccctgtgcaatgctatgagaagatttcatggaaaacttttctcaagtattctgaagaagttttagctgtttttaagagttataaattagatgatactcaggcctcaagaaaaaagatggaagaattgaaaacaggaggagaacatgtatattttgcaaaatttttaacaagtgaaaagctgatggatttacaactgagtgacagtaactttcgtcgacacatcctgttgcagtatctcattttattccaatatctcaaggggcaggtcaaattcaaaagttcaaactatgttttaactgatgagcaatcactttggattgaagatactacaaaatcagtttatcaactactatctgaaaacccccccgatggagaaagattttcaaagatggtagagcatatattaaacactgaagaaaactggaactcgtggaaaaatgaaggttgcccaagttttgtgaaagaaagaacatcagataccaaacctacgagaataattcggaagagaacagcacccgaggacttcctagggaaaggacccaccaaaaaaattctgatgggaaatgaggagttaacaaggctttggaatctttgccctgataatatggaagcctgtaaatcagagacaagggaacacatgcccactttggaggaattctttgaagaagccattgaacaggcagaccctgaaaatatggtggaaaatgaatataaggctgtgaacaattcaaattatggttggagagccctgagactattagcacggagaagccctcacttcttccagccaaccaaccagcagtttaaaagtttaccagaatatcttgaaaatatggtaataaagctagccaaggaattaccgcctccttctgaagaaataaaaacaggtgaggatgaagatgaggaagataatgatgctctactgaaggaaaatgaaagtcctgatgttcggcgagacaaacctgtaacaggagaacaaatagaggtatttgccaacaagctgggtgaacaatggaagattctggctccctacttggaaatgaaagactcagaaattaggcagattgagtgtgacagtgaagacatgaagatgagagctaagcagctcctggttgcctggcaagatcaagagggagttcatgcaacacctgagaatctgattaatgcactgaataagtctggattaagtgaccttgcagaaagtctaactaatgacaatgagacaaatagttagcttcttttttttttctttttattaaaactgtgatagattttgttaccaagcagcatttgataagaggtccactggttttggtaaacaataaacatttttggtgtagcgcccaggtttttttttctgtaccctctctccctccttcggcgccctc

SEQ ID NO: 359807 - DNA, 3515 bp, Homo sapiens
agggaatggtagagaaactggattgcaaagaattgaaggaaatctcaaatcctcagcttaaaagtgtgtcacaactgccaagcaggataaagaaagataaatctactcttcattacatcatgccataactgtgggcattcagagaaaacctaaaagccactaagggataagaaagacaaatatactgggaaggcacagcagtttgactgttagcagatttctaacatatcaaccattaataccagaagacagtagagaaatattaaagtgctgaaagaaaaatgacattcaatctagaattttataccgagttaaatatactcaagactgtcgatgaaagaaagacatttttatttaaagaccaggataacttaccactcagtgaccctcattttgaaaaaaactactcaaggatgttcttcaggaggaaggaaattgaacccataagaatggagtgggatacagaaggcaacgctgatggatttacaactgagtgacagtaactttcgtcgacacatcctgttgcagtatctcattttattccaatatctcaaggggcaggtcaaattcaaaagttcaaactatgttttaactgatgagcaatcactttggattgaagatactacaaaatcagtttatcaactactatctgaaaacccccccgatggagaaagattttcaaagatggtagagcatatattaaacactgaagaaaactggaactcgtggaaaaatgaaggttgcccaagttttgtgaaagaaagaacatcagataccaaacctacgagaataattcggaagagaacagcacccgaggacttcctagggaaaggacccaccaaaaaaattctgatgggaaatgaggagttaacaaggctttggaatctttgccctgataatatggaagcctgtaaatcagagacaagggaacacatgcccactttggaggaattctttgaagaagccattgaacaggcagaccctgaaaatatggtggaaaatgaatataaggctgtgaacaattcaaattatggttggagagccctgagactattagcacggagaagccctcacttcttccagccaaccaaccagcagtttaaaagtttaccagaatatcttgaaaatatggtaataaagctagccaaggaattaccgcctccttctgaagaaataaaaacaggtgaggatgaagatgaggaagataatgatgctctactgaaggaaaatgaaagtcctgatgttcggcgagacaaacctgtaacaggagaacaaatagaggtatttgccaacaagctgggtgaacaatggaagattctggctccctacttggaaatgaaagactcagaaattaggcagattgagtgtgacagtgaagacatgaagatgagagctaagcagctcctggttgcctggcaagatcaagagggagttcatgcaacacctgagaatctgattaatgcactgaataagtctggattaagtgaccttgcagaaagtctaactaatgacaatgagacaaatagttagcttcttttttttttctttttattaaaactgtgatagattttgttaccaagcagcatttgataagaggtccactggttttggtaaacaataaacatttttataacaattgttgtacagtcggctggtgctctgagaacaatagaacacatattggctcaaaccagagtttggggaggttgggttgagataatgacctaaacgaagtgacctcaagatcacaaaatatatttttttgttaagtagatgtatttataatgaagttaaataagcactatttagggatatgtcgtttcttataccaaattagtttcctgtgtgttgtttgttagtagttttacaaaatttatcctgaaatcccagaataacactttctgaaaccatatgactgctctgttctcacttattcgtgctttcaagcagaggatcaacaaatgatggtttgttctgcctgccacgagtcttgatcattaaaattgtactggcacccagctgtgctcactcataactaactaactaactgtctatggctccagctacactataacaacagcaaagctaaggagctgcagcactttatagcctgcaaagcctgaaataatttactatcaatcatcaatcaatcatcatctatctatctatctatctatctaatctatctatcttgtccattacagaaaatgtttgtttgccaactttaaaagaaatgaagtctaaaacctcacttttccttctagccttacaaaaattgcctgacctctcaagacttttaatcacttcagggattcttgtgacattcaactgagatatatgtgaacacaccctatacacagcaaagcactaagtagtagtagcagaagacagtaccaccgacttttcttgttcccacataagcatttccctttagggctctaagatgaggtcatcatcgtttttaatcctgaagaagggctactgagtgagtgcagattattcggtaaacactcttaggcctaacctagctagtcagtcaagcagtaatctagcacaactctaatgttgagatgatggcctcggtgtgagtggcacagcatataaggcacattcaggaatcaagacttttttttttttggcctactcctctcccttctcaaagaccttacaggcaaggctgaattctaaaatagccttattagttaaaaacaacactggtataactaactcccatttctacttgaaaaaattctttggaataatgcttttttagatcaaataaaaaaatcaagctttttataatgatgataaggaattaattacaatttttaaaattctaatatagtccatacaaggcttatatactttgctctaaacctagctcacctggtctagtagctacaacatttagtagctacagtcagaaaatctaaattctaattgttaaattcatgtcctcaataaaattgttctgaccaaatgagacaatgaataaaaaagactttgcaaagttacaagcatcatacaaatatacatgaatcattataattttcatggtctcatcctgcccattctattcttaatcccctccacaaagtagaaagtattgattgccaagtcaaagtttaggtgaggaagctatttacaaataagtttccctgcaatgcttaatcccctcctagtgttcacagattgcatcacatcagatttgaaagtaaaatggctgttattttctatttttaatagttatcatcagtgttgtgctctgccgagcattaaaacaacatacacaaagatatgagatgttatgataatccccaaactttattataaataactcaaaatcagagccaaactggctggtattctatgctttatcctttccctagcatcagtcaagggtcctggaacaaagatgagtaactattaaaatgtaagaagcctatcatattgaaatacctcatatgcttggtattttctactatcactttaaaatcactaaaattctgaaacag

SEQ ID NO: 359808 - DNA, 3478 bp, Homo sapiens
caatgaataatgtatgtaaagtgttcagatcctagccatcaatatttattggatgtctttaaatcacctagtgcattatgagagctcagttagtggcagctattaacaatttgggtttgcctgttgccttttctagggtttgggtgttttattcgttgtattttgaatgaatcttaatgtagcatgccatactgaatgtgcatcatgtatacacatatcttaatatcaaatcagaagttttcgtttcacactcagcttattttaggaaacatatattgctctgttcatagtgaatctgattgattaattgaatgttttattccctgcatatgcttttatgtcttcagtaccaaccctcttgaggaagaagtgcaagaattttctcttataatcctctcatttgtgattattcttgtcttggtaatttttgacactatccacagtatagttacatgttacatgccttgtgttttttaaaccttaaagttgcatatgcattgctgtaactcaagcatgctttcattgctttgttccctagttcaaactatgttttaactgatgagcaatcactttggattgaagatactacaaaatcagtttatcaactactatctgaaaacccccccgatggagaaagattttcaaagatggtagagcatatattaaacactgaagaaaactggaactcgtggaaaaatgaaggttgcccaagttttgtgaaagaaagaacatcagataccaaacctacgagaataattcggaagagaacagcacccgaggacttcctagggaaaggacccaccaaaaaaattctgatgggaaatgaggagttaacaaggctttggaatctttgccctgataatatggaagcctgtaaatcagagacaagggaacacatgcccactttggaggaattctttgaagaagccattgaacaggcagaccctgaaaatatggtggaaaatgaatataaggctgtgaacaattcaaattatggttggagagccctgagactattagcacggagaagccctcacttcttccagccaaccaaccagcagtttaaaagtttaccagaatatcttgaaaatatggtaataaagctagccaaggaattaccgcctccttctgaagaaataaaaacaggtgaggatgaagatgaggaagataatgatgctctactgaaggaaaatgaaagtcctgatgttcggcgagacaaacctgtaacaggagaacaaatagaggtatttgccaacaagctgggtgaacaatggaagattctggctccctacttggaaatgaaagactcagaaattaggcagattgagtgtgacagtgaagacatgaagatgagagctaagcagctcctggttgcctggcaagatcaagagggagttcatgcaacacctgagaatctgattaatgcactgaataagtctggattaagtgaccttgcagaaagtctaactaatgacaatgagacaaatagttagcttcttttttttttctttttattaaaactgtgatagattttgttaccaagcagcatttgataagaggtccactggttttggtaaacaataaacatttttataacaattgttgtacagtcggctggtgctctgagaacaatagaacacatattggctcaaaccagagtttggggaggttgggttgagataatgacctaaacgaagtgacctcaagatcacaaaatatatttttttgttaagtagatgtatttataatgaagttaaataagcactatttagggatatgtcgtttcttataccaaattagtttcctgtgtgttgtttgttagtagttttacaaaatttatcctgaaatcccagaataacactttctgaaaccatatgactgctctgttctcacttattcgtgctttcaagcagaggatcaacaaatgatggtttgttctgcctgccacgagtcttgatcattaaaattgtactggcacccagctgtgctcactcataactaactaactaactgtctatggctccagctacactataacaacagcaaagctaaggagctgcagcactttatagcctgcaaagcctgaaataatttactatcaatcatcaatcaatcatcatctatctatctatctatctatctaatctatctatcttgtccattacagaaaatgtttgtttgccaactttaaaagaaatgaagtctaaaacctcacttttccttctagccttacaaaaattgcctgacctctcaagacttttaatcacttcagggattcttgtgacattcaactgagatatatgtgaacacaccctatacacagcaaagcactaagtagtagtagcagaagacagtaccaccgacttttcttgttcccacataagcatttccctttagggctctaagatgaggtcatcatcgtttttaatcctgaagaagggctactgagtgagtgcagattattcggtaaacactcttaggcctaacctagctagtcagtcaagcagtaatctagcacaactctaatgttgagatgatggcctcggtgtgagtggcacagcatataaggcacattcaggaatcaagacttttttttttttggcctactcctctcccttctcaaagaccttacaggcaaggctgaattctaaaatagccttattagttaaaaacaacactggtataactaactcccatttctacttgaaaaaattctttggaataatgcttttttagatcaaataaaaaaatcaagctttttataatgatgataaggaattaattacaatttttaaaattctaatatagtccatacaaggcttatatactttgctctaaacctagctcacctggtctagtagctacaacatttagtagctacagtcagaaaatctaaattctaattgttaaattcatgtcctcaataaaattgttctgaccaaatgagacaatgaataaaaaagactttgcaaagttacaagcatcatacaaatatacatgaatcattataattttcatggtctcatcctgcccattctattcttaatcccctccacaaagtagaaagtattgattgccaagtcaaagtttaggtgaggaagctatttacaaataagtttccctgcaatgcttaatcccctcctagtgttcacagattgcatcacatcagatttgaaagtaaaatggctgttattttctatttttaatagttatcatcagtgttgtgctctgccgagcattaaaacaacatacacaaagatatgagatgttatgataatccccaaactttattataaataactcaaaatcagagccaaactggctggtattctatgctttatcctttccctagcatcagtcaagggtcctggaacaaagatgagtaactattaaaatgtaagaagcctatcatattgaaatacctcatatgcttggtattttctactatcactttaaaatcactaaaattctgaaacag

SEQ ID NO: 359809 - DNA, 3712 bp, Homo sapiens
agggaatggtagagaaactggattgcaaagaattgaaggaaatctcaaatcctcagcttaaaagtgtgtcacaactgccaagcaggataaagaaagataaatctactcttcattacatcatgccataactgtgggcattcagagaaaacctaaaagccactaagggataagaaagacaaatatactgggaaggcacagcagtttgactgttagcagatttctaacatatcaaccattaataccagaagacagtagagaaatattaaagtgctgaaagaaaaatgacattcaatctagaattttataccgagttaaatatactcaagactgtcgatgaaagaaagacatttttatttaaagaccaggataacttaccactcagtgaccctcattttgaaaaaaactactcaaggatgttcttcaggaggaaggaaattgaacccataagaatggagtgggatacagaaggcaacgctgatggatttacaactgagtgacagtaactttcgtcgacacatcctgttgcagtatctcattttattccaatatctcaaggggcaggtcaaattcaaaagttcaaactatgttttaactgatgagcaatcactttggattgaagatactacaaaatcagtttatcaagtaagttcaacacgcaacaaacccatgattgaaaaaatggaaatttaggattttctttgtttcagccccaaataggaaaataaggataaagttaagctcaggtacaagaccacaaacactccttggttctctgcctacaaaccactcctatgatgcagaaagttgttgaaagcttagtatattctttctaatcacagctactatctgaaaacccccccgatggagaaagattttcaaagatggtagagcatatattaaacactgaagaaaactggaactcgtggaaaaatgaaggttgcccaagttttgtgaaagaaagaacatcagataccaaacctacgagaataattcggaagagaacagcacccgaggacttcctagggaaaggacccaccaaaaaaattctgatgggaaatgaggagttaacaaggctttggaatctttgccctgataatatggaagcctgtaaatcagagacaagggaacacatgcccactttggaggaattctttgaagaagccattgaacaggcagaccctgaaaatatggtggaaaatgaatataaggctgtgaacaattcaaattatggttggagagccctgagactattagcacggagaagccctcacttcttccagccaaccaaccagcagtttaaaagtttaccagaatatcttgaaaatatggtaataaagctagccaaggaattaccgcctccttctgaagaaataaaaacaggtgaggatgaagatgaggaagataatgatgctctactgaaggaaaatgaaagtcctgatgttcggcgagacaaacctgtaacaggagaacaaatagaggtatttgccaacaagctgggtgaacaatggaagattctggctccctacttggaaatgaaagactcagaaattaggcagattgagtgtgacagtgaagacatgaagatgagagctaagcagctcctggttgcctggcaagatcaagagggagttcatgcaacacctgagaatctgattaatgcactgaataagtctggattaagtgaccttgcagaaagtctaactaatgacaatgagacaaatagttagcttcttttttttttctttttattaaaactgtgatagattttgttaccaagcagcatttgataagaggtccactggttttggtaaacaataaacatttttataacaattgttgtacagtcggctggtgctctgagaacaatagaacacatattggctcaaaccagagtttggggaggttgggttgagataatgacctaaacgaagtgacctcaagatcacaaaatatatttttttgttaagtagatgtatttataatgaagttaaataagcactatttagggatatgtcgtttcttataccaaattagtttcctgtgtgttgtttgttagtagttttacaaaatttatcctgaaatcccagaataacactttctgaaaccatatgactgctctgttctcacttattcgtgctttcaagcagaggatcaacaaatgatggtttgttctgcctgccacgagtcttgatcattaaaattgtactggcacccagctgtgctcactcataactaactaactaactgtctatggctccagctacactataacaacagcaaagctaaggagctgcagcactttatagcctgcaaagcctgaaataatttactatcaatcatcaatcaatcatcatctatctatctatctatctatctaatctatctatcttgtccattacagaaaatgtttgtttgccaactttaaaagaaatgaagtctaaaacctcacttttccttctagccttacaaaaattgcctgacctctcaagacttttaatcacttcagggattcttgtgacattcaactgagatatatgtgaacacaccctatacacagcaaagcactaagtagtagtagcagaagacagtaccaccgacttttcttgttcccacataagcatttccctttagggctctaagatgaggtcatcatcgtttttaatcctgaagaagggctactgagtgagtgcagattattcggtaaacactcttaggcctaacctagctagtcagtcaagcagtaatctagcacaactctaatgttgagatgatggcctcggtgtgagtggcacagcatataaggcacattcaggaatcaagacttttttttttttggcctactcctctcccttctcaaagaccttacaggcaaggctgaattctaaaatagccttattagttaaaaacaacactggtataactaactcccatttctacttgaaaaaattctttggaataatgcttttttagatcaaataaaaaaatcaagctttttataatgatgataaggaattaattacaatttttaaaattctaatatagtccatacaaggcttatatactttgctctaaacctagctcacctggtctagtagctacaacatttagtagctacagtcagaaaatctaaattctaattgttaaattcatgtcctcaataaaattgttctgaccaaatgagacaatgaataaaaaagactttgcaaagttacaagcatcatacaaatatacatgaatcattataattttcatggtctcatcctgcccattctattcttaatcccctccacaaagtagaaagtattgattgccaagtcaaagtttaggtgaggaagctatttacaaataagtttccctgcaatgcttaatcccctcctagtgttcacagattgcatcacatcagatttgaaagtaaaatggctgttattttctatttttaatagttatcatcagtgttgtgctctgccgagcattaaaacaacatacacaaagatatgagatgttatgataatccccaaactttattataaataactcaaaatcagagccaaactggctggtattctatgctttatcctttccctagcatcagtcaagggtcctggaacaaagatgagtaactattaaaatgtaagaagcctatcatattgaaatacctcatatgcttggtattttctactatcactttaaaatcactaaaattctgaaacag

SEQ ID NO: 359810 - DNA, 3675 bp, Homo sapiens
caatgaataatgtatgtaaagtgttcagatcctagccatcaatatttattggatgtctttaaatcacctagtgcattatgagagctcagttagtggcagctattaacaatttgggtttgcctgttgccttttctagggtttgggtgttttattcgttgtattttgaatgaatcttaatgtagcatgccatactgaatgtgcatcatgtatacacatatcttaatatcaaatcagaagttttcgtttcacactcagcttattttaggaaacatatattgctctgttcatagtgaatctgattgattaattgaatgttttattccctgcatatgcttttatgtcttcagtaccaaccctcttgaggaagaagtgcaagaattttctcttataatcctctcatttgtgattattcttgtcttggtaatttttgacactatccacagtatagttacatgttacatgccttgtgttttttaaaccttaaagttgcatatgcattgctgtaactcaagcatgctttcattgctttgttccctagttcaaactatgttttaactgatgagcaatcactttggattgaagatactacaaaatcagtttatcaagtaagttcaacacgcaacaaacccatgattgaaaaaatggaaatttaggattttctttgtttcagccccaaataggaaaataaggataaagttaagctcaggtacaagaccacaaacactccttggttctctgcctacaaaccactcctatgatgcagaaagttgttgaaagcttagtatattctttctaatcacagctactatctgaaaacccccccgatggagaaagattttcaaagatggtagagcatatattaaacactgaagaaaactggaactcgtggaaaaatgaaggttgcccaagttttgtgaaagaaagaacatcagataccaaacctacgagaataattcggaagagaacagcacccgaggacttcctagggaaaggacccaccaaaaaaattctgatgggaaatgaggagttaacaaggctttggaatctttgccctgataatatggaagcctgtaaatcagagacaagggaacacatgcccactttggaggaattctttgaagaagccattgaacaggcagaccctgaaaatatggtggaaaatgaatataaggctgtgaacaattcaaattatggttggagagccctgagactattagcacggagaagccctcacttcttccagccaaccaaccagcagtttaaaagtttaccagaatatcttgaaaatatggtaataaagctagccaaggaattaccgcctccttctgaagaaataaaaacaggtgaggatgaagatgaggaagataatgatgctctactgaaggaaaatgaaagtcctgatgttcggcgagacaaacctgtaacaggagaacaaatagaggtatttgccaacaagctgggtgaacaatggaagattctggctccctacttggaaatgaaagactcagaaattaggcagattgagtgtgacagtgaagacatgaagatgagagctaagcagctcctggttgcctggcaagatcaagagggagttcatgcaacacctgagaatctgattaatgcactgaataagtctggattaagtgaccttgcagaaagtctaactaatgacaatgagacaaatagttagcttcttttttttttctttttattaaaactgtgatagattttgttaccaagcagcatttgataagaggtccactggttttggtaaacaataaacatttttataacaattgttgtacagtcggctggtgctctgagaacaatagaacacatattggctcaaaccagagtttggggaggttgggttgagataatgacctaaacgaagtgacctcaagatcacaaaatatatttttttgttaagtagatgtatttataatgaagttaaataagcactatttagggatatgtcgtttcttataccaaattagtttcctgtgtgttgtttgttagtagttttacaaaatttatcctgaaatcccagaataacactttctgaaaccatatgactgctctgttctcacttattcgtgctttcaagcagaggatcaacaaatgatggtttgttctgcctgccacgagtcttgatcattaaaattgtactggcacccagctgtgctcactcataactaactaactaactgtctatggctccagctacactataacaacagcaaagctaaggagctgcagcactttatagcctgcaaagcctgaaataatttactatcaatcatcaatcaatcatcatctatctatctatctatctatctaatctatctatcttgtccattacagaaaatgtttgtttgccaactttaaaagaaatgaagtctaaaacctcacttttccttctagccttacaaaaattgcctgacctctcaagacttttaatcacttcagggattcttgtgacattcaactgagatatatgtgaacacaccctatacacagcaaagcactaagtagtagtagcagaagacagtaccaccgacttttcttgttcccacataagcatttccctttagggctctaagatgaggtcatcatcgtttttaatcctgaagaagggctactgagtgagtgcagattattcggtaaacactcttaggcctaacctagctagtcagtcaagcagtaatctagcacaactctaatgttgagatgatggcctcggtgtgagtggcacagcatataaggcacattcaggaatcaagacttttttttttttggcctactcctctcccttctcaaagaccttacaggcaaggctgaattctaaaatagccttattagttaaaaacaacactggtataactaactcccatttctacttgaaaaaattctttggaataatgcttttttagatcaaataaaaaaatcaagctttttataatgatgataaggaattaattacaatttttaaaattctaatatagtccatacaaggcttatatactttgctctaaacctagctcacctggtctagtagctacaacatttagtagctacagtcagaaaatctaaattctaattgttaaattcatgtcctcaataaaattgttctgaccaaatgagacaatgaataaaaaagactttgcaaagttacaagcatcatacaaatatacatgaatcattataattttcatggtctcatcctgcccattctattcttaatcccctccacaaagtagaaagtattgattgccaagtcaaagtttaggtgaggaagctatttacaaataagtttccctgcaatgcttaatcccctcctagtgttcacagattgcatcacatcagatttgaaagtaaaatggctgttattttctatttttaatagttatcatcagtgttgtgctctgccgagcattaaaacaacatacacaaagatatgagatgttatgataatccccaaactttattataaataactcaaaatcagagccaaactggctggtattctatgctttatcctttccctagcatcagtcaagggtcctggaacaaagatgagtaactattaaaatgtaagaagcctatcatattgaaatacctcatatgcttggtattttctactatcactttaaaatcactaaaattctgaaacag

SEQ ID NO: 359811 - DNA, 2849 bp, Homo sapiens
  misc_feature (16)..(16): n is a, c, g, or t
  misc_feature (19)..(19): n is a, c, g, or t
  misc_feature (26)..(26): n is a, c, g, or t
  misc_feature (36)..(36): n is a, c, g, or t
  misc_feature (43)..(43): n is a, c, g, or t
  misc_feature (49)..(50): n is a, c, g, or t
  misc_feature (54)..(55): n is a, c, g, or t
  misc_feature (58)..(60): n is a, c, g, or t
  misc_feature (77)..(77): n is a, c, g, or t
  misc_feature (80)..(80): n is a, c, g, or t
cgactctagaggatcncgnatatgcngtctcatgtnataagtnagactnnctgnnagnnncttaatccagacttatncantgcattaatcagattctcaggtgtgcatgaactccctcttgatcttgccaggcaaccaggagctgcttagctctcatcttcatgtcttcacatgcccacaatcttgtcctgccaccactttatgagtatttattattaagaatatatgccatcctcactggttatttttgtaccgctcagggaacacatgcccactttggaggaattctttgaagaagccattgaacaggcagaccctgaaaatatggtggaaaatgaatataaggctgtgaacaattcaaattatggttggagagccctgagactattagcacggagaagccctcacttcttccagccaaccaaccagcagtttaaaagtttaccagaatatcttgaaaatatggtaataaagctagccaaggaattaccgcctccttctgaagaaataaaaacaggtgaggatgaagatgaggaagataatgatgctctactgaaggaaaatgaaagtcctgatgttcggcgagacaaacctgtaacaggagaacaaatagaggtatttgccaacaagctgggtgaacaatggaagattctggctccctacttggaaatgaaagactcagaaattaggcagattgagtgtgacagtgaagacatgaagatgagagctaagcagctcctggttgcctggcaagatcaagagggagttcatgcaacacctgagaatctgattaatgcactgaataagtctggattaagtgaccttgcagaaagtctaactaatgacaatgagacaaatagttagcttcttttttttttctttttattaaaactgtgatagattttgttaccaagcagcatttgataagaggtccactggttttggtaaacaataaacatttttataacaattgttgtacagtcggctggtgctctgagaacaatagaacacatattggctcaaaccagagtttggggaggttgggttgagataatgacctaaacgaagtgacctcaagatcacaaaatatatttttttgttaagtagatgtatttataatgaagttaaataagcactatttagggatatgtcgtttcttataccaaattagtttcctgtgtgttgtttgttagtagttttacaaaatttatcctgaaatcccagaataacactttctgaaaccatatgactgctctgttctcacttattcgtgctttcaagcagaggatcaacaaatgatggtttgttctgcctgccacgagtcttgatcattaaaattgtactggcacccagctgtgctcactcataactaactaactaactgtctatggctccagctacactataacaacagcaaagctaaggagctgcagcactttatagcctgcaaagcctgaaataatttactatcaatcatcaatcaatcatcatctatctatctatctatctatctaatctatctatcttgtccattacagaaaatgtttgtttgccaactttaaaagaaatgaagtctaaaacctcacttttccttctagccttacaaaaattgcctgacctctcaagacttttaatcacttcagggattcttgtgacattcaactgagatatatgtgaacacaccctatacacagcaaagcactaagtagtagtagcagaagacagtaccaccgacttttcttgttcccacataagcatttccctttagggctctaagatgaggtcatcatcgtttttaatcctgaagaagggctactgagtgagtgcagattattcggtaaacactcttaggcctaacctagctagtcagtcaagcagtaatctagcacaactctaatgttgagatgatggcctcggtgtgagtggcacagcatataaggcacattcaggaatcaagacttttttttttttggcctactcctctcccttctcaaagaccttacaggcaaggctgaattctaaaatagccttattagttaaaaacaacactggtataactaactcccatttctacttgaaaaaattctttggaataatgcttttttagatcaaataaaaaaatcaagctttttataatgatgataaggaattaattacaatttttaaaattctaatatagtccatacaaggcttatatactttgctctaaacctagctcacctggtctagtagctacaacatttagtagctacagtcagaaaatctaaattctaattgttaaattcatgtcctcaataaaattgttctgaccaaatgagacaatgaataaaaaagactttgcaaagttacaagcatcatacaaatatacatgaatcattataattttcatggtctcatcctgcccattctattcttaatcccctccacaaagtagaaagtattgattgccaagtcaaagtttaggtgaggaagctatttacaaataagtttccctgcaatgcttaatcccctcctagtgttcacagattgcatcacatcagatttgaaagtaaaatggctgttattttctatttttaatagttatcatcagtgttgtgctctgccgagcattaaaacaacatacacaaagatatgagatgttatgataatccccaaactttattataaataactcaaaatcagagccaaactggctggtattctatgctttatcctttccctagcatcagtcaagggtcctggaacaaagatgagtaactattaaaatgtaagaagcctatcatattgaaatacctcatatgcttggtattttctactatcactttaaaatcactaaaattctgaaacag

SEQ ID NO: 359812 - DNA, 2631 bp, Homo sapiens
aaatcctggaactgtgctttttactgacttcctgcttcccagattgggggtggggagtctttccaactctgaggtcttcccaagttcactccttctgcaggtgaagatagtcccacttaggatccttacctgacactgtcatttaacgctctcaggggtgaggttctggcaccctgtacttggaatctcacaaccgtccttatccaaacaaaatacctgttaccttacttcagaggctggcattctttcaaacattcttctttctcatttttagcctccttctgaagaaataaaaacaggtgaggatgaagatgaggaagataatgatgctctactgaaggaaaatgaaagtcctgatgttcggcgagacaaacctgtaacaggagaacaaatagaggtatttgccaacaagctgggtgaacaatggaagattctggctccctacttggaaatgaaagactcagaaattaggcagattgagtgtgacagtgaagacatgaagatgagagctaagcagctcctggttgcctggcaagatcaagagggagttcatgcaacacctgagaatctgattaatgcactgaataagtctggattaagtgaccttgcagaaagtctaactaatgacaatgagacaaatagttagcttcttttttttttctttttattaaaactgtgatagattttgttaccaagcagcatttgataagaggtccactggttttggtaaacaataaacatttttataacaattgttgtacagtcggctggtgctctgagaacaatagaacacatattggctcaaaccagagtttggggaggttgggttgagataatgacctaaacgaagtgacctcaagatcacaaaatatatttttttgttaagtagatgtatttataatgaagttaaataagcactatttagggatatgtcgtttcttataccaaattagtttcctgtgtgttgtttgttagtagttttacaaaatttatcctgaaatcccagaataacactttctgaaaccatatgactgctctgttctcacttattcgtgctttcaagcagaggatcaacaaatgatggtttgttctgcctgccacgagtcttgatcattaaaattgtactggcacccagctgtgctcactcataactaactaactaactgtctatggctccagctacactataacaacagcaaagctaaggagctgcagcactttatagcctgcaaagcctgaaataatttactatcaatcatcaatcaatcatcatctatctatctatctatctatctaatctatctatcttgtccattacagaaaatgtttgtttgccaactttaaaagaaatgaagtctaaaacctcacttttccttctagccttacaaaaattgcctgacctctcaagacttttaatcacttcagggattcttgtgacattcaactgagatatatgtgaacacaccctatacacagcaaagcactaagtagtagtagcagaagacagtaccaccgacttttcttgttcccacataagcatttccctttagggctctaagatgaggtcatcatcgtttttaatcctgaagaagggctactgagtgagtgcagattattcggtaaacactcttaggcctaacctagctagtcagtcaagcagtaatctagcacaactctaatgttgagatgatggcctcggtgtgagtggcacagcatataaggcacattcaggaatcaagacttttttttttttggcctactcctctcccttctcaaagaccttacaggcaaggctgaattctaaaatagccttattagttaaaaacaacactggtataactaactcccatttctacttgaaaaaattctttggaataatgcttttttagatcaaataaaaaaatcaagctttttataatgatgataaggaattaattacaatttttaaaattctaatatagtccatacaaggcttatatactttgctctaaacctagctcacctggtctagtagctacaacatttagtagctacagtcagaaaatctaaattctaattgttaaattcatgtcctcaataaaattgttctgaccaaatgagacaatgaataaaaaagactttgcaaagttacaagcatcatacaaatatacatgaatcattataattttcatggtctcatcctgcccattctattcttaatcccctccacaaagtagaaagtattgattgccaagtcaaagtttaggtgaggaagctatttacaaataagtttccctgcaatgcttaatcccctcctagtgttcacagattgcatcacatcagatttgaaagtaaaatggctgttattttctatttttaatagttatcatcagtgttgtgctctgccgagcattaaaacaacatacacaaagatatgagatgttatgataatccccaaactttattataaataactcaaaatcagagccaaactggctggtattctatgctttatcctttccctagcatcagtcaagggtcctggaacaaagatgagtaactattaaaatgtaagaagcctatcatattgaaatacctcatatgcttggtattttctactatcactttaaaatcactaaaattctgaaacag

SEQ ID NO: 359813 - DNA, 1957 bp, Homo sapiens
  misc_feature (1957)..(1957): n is a, c, g, or t
agcggcagtggcgggcacgcgcagccgagaagatgtctccgacgccgccgctcttcagtttgcccgaagcgcggacgcggtttacgaagtctaccagagaggccttgaacaacaaaaacatcaagccattgttaagtaccttcagccaggtacctggcagtgaaaatgaaaaaaaatgtacccttgaccaagctttcagaggtattctagaagaagaaattataaatcattcatcatgtgaaaacgttttagctattatttctcttgctattgggggagtaactgaaggtatttgtaccgcatctacaccttttgtattgttgggagatgttttggattgtcttcctttggatcagtgtgacacaatattcacttttgtggaaaaaaatgttgctacttggaaatcaaatacattctattctgctgggaaaaattacttactacgtatgtgcaatgatctcctaagaagattgtctaaatcccagaatacagtcttctgtggacggattcagctctttttggccaggcttttccctctgtctgagaaatcaggtcttaacttgcagagtcagtttaatctggaaaatgtcactgttttcaatacaaatgagcaggaaagcaccctgggtcagaagcacactgaagatagagaagaaggaatggatgtagaagaaggcgaaatgggagatgaggaagctccaacaacgtgctctattccaattgattacaacctgtatcgaaaattctggtcacttcaggattacttcaggaaccctgtgcaatgctatgagaagatttcatggaaaacttttctcaagtattctgaagaagttttagctgtttttaagagttataaattagatgatactcaggcctcaagaaaaaagatggaagaattgaaaacaggaggagaacatgtatattttgcaaaatttttaacaagtgaaaagctgatggatttacaactgagtgacagtaactttcgtcgacacatcctgttgcagtatctcattttattccaatatctcaaggggcaggtcaaattcaaaagttcaaactatgttttaactgatgagcaatcactttggattgaagatactacaaaatcagtttatcaactactatctgaaaacccccccgatggagaaagattttcaaagatggtagagcatatattaaacactgaagaaaactggaactcgtggaaaaatgaaggttgcccaagttttgtgaaagaaagaacatcagataccaaacctacgagaataattcggaagagaacagcacccgaggacttcctagggaaaggacccaccaaaaaaattctgatgggaaatgaggagttaacaaggctttggaatctttgccctgataatatggaagcctgtaaatcagagacaagggaacacatgcccactttggaggaattctttgaagaagccattgaacaggcagaccctgaaaatatggtggaaaatgaatataaatgaacagcattaatatttagaaacagtgtcaagttaacgataggtagccctggagttgtgagcactgtggaggtgtttgtgtttagtgcgcagcaacgttgatataattggtgattgcggaggatattgaagttatagagtcggggctcgcggtggattgatctgatttcttcagtcatagtatggacgcgtaggatttcattatgcggatctagttaatggcttatagtgtgaggacgcgaaggtacagtgggtatatgaaggaggccgtgaggggatggagatatgtcaggggtgtggaggttgcatacagaacattacatgattaccggtgcttcaattcaataagaaagtcaggacgcgaggactaatgtgtcatcgttcgcacccctgtacggaggagttccactgctaatatggtaacagctcaggcgaaactatgtagagattagatcagaaacttgaagtan

SEQ ID NO: 359814 - DNA, 1995 bp, Homo sapiens
  misc_feature (1523)..(1523): n is a, c, g, or t
  misc_feature (1534)..(1534): n is a, c, g, or t
  misc_feature (1559)..(1559): n is a, c, g, or t
  misc_feature (1588)..(1588): n is a, c, g, or t
  misc_feature (1597)..(1597): n is a, c, g, or t
  misc_feature (1602)..(1602): n is a, c, g, or t
  misc_feature (1604)..(1605): n is a, c, g, or t
  misc_feature (1609)..(1609): n is a, c, g, or t
  misc_feature (1611)..(1611): n is a, c, g, or t
  misc_feature (1614)..(1614): n is a, c, g, or t
  misc_feature (1620)..(1620): n is a, c, g, or t
  misc_feature (1627)..(1627): n is a, c, g, or t
  misc_feature (1633)..(1633): n is a, c, g, or t
  misc_feature (1646)..(1647): n is a, c, g, or t
  misc_feature (1673)..(1673): n is a, c, g, or t
  misc_feature (1689)..(1689): n is a, c, g, or t
  misc_feature (1695)..(1695): n is a, c, g, or t
  misc_feature (1699)..(1699): n is a, c, g, or t
  misc_feature (1702)..(1702): n is a, c, g, or t
  misc_feature (1715)..(1715): n is a, c, g, or t
  misc_feature (1718)..(1719): n is a, c, g, or t
  misc_feature (1740)..(1740): n is a, c, g, or t
  misc_feature (1748)..(1748): n is a, c, g, or t
  misc_feature (1750)..(1750): n is a, c, g, or t
  misc_feature (1760)..(1760): n is a, c, g, or t
  misc_feature (1769)..(1769): n is a, c, g, or t
  misc_feature (1780)..(1781): n is a, c, g, or t
  misc_feature (1788)..(1788): n is a, c, g, or t
  misc_feature (1800)..(1800): n is a, c, g, or t
  misc_feature (1814)..(1814): n is a, c, g, or t
  misc_feature (1834)..(1834): n is a, c, g, or t
  misc_feature (1836)..(1836): n is a, c, g, or t
  misc_feature (1848)..(1848): n is a, c, g, or t
  misc_feature (1850)..(1850): n is a, c, g, or t
  misc_feature (1852)..(1852): n is a, c, g, or t
  misc_feature (1859)..(1860): n is a, c, g, or t
  misc_feature (1863)..(1863): n is a, c, g, or t
  misc_feature (1866)..(1866): n is a, c, g, or t
  misc_feature (1870)..(1871): n is a, c, g, or t
  misc_feature (1873)..(1874): n is a, c, g, or t
  misc_feature (1878)..(1878): n is a, c, g, or t
  misc_feature (1893)..(1894): n is a, c, g, or t
  misc_feature (1903)..(1903): n is a, c, g, or t
  misc_feature (1906)..(1906): n is a, c, g, or t
  misc_feature (1915)..(1915): n is a, c, g, or t
  misc_feature (1925)..(1925): n is a, c, g, or t
  misc_feature (1954)..(1954): n is a, c, g, or t
agcggcagtggcgggcacgcgcagccgagaagatgtctccgacgccgccgctcttcagtttgcccgaagcgcggacgcggtttacgaagtctaccagagaggccttgaacaacaaaaacatcaagccattgttaagtaccttcagccaggtacctggcagtgaaaatgaaaaaaaatgtacccttgaccaagctttcagaggtattctagaagaagaaattataaatcattcatcatgtgaaaacgttttagctattatttctcttgctattgggggagtaactgaaggtatttgtaccgcatctacaccttttgtattgttgggagatgttttggattgtcttcctttggatcagtgtgacacaatattcacttttgtggaaaaaaatgttgctacttggaaatcaaatacattctattctgctgggaaaaattacttactacgtatgtgcaatgatctcctaagaagattgtctaaatcccagaatacagtcttctgtggacggattcagctctttttggccaggcttttccctctgtctgagaaatcaggtcttaacttgcagagtcagtttaatctggaaaatgtcactgttttcaatacaaatgagcaggaaagcaccctgggtcagaagcacactgaagatagagaagaaggaatggatgtagaagaaggcgaaatgggagatgaggaagctccaacaacgtgctctattccaattgattacaacctgtatcgaaaattctggtcacttcaggattacttcaggaaccctgtgcaatgctatgagaagatttcatggaaaacttttctcaagtattctgaagaagttttagctgtttttaagagttataaattagatgatactcaggcctcaagaaaaaagatggaagaattgaaaacaggaggagaacatgtatattttgcaaaatttttaacaagtgaaaagctgatggatttacaactgagtgacagtaactttcgtcgacacatcctgttgcagtatctcattttattccaatatctcaaggggcaggtcaaattcaaaagttcaaactatgttttaactgatgagcaatcactttggattgaagatactacaaaatcagtttatcaactactatctgaaaacccccccgatggagaaagattttcaaagatggtagagcatatattaaacactgaagaaaactggaactcgtggaaaaatgaaggttgcccaagttttgtgaaagaaagaacatcagataccaaacctacgagaataattcggaagagaacagcacccgaggacttcctagggaaaggacccaccaaaaaaattctgatgggaaatgaggagttaacaaggctttggaatctttgccctgataatatggaagcctgtaaatcagagacaagggaacacatgcccactttggaggaattctttgaagaagccattgaacaggcagaccctgaaaatatggtggaaaatgaatataaaaaagaaaataaaaataaagaaataaaaaaaaaaaantaaaaaaaganaaaaaaaagaatataaaaaaaaaanaaaacaaaaattaaaaacaacaaaaaaanaaaaaattnaaaantnnaaananaanataatnaaaaaanaataanaaaaataaaaaannaaataaaaaaaaaaatatgaagaaanaaaaaaaggagaggangaagangaanaanataaagaagaaanaannaagaaaaatgaaagtaatgangataggananaaaaaaatanaaaaaaaanaaaaaaaagannaaaaatncaaaaaaaaaangggtgaaaaaaagnaaaaaaatggcaccataaanangaaatgaaagantnanaaattannaanaanaganngnnaaantgaagaaaagaagannaaaaaaaancanataatggangaatggaaanataaagagggaggtaaagaaaaaagtganaaaaatgaaataaaggaaatgaataagtatggaaataagtg

SEQ ID NO: 359815 - DNA, 1207 bp, Homo sapiens
agcggcagtggcgggcacgcgcagccgagaagatgtctccgacgccgccgctcttcagtttgcccgaagcgcggacgcggtttacgaagtctaccagagaggccttgaacaacaaaaacatcaagccattgttaagtaccttcagccaggtacctggcagtgaaaatgaaaaaaaatgtacccttgaccaagctttcagaggtattctagaagaagaaattataaatcattcatcatgtgaaaacgttttagctattatttctcttgctattgggggagtaactgaaggtatttgtaccgcatctacaccttttgtattgttgggagatgttttggattgtcttcctttggatcagtgtgacacaatattcacttttgtggaaaaaaatgttgctacttggaaatcaaatacattctattctgctgggaaaaattacttactacgtatgtgcaatgatctcctaagaagattgtctaaatcccagaatacagtcttctgtggacggattcagctctttttggccaggcttttccctctgtctgagaaatcaggtcttaacttgcagagtcagtttaatctggaaaatgtcactgttttcaatacaaatgagcaggaaagcaccctgggtcagaagcacactgaagatagagaagaaggaatggatgtagaagaaggcgaaatgggagatgaggaagctccaacaacgtgctctattccaattgattacaacctgtatcgaaaattctggtcacttcaggattacttcaggaaccctgtgcaatgctatgagaagatttcatggaaaacttttctcaagtattctgaagaagttttagctgtttttaagagttataaattagatgatactcaggcctcaagaaaaaagatggaagaattgaaaacaggaggagaacatgtatattttgcaaaatttttaacaagtgaaaaggtataagtttttctttttcattaagcataataagaaatggtcttgttttatttccgtttagctgacagcctttctaagttaaactgaatagaaatgtttcttattttactttgggttaaagctgattgattaatgttagtttgaaagtcccatttcttcctttcagaagtaggactaatttggtttcaaaggtgaaagtagttctacattaagtctgttttgtaaactaattttggaataaatgcagtttaattact

SEQ ID NO: 359816 - DNA, 510 bp, Homo sapiens
ttttcagggttgccattcaatttatttaaaaaaacaagaaactgtgaagaacaacaaaacaaggtatgcccatactccaaaggtacttttaagaaatgaatttttgaaaggatttgaaatcaaatgtgttaattttgactgctctttatggatttggcattttgtagttttgattatgacacaagttatacataagtttaggtgtcactggacttgctatgcatctttttttttgtttttttactaggtcttaacttgcagagtcagtttaatctggaaaatgtcactgttttcaatacaaatgagcaggaaagcaccctgggtcagaaggtgaggctgatttgaaatcttctcagataacatatttgcaagtttgttattaagatagtgggtccaggcacagtggctcacacttgtaatcctagcactttgggaggctgaggtgggcagatcgcttgagcctaggagttcaagaccagcctggacaacatggcaaatcctcattcctac

SEQ ID NO: 359817 - DNA, 779 bp, Homo sapiens
agcggcagtggcgggcacgcgcagccgagaagatgtctccgacgccgccgctcttcagtttgcccgaagcgcggacgcggtttacgaagtctaccagagaggccttgaacaacaaaaacatcaagccattgttaagtaccttcagccaggtacctggcagtgaaaatgaaaaaaaatgtacccttgaccaagctttcagaggtattctagaagaagaaattataaatcattcatcatgtgaaaacgttttagctattatttctcttgctattgggggagtaactgaaggtaagtatggttctgttttgttttgtttaaagtaatcttggacatgacatgctttatttaaaacgtcttctccccatacttctccacctatctgattttgtttattcttcaagttctgcctgactcccaactttgccaagaagtcccagttgaattagttcactcttatttctcatctctattatgcagtgcacattttggcacttcctttgttctccagttgttttgttcattcagtaaattttcattgagcatctactatgtgcctggtactgagctaggacctggagattcaatggtgaataaagcatattcccctgcttatgtggagctaatggaagaaacagatgtatgcatgccttactatggtgtaagtactatggtcgaagtgggaatgaagtgtagttagagggaatagagccaacatggctctctaaacttcagtctaaaggagtcaggagaggttttagaaaagaacatgagaactagaa

SEQ ID NO: 359818 - DNA, 3941 bp, Homo sapiens
agcggcagtggcgggcacgcgcagccgagaagatgtctccgacgccgccgctcttcagtttgcccgaagcgcggacgcggtttacgaagtctaccagagaggccttgaacaacaaaaacatcaagccattgttaagtaccttcagccaggtacctggcagtgaaaatgaaaaaaaatgtacccttgaccaagctttcagaggtattctagaagaagaaattataaatcattcatcatgtgaaaacgttttagctattatttctcttgctattgggggagtaactgaaggtatttgtaccgcatctacaccttttgtattgttgggagatgttttggattgtcttcctttggatcagtgtgacacaatattcacttttgtggaaaaaaatgttgctacttggaaatcaaatacattctattctgctgggaaaaattacttactacgtatgtgcaatgatctcctaagaagattgtctaaatcccagaatacagtcttctgtggacggattcagctctttttggccaggcttttccctctgtctgagaaatcaggtcttaacttgcagagtcagtttaatctggaaaatgtcactgttttcaatacaaatgagcaggaaagcaccctgggtcagaagcacactgaagatagagaagaaggaatggatgtagaagaaggcgaaatgggagatgaggaagctccaacaacgtgctctattccaattgattacaacctgtatcgaaaattctggtcacttcaggattacttcaggaaccctgtgcaatgctatgagaagatttcatggaaaacttttctcaagtattctgaagaagttttagctgtttttaagagttataaattagatgatactcaggcctcaagaaaaaagatggaagaattgaaaacaggaggagaacatgtatattttgcaaaatttttaacaagtgaaaagctgatggatttacaactgagtgacagtaactttcgtcgacacatcctgttgcagtatctcattttattccaatatctcaaggggcaggtcaaattcaaaagttcaaactatgttttaactgatgagcaatcactttggattgaagatactacaaaatcagtttatcaactactatctgaaaacccccccgatggagaaagattttcaaagatggtagagcatatattaaacactgaagaaaactggaactcgtggaaaaatgaaggttgcccaagttttgtgaaagaaagaacatcagataccaaacctacgagaataattcggaagagaacagcacccgaggacttcctagggaaaggacccaccaaaaaaattctgatgggaaatgaggagttaacaaggctttggaatctttgccctgataatatggaagcctgtaaatcagagacaagggaacacatgcccactttggaggaattctttgaagaagccattgaacaggcagaccctgaaaatatggtggaaaatgaatataaggctgtgaacaattcaaattatggttggagagccctgagactattagcacggagaagccctcacttcttccagccaaccaaccagcagtttaaaagtttaccagaatatcttgaaaatatggtaataaagctagccaaggaattaccgcctccttctgaagaaataaaaacaggtgaggatgaagatgaggaagataatgatgctctactgaaggaaaatgaaagtcctgatgttcggcgagacaaacctgtaacaggagaacaaatagaggtatttgccaacaagctgggtgaacaatggaagattctggctccctacttggaaatgaaagactcagaaattaggcagattgagtgtgacagtgaagacatgaagatgagagctaagcagctcctggttgcctggcaagatcaagagggagttcatgcaacacctgagaatctgattaatgcactgaataagtctggattaagtgaccttgcagaaagtctaactaatgacaatgagacaaatagttagcttcttttttttttctttttattaaaactgtgatagattttgttaccaagcagcatttgataagaggtccactggttttggtaaacaataaacatttttataacaattgttgtacagtcggctggtgctctgagaacaatagaacacatattggctcaaaccagagtttggggaggttgggttgagataatgacctaaacgaagtgacctcaagatcacaaaatatatttttttgttaagtagatgtatttataatgaagttaaataagcactatttagggatatgtcgtttcttataccaaattagtttcctgtgtgttgtttgttagtagttttacaaaatttatcctgaaatcccagaataacactttctgaaaccatatgactgctctgttctcacttattcgtgctttcaagcagaggatcaacaaatgatggtttgttctgcctgccacgagtcttgatcattaaaattgtactggcacccagctgtgctcactcataactaactaactaactgtctatggctccagctacactataacaacagcaaagctaaggagctgcagcactttatagcctgcaaagcctgaaataatttactatcaatcatcaatcaatcatcatctatctatctatctatctatctaatctatctatcttgtccattacagaaaatgtttgtttgccaactttaaaagaaatgaagtctaaaacctcacttttccttctagccttacaaaaattgcctgacctctcaagacttttaatcacttcagggattcttgtgacattcaactgagatatatgtgaacacaccctatacacagcaaagcactaagtagtagtagcagaagacagtaccaccgacttttcttgttcccacataagcatttccctttagggctctaagatgaggtcatcatcgtttttaatcctgaagaagggctactgagtgagtgcagattattcggtaaacactcttaggcctaacctagctagtcagtcaagcagtaatctagcacaactctaatgttgagatgatggcctcggtgtgagtggcacagcatataaggcacattcaggaatcaagacttttttttttttggcctactcctctcccttctcaaagaccttacaggcaaggctgaattctaaaatagccttattagttaaaaacaacactggtataactaactcccatttctacttgaaaaaattctttggaataatgcttttttagatcaaataaaaaaatcaagctttttataatgatgataaggaattaattacaatttttaaaattctaatatagtccatacaaggcttatatactttgctctaaacctagctcacctggtctagtagctacaacatttagtagctacagtcagaaaatctaaattctaattgttaaattcatgtcctcaataaaattgttctgaccaaatgagacaatgaataaaaaagactttgcaaagttacaagcatcatacaaatatacatgaatcattataattttcatggtctcatcctgcccattctattcttaatcccctccacaaagtagaaagtattgattgccaagtcatcccctcctagtgttcacagattgcatcacatcagatttgaaagtaaaatggctgttattttctatttttaatagttatcatcagtgttgtgctctgccgagcattaaaacaacatacacaaagatatgagatgttatgataatccccaaactttattataaataactcaaaatcagagccaaactggctggtattctatgctttatcctttccctagcatcagtcaagggtcctggaacaaagatgagtaactattaaaatgtaagaagcctatcatattgaaatacctcatatgcttggtattttctactatcactttaaaatcactaaaattctgaaacag

SEQ ID NO: 359819 - DNA, 4188 bp, Homo sapiens
agcggcagtggcgggcacgcgcagccgagaagatgtctccgacgccgccgctcttcagtttgcccgaagcgcggacgcggtttacgaagtctaccagagaggccttgaacaacaaaaacatcaagccattgttaagtaccttcagccaggtacctggcagtgaaaatgaaaaaaaatgtacccttgaccaagctttcagaggtattctagaagaagaaattataaatcattcatcatgtgaaaacgttttagctattatttctcttgctattgggggagtaactgaaggtatttgtaccgcatctacaccttttgtattgttgggagatgttttggattgtcttcctttggatcagtgtgacacaatattcacttttgtggaaaaaaatgttgctacttggaaatcaaatacattctattctgctgggaaaaattacttactacgtatgtgcaatgatctcctaagaagattgtctaaatcccagaatacagtcttctgtggacggattcagctctttttggccaggcttttccctctgtctgagaaatcaggtcttaacttgcagagtcagtttaatctggaaaatgtcactgttttcaatacaaatgagcaggaaagcaccctgggtcagaagcacactgaagatagagaagaaggaatggatgtagaagaaggcgaaatgggagatgaggaagctccaacaacgtgctctattccaattgattacaacctgtatcgaaaattctggtcacttcaggattacttcaggaaccctgtgcaatgctatgagaagatttcatggaaaacttttctcaagtattctgaagaagttttagctgtttttaagagttataaattagatgatactcaggcctcaagaaaaaagatggaagaattgaaaacaggaggagaacatgtatattttgcaaaatttttaacaagtgaaaagctgatggatttacaactgagtgacagtaactttcgtcgacacatcctgttgcagtatctcattttattccaatatctcaaggggcaggtcaaattcaaaagttcaaactatgttttaactgatgagcaatcactttggattgaagatactacaaaatcagtttatcaagtaagttcaacacgcaacaaacccatgattgaaaaaatggaaatttaggattttctttgtttcagccccaaataggaaaataaggataaagttaagctcaggtacaagaccacaaacactccttggttctctgcctacaaaccactcctatgatgcagaaagttgttgaaagcttagtatattctttctaatcacagctactatctgaaaacccccccgatggagaaagattttcaaagatggtagagcatatattaaacactgaagaaaactggaactcgtggaaaaatgaaggttgcccaagttttgtgaaagaaagaacatcagataccaaacctacgagaataattcggaagagaacagcacccgaggacttcctagggaaaggacccaccaaaaaaattctgatgggaaatgaggagttaacaaggctttggaatctttgccctgataatatggaagcctgtaaatcagagacaagggaacacatgcccactttggaggaattctttgaagaagccattgaacaggcagaccctgaaaatatggtggaaaatgaatataaggctgtgaacaattcaaattatggttggagagccctgagactattagcacggagaagccctcacttcttccagccaaccaaccagcagtttaaaagtttaccagaatatcttgaaaatatggtaataaagctagccaaggaattaccgcctccttctgaagaaataaaaacaggtgaggatgaagatgaggaagataatgatgctctactgaaggaaaatgaaagtcctgatgttcggcgagacaaacctgtaacaggagaacaaatagaggtatttgccaacaagctgggtgaacaatggaagattctggctccctacttggaaatgaaagactcagaaattaggcagattgagtgtgacagtgaagacatgaagatgagagctaagcagctcctggttgcctggcaagatcaagagggagttcatgcaacacctgagaatctgattaatgcactgaataagtctggattaagtgaccttgcagaaagtctaactaatgacaatgagacaaatagttagcttcttttttttttctttttattaaaactgtgatagattttgttaccaagcagcatttgataagaggtccactggttttggtaaacaataaacatttttataacaattgttgtacagtcggctggtgctctgagaacaatagaacacatattggctcaaaccagagtttggggaggttgggttgagataatgacctaaacgaagtgacctcaagatcacaaaatatatttttttgttaagtagatgtatttataatgaagttaaataagcactatttagggatatgtcgtttcttataccaaattagtttcctgtgtgttgtttgttagtagttttacaaaatttatcctgaaatcccagaataacactttctgaaaccatatgactgctctgttctcacttattcgtgctttcaagcagaggatcaacaaatgatggtttgttctgcctgccacgagtcttgatcattaaaattgtactggcacccagctgtgctcactcataactaactaactaactgtctatggctccagctacactataacaacagcaaagctaaggagctgcagcactttatagcctgcaaagcctgaaataatttactatcaatcatcaatcaatcatcatctatctatctatctatctatctaatctatctatcttgtccattacagaaaatgtttgtttgccaactttaaaagaaatgaagtctaaaacctcacttttccttctagccttacaaaaattgcctgacctctcaagacttttaatcacttcagggattcttgtgacattcaactgagatatatgtgaacacaccctatacacagcaaagcactaagtagtagtagcagaagacagtaccaccgacttttcttgttcccacataagcatttccctttagggctctaagatgaggtcatcatcgtttttaatcctgaagaagggctactgagtgagtgcagattattcggtaaacactcttaggcctaacctagctagtcagtcaagcagtaatctagcacaactctaatgttgagatgatggcctcggtgtgagtggcacagcatataaggcacattcaggaatcaagacttttttttttttggcctactcctctcccttctcaaagaccttacaggcaaggctgaattctaaaatagccttattagttaaaaacaacactggtataactaactcccatttctacttgaaaaaattctttggaataatgcttttttagatcaaataaaaaaatcaagctttttataatgatgataaggaattaattacaatttttaaaattctaatatagtccatacaaggcttatatactttgctctaaacctagctcacctggtctagtagctacaacatttagtagctacagtcagaaaatctaaattctaattgttaaattcatgtcctcaataaaattgttctgaccaaatgagacaatgaataaaaaagactttgcaaagttacaagcatcatacaaatatacatgaatcattataattttcatggtctcatcctgcccattctattcttaatcccctccacaaagtagaaagtattgattgccaagtcaaagtttaggtgaggaagctatttacaaataagtttccctgcaatgcttaatcccctcctagtgttcacagattgcatcacatcagatttgaaagtaaaatggctgttattttctatttttaatagttatcatcagtgttgtgctctgccgagcattaaaacaacatacacaaagatatgagatgttatgataatccccaaactttattataaataactcaaaatcagagccaaactggctggtattctatgctttatcctttccctagcatcagtcaagggtcctggaacaaagatgagtaactattaaaatgtaagaagcctatcatattgaaatacctcatatgcttggtattttctactatcactttaaaatcactaaaattctgaaacag

SEQ ID NO: 359820 - DNA, 3790 bp, Homo sapiens
taagaccattcgagagaattatttttcataggctattctactctacagttttttaaacttttaaattggcttgtgctccacttgaaggtatttgtaccgcatctacaccttttgtattgttgggagatgttttggattgtcttcctttggatcagtgtgacacaatattcacttttgtggaaaaaaatgttgctacttggaaatcaaatacattctattctgctgggaaaaattacttactacgtatgtgcaatgatctcctaagaagattgtctaaatcccagaatacagtcttctgtggacggattcagctctttttggccaggcttttccctctgtctgagaaatcaggtcttaacttgcagagtcagtttaatctggaaaatgtcactgttttcaatacaaatgagcaggaaagcaccctgggtcagaagcacactgaagatagagaagaaggaatggatgtagaagaaggcgaaatgggagatgaggaagctccaacaacgtgctctattccaattgattacaacctgtatcgaaaattctggtcacttcaggattacttcaggaaccctgtgcaatgctatgagaagatttcatggaaaacttttctcaagtattctgaagaagttttagctgtttttaagagttataaattagatgatactcaggcctcaagaaaaaagatggaagaattgaaaacaggaggagaacatgtatattttgcaaaatttttaacaagtgaaaagctgatggatttacaactgagtgacagtaactttcgtcgacacatcctgttgcagtatctcattttattccaatatctcaaggggcaggtcaaattcaaaagttcaaactatgttttaactgatgagcaatcactttggattgaagatactacaaaatcagtttatcaactactatctgaaaacccccccgatggagaaagattttcaaagatggtagagcatatattaaacactgaagaaaactggaactcgtggaaaaatgaaggttgcccaagttttgtgaaagaaagaacatcagataccaaacctacgagaataattcggaagagaacagcacccgaggacttcctagggaaaggacccaccaaaaaaattctgatgggaaatgaggagttaacaaggctttggaatctttgccctgataatatggaagcctgtaaatcagagacaagggaacacatgcccactttggaggaattctttgaagaagccattgaacaggcagaccctgaaaatatggtggaaaatgaatataaggctgtgaacaattcaaattatggttggagagccctgagactattagcacggagaagccctcacttcttccagccaaccaaccagcagtttaaaagtttaccagaatatcttgaaaatatggtaataaagctagccaaggaattaccgcctccttctgaagaaataaaaacaggtgaggatgaagatgaggaagataatgatgctctactgaaggaaaatgaaagtcctgatgttcggcgagacaaacctgtaacaggagaacaaatagaggtatttgccaacaagctgggtgaacaatggaagattctggctccctacttggaaatgaaagactcagaaattaggcagattgagtgtgacagtgaagacatgaagatgagagctaagcagctcctggttgcctggcaagatcaagagggagttcatgcaacacctgagaatctgattaatgcactgaataagtctggattaagtgaccttgcagaaagtctaactaatgacaatgagacaaatagttagcttcttttttttttctttttattaaaactgtgatagattttgttaccaagcagcatttgataagaggtccactggttttggtaaacaataaacatttttataacaattgttgtacagtcggctggtgctctgagaacaatagaacacatattggctcaaaccagagtttggggaggttgggttgagataatgacctaaacgaagtgacctcaagatcacaaaatatatttttttgttaagtagatgtatttataatgaagttaaataagcactatttagggatatgtcgtttcttataccaaattagtttcctgtgtgttgtttgttagtagttttacaaaatttatcctgaaatcccagaataacactttctgaaaccatatgactgctctgttctcacttattcgtgctttcaagcagaggatcaacaaatgatggtttgttctgcctgccacgagtcttgatcattaaaattgtactggcacccagctgtgctcactcataactaactaactaactgtctatggctccagctacactataacaacagcaaagctaaggagctgcagcactttatagcctgcaaagcctgaaataatttactatcaatcatcaatcaatcatcatctatctatctatctatctatctaatctatctatcttgtccattacagaaaatgtttgtttgccaactttaaaagaaatgaagtctaaaacctcacttttccttctagccttacaaaaattgcctgacctctcaagacttttaatcacttcagggattcttgtgacattcaactgagatatatgtgaacacaccctatacacagcaaagcactaagtagtagtagcagaagacagtaccaccgacttttcttgttcccacataagcatttccctttagggctctaagatgaggtcatcatcgtttttaatcctgaagaagggctactgagtgagtgcagattattcggtaaacactcttaggcctaacctagctagtcagtcaagcagtaatctagcacaactctaatgttgagatgatggcctcggtgtgagtggcacagcatataaggcacattcaggaatcaagacttttttttttttggcctactcctctcccttctcaaagaccttacaggcaaggctgaattctaaaatagccttattagttaaaaacaacactggtataactaactcccatttctacttgaaaaaattctttggaataatgcttttttagatcaaataaaaaaatcaagctttttataatgatgataaggaattaattacaatttttaaaattctaatatagtccatacaaggcttatatactttgctctaaacctagctcacctggtctagtagctacaacatttagtagctacagtcagaaaatctaaattctaattgttaaattcatgtcctcaataaaattgttctgaccaaatgagacaatgaataaaaaagactttgcaaagttacaagcatcatacaaatatacatgaatcattataattttcatggtctcatcctgcccattctattcttaatcccctccacaaagtagaaagtattgattgccaagtcaaagtttaggtgaggaagctatttacaaataagtttccctgcaatgcttaatcccctcctagtgttcacagattgcatcacatcagatttgaaagtaaaatggctgttattttctatttttaatagttatcatcagtgttgtgctctgccgagcattaaaacaacatacacaaagatatgagatgttatgataatccccaaactttattataaataactcaaaatcagagccaaactggctggtattctatgctttatcctttccctagcatcagtcaagggtcctggaacaaagatgagtaactattaaaatgtaagaagcctatcatattgaaatacctcatatgcttggtattttctactatcactttaaaatcactaaaattctgaaacag

SEQ ID NO: 359821 - DNA, 3454 bp, Homo sapiens
aaatttagagtcttgctatgttgctcagactgatctcgaactcctgagctcaagtgatcctccttctcagcttcctgagtagctgggactataataggctttgtgccaccatgcccagcttacttttttctatttctgctttattttatcctcatgtctggaccatagatagatcattgttatccaccagcaagaatgtgtcatggcataaaacagtcaagaaatctaagtgaaaccttgactgggctgtctttgggcttgtgcggtaatgcctcacatgcagtgaactctcaacaaatggcttttaaattgaattggaatcttccatttctatattagcacattttgtacctttaggaaaaacttgattttaatgtgttgttttcgtatgtgtttgcttgtttcttgagtagctgatggatttacaactgagtgacagtaactttcgtcgacacatcctgttgcagtatctcattttattccaatatctcaaggggcaggtcaaattcaaaagttcaaactatgttttaactgatgagcaatcactttggattgaagatactacaaaatcagtttatcaactactatctgaaaacccccccgatggagaaagattttcaaagatggtagagcatatattaaacactgaagaaaactggaactcgtggaaaaatgaaggttgcccaagttttgtgaaagaaagaacatcagataccaaacctacgagaataattcggaagagaacagcacccgaggacttcctagggaaaggacccaccaaaaaaattctgatgggaaatgaggagttaacaaggctttggaatctttgccctgataatatggaagcctgtaaatcagagacaagggaacacatgcccactttggaggaattctttgaagaagccattgaacaggcagaccctgaaaatatggtggaaaatgaatataaggctgtgaacaattcaaattatggttggagagccctgagactattagcacggagaagccctcacttcttccagccaaccaaccagcagtttaaaagtttaccagaatatcttgaaaatatggtaataaagctagccaaggaattaccgcctccttctgaagaaataaaaacaggtgaggatgaagatgaggaagataatgatgctctactgaaggaaaatgaaagtcctgatgttcggcgagacaaacctgtaacaggagaacaaatagaggtatttgccaacaagctgggtgaacaatggaagattctggctccctacttggaaatgaaagactcagaaattaggcagattgagtgtgacagtgaagacatgaagatgagagctaagcagctcctggttgcctggcaagatcaagagggagttcatgcaacacctgagaatctgattaatgcactgaataagtctggattaagtgaccttgcagaaagtctaactaatgacaatgagacaaatagttagcttcttttttttttctttttattaaaactgtgatagattttgttaccaagcagcatttgataagaggtccactggttttggtaaacaataaacatttttataacaattgttgtacagtcggctggtgctctgagaacaatagaacacatattggctcaaaccagagtttggggaggttgggttgagataatgacctaaacgaagtgacctcaagatcacaaaatatatttttttgttaagtagatgtatttataatgaagttaaataagcactatttagggatatgtcgtttcttataccaaattagtttcctgtgtgttgtttgttagtagttttacaaaatttatcctgaaatcccagaataacactttctgaaaccatatgactgctctgttctcacttattcgtgctttcaagcagaggatcaacaaatgatggtttgttctgcctgccacgagtcttgatcattaaaattgtactggcacccagctgtgctcactcataactaactaactaactgtctatggctccagctacactataacaacagcaaagctaaggagctgcagcactttatagcctgcaaagcctgaaataatttactatcaatcatcaatcaatcatcatctatctatctatctatctatctaatctatctatcttgtccattacagaaaatgtttgtttgccaactttaaaagaaatgaagtctaaaacctcacttttccttctagccttacaaaaattgcctgacctctcaagacttttaatcacttcagggattcttgtgacattcaactgagatatatgtgaacacaccctatacacagcaaagcactaagtagtagtagcagaagacagtaccaccgacttttcttgttcccacataagcatttccctttagggctctaagatgaggtcatcatcgtttttaatcctgaagaagggctactgagtgagtgcagattattcggtaaacactcttaggcctaacctagctagtcagtcaagcagtaatctagcacaactctaatgttgagatgatggcctcggtgtgagtggcacagcatataaggcacattcaggaatcaagacttttttttttttggcctactcctctcccttctcaaagaccttacaggcaaggctgaattctaaaatagccttattagttaaaaacaacactggtataactaactcccatttctacttgaaaaaattctttggaataatgcttttttagatcaaataaaaaaatcaagctttttataatgatgataaggaattaattacaatttttaaaattctaatatagtccatacaaggcttatatactttgctctaaacctagctcacctggtctagtagctacaacatttagtagctacagtcagaaaatctaaattctaattgttaaattcatgtcctcaataaaattgttctgaccaaatgagacaatgaataaaaaagactttgcaaagttacaagcatcatacaaatatacatgaatcattataattttcatggtctcatcctgcccattctattcttaatcccctccacaaagtagaaagtattgattgccaagtcaaagtttaggtgaggaagctatttacaaataagtttccctgcaatgcttaatcccctcctagtgttcacagattgcatcacatcagatttgaaagtaaaatggctgttattttctatttttaatagttatcatcagtgttgtgctctgccgagcattaaaacaacatacacaaagatatgagatgttatgataatccccaaactttattataaataactcaaaatcagagccaaactggctggtattctatgctttatcctttccctagcatcagtcaagggtcctggaacaaagatgagtaactattaaaatgtaagaagcctatcatattgaaatacctcatatgcttggtattttctactatcactttaaaatcactaaaattctgaaacag

SEQ ID NO: 359822 - DNA, 3248 bp, Homo sapiens
ccaacagctccagttacaacagctccagttacaacagctccagttacaacagctccagttacaacagctccagttacaacagcttctcaaggggcaggtcaaattcaaaagttcaaactatgttttaactgatgagcaatcactttggattgaagatactacaaaatcagtttatcaagtaagttcaacacgcaacaaacccatgattgaaaaaatggaaatttaggattttctttgtttcagccccaaataggaaaataaggataaagttaagctcaggtacaagaccacaaacactccttggttctctgcctacaaaccactcctatgatgcagaaagttgttgaaagcttagtatattctttctaatcacagctactatctgaaaacccccccgatggagaaagattttcaaagatggtagagcatatattaaacactgaagaaaactggaactcgtggaaaaatgaaggttgcccaagttttgtgaaagaaagaacatcagataccaaacctacgagaataattcggaagagaacagcacccgaggacttcctagggaaaggacccaccaaaaaaattctgatgggaaatgaggagttaacaaggctttggaatctttgccctgataatatggaagcctgtaaatcagagacaagggaacacatgcccactttggaggaattctttgaagaagccattgaacaggcagaccctgaaaatatggtggaaaatgaatataaggctgtgaacaattcaaattatggttggagagccctgagactattagcacggagaagccctcacttcttccagccaaccaaccagcagtttaaaagtttaccagaatatcttgaaaatatggtaataaagctagccaaggaattaccgcctccttctgaagaaataaaaacaggtgaggatgaagatgaggaagataatgatgctctactgaaggaaaatgaaagtcctgatgttcggcgagacaaacctgtaacaggagaacaaatagaggtatttgccaacaagctgggtgaacaatggaagattctggctccctacttggaaatgaaagactcagaaattaggcagattgagtgtgacagtgaagacatgaagatgagagctaagcagctcctggttgcctggcaagatcaagagggagttcatgcaacacctgagaatctgattaatgcactgaataagtctggattaagtgaccttgcagaaagtctaactaatgacaatgagacaaatagttagcttcttttttttttctttttattaaaactgtgatagattttgttaccaagcagcatttgataagaggtccactggttttggtaaacaataaacatttttataacaattgttgtacagtcggctggtgctctgagaacaatagaacacatattggctcaaaccagagtttggggaggttgggttgagataatgacctaaacgaagtgacctcaagatcacaaaatatatttttttgttaagtagatgtatttataatgaagttaaataagcactatttagggatatgtcgtttcttataccaaattagtttcctgtgtgttgtttgttagtagttttacaaaatttatcctgaaatcccagaataacactttctgaaaccatatgactgctctgttctcacttattcgtgctttcaagcagaggatcaacaaatgatggtttgttctgcctgccacgagtcttgatcattaaaattgtactggcacccagctgtgctcactcataactaactaactaactgtctatggctccagctacactataacaacagcaaagctaaggagctgcagcactttatagcctgcaaagcctgaaataatttactatcaatcatcaatcaatcatcatctatctatctatctatctatctaatctatctatcttgtccattacagaaaatgtttgtttgccaactttaaaagaaatgaagtctaaaacctcacttttccttctagccttacaaaaattgcctgacctctcaagacttttaatcacttcagggattcttgtgacattcaactgagatatatgtgaacacaccctatacacagcaaagcactaagtagtagtagcagaagacagtaccaccgacttttcttgttcccacataagcatttccctttagggctctaagatgaggtcatcatcgtttttaatcctgaagaagggctactgagtgagtgcagattattcggtaaacactcttaggcctaacctagctagtcagtcaagcagtaatctagcacaactctaatgttgagatgatggcctcggtgtgagtggcacagcatataaggcacattcaggaatcaagacttttttttttttggcctactcctctcccttctcaaagaccttacaggcaaggctgaattctaaaatagccttattagttaaaaacaacactggtataactaactcccatttctacttgaaaaaattctttggaataatgcttttttagatcaaataaaaaaatcaagctttttataatgatgataaggaattaattacaatttttaaaattctaatatagtccatacaaggcttatatactttgctctaaacctagctcacctggtctagtagctacaacatttagtagctacagtcagaaaatctaaattctaattgttaaattcatgtcctcaataaaattgttctgaccaaatgagacaatgaataaaaaagactttgcaaagttacaagcatcatacaaatatacatgaatcattataattttcatggtctcatcctgcccattctattcttaatcccctccacaaagtagaaagtattgattgccaagtcaaagtttaggtgaggaagctatttacaaataagtttccctgcaatgcttaatcccctcctagtgttcacagattgcatcacatcagatttgaaagtaaaatggctgttattttctatttttaatagttatcatcagtgttgtgctctgccgagcattaaaacaacatacacaaagatatgagatgttatgataatccccaaactttattataaataactcaaaatcagagccaaactggctggtattctatgctttatcctttccctagcatcagtcaagggtcctggaacaaagatgagtaactattaaaatgtaagaagcctatcatattgaaatacctcatatgcttggtattttctactatcactttaaaatcactaaaattctgaaacag

SEQ ID NO: 359823 - DNA, 2686 bp, Homo sapiens
  misc_feature (31)..(31): n is a, c, g, or t
cggcgcactagaggatcccctcggtctaccntgaggagttaacaaggctttggaatctttgccctgataatatggaagcctgtaaatcagagacaagggaacacatgcccactttggaggaattctttgaagaagccattgaacaggcagaccctgaaaatatggtggaaaatgaatataaggctgtgaacaattcaaattatggttggagagccctgagactattagcacggagaagccctcacttcttccagccaaccaaccagcagtttaaaagtttaccagaatatcttgaaaatatggtaataaagctagccaaggaattaccgcctccttctgaagaaataaaaacaggtgaggatgaagatgaggaagataatgatgctctactgaaggaaaatgaaagtcctgatgttcggcgagacaaacctgtaacaggagaacaaatagaggtatttgccaacaagctgggtgaacaatggaagattctggctccctacttggaaatgaaagactcagaaattaggcagattgagtgtgacagtgaagacatgaagatgagagctaagcagctcctggttgcctggcaagatcaagagggagttcatgcaacacctgagaatctgattaatgcactgaataagtctggattaagtgaccttgcagaaagtctaactaatgacaatgagacaaatagttagcttcttttttttttctttttattaaaactgtgatagattttgttaccaagcagcatttgataagaggtccactggttttggtaaacaataaacatttttataacaattgttgtacagtcggctggtgctctgagaacaatagaacacatattggctcaaaccagagtttggggaggttgggttgagataatgacctaaacgaagtgacctcaagatcacaaaatatatttttttgttaagtagatgtatttataatgaagttaaataagcactatttagggatatgtcgtttcttataccaaattagtttcctgtgtgttgtttgttagtagttttacaaaatttatcctgaaatcccagaataacactttctgaaaccatatgactgctctgttctcacttattcgtgctttcaagcagaggatcaacaaatgatggtttgttctgcctgccacgagtcttgatcattaaaattgtactggcacccagctgtgctcactcataactaactaactaactgtctatggctccagctacactataacaacagcaaagctaaggagctgcagcactttatagcctgcaaagcctgaaataatttactatcaatcatcaatcaatcatcatctatctatctatctatctatctaatctatctatcttgtccattacagaaaatgtttgtttgccaactttaaaagaaatgaagtctaaaacctcacttttccttctagccttacaaaaattgcctgacctctcaagacttttaatcacttcagggattcttgtgacattcaactgagatatatgtgaacacaccctatacacagcaaagcactaagtagtagtagcagaagacagtaccaccgacttttcttgttcccacataagcatttccctttagggctctaagatgaggtcatcatcgtttttaatcctgaagaagggctactgagtgagtgcagattattcggtaaacactcttaggcctaacctagctagtcagtcaagcagtaatctagcacaactctaatgttgagatgatggcctcggtgtgagtggcacagcatataaggcacattcaggaatcaagacttttttttttttggcctactcctctcccttctcaaagaccttacaggcaaggctgaattctaaaatagccttattagttaaaaacaacactggtataactaactcccatttctacttgaaaaaattctttggaataatgcttttttagatcaaataaaaaaatcaagctttttataatgatgataaggaattaattacaatttttaaaattctaatatagtccatacaaggcttatatactttgctctaaacctagctcacctggtctagtagctacaacatttagtagctacagtcagaaaatctaaattctaattgttaaattcatgtcctcaataaaattgttctgaccaaatgagacaatgaataaaaaagactttgcaaagttacaagcatcatacaaatatacatgaatcattataattttcatggtctcatcctgcccattctattcttaatcccctccacaaagtagaaagtattgattgccaagtcaaagtttaggtgaggaagctatttacaaataagtttccctgcaatgcttaatcccctcctagtgttcacagattgcatcacatcagatttgaaagtaaaatggctgttattttctatttttaatagttatcatcagtgttgtgctctgccgagcattaaaacaacatacacaaagatatgagatgttatgataatccccaaactttattataaataactcaaaatcagagccaaactggctggtattctatgctttatcctttccctagcatcagtcaagggtcctggaacaaagatgagtaactattaaaatgtaagaagcctatcatattgaaatacctcatatgcttggtattttctactatcactttaaaatcactaaaattctgaaacag

SEQ ID NO: 359824 - DNA, 2552 bp, Homo sapiens
  misc_feature (16)..(16): n is a, c, g, or t
  misc_feature (19)..(19): n is a, c, g, or t
  misc_feature (26)..(26): n is a, c, g, or t
  misc_feature (36)..(36): n is a, c, g, or t
  misc_feature (43)..(43): n is a, c, g, or t
  misc_feature (49)..(50): n is a, c, g, or t
  misc_feature (54)..(55): n is a, c, g, or t
  misc_feature (58)..(60): n is a, c, g, or t
  misc_feature (77)..(77): n is a, c, g, or t
  misc_feature (80)..(80): n is a, c, g, or t
cgactctagaggatcncgnatatgcngtctcatgtnataagtnagactnnctgnnagnnncttaatccagacttatncantgcattaatcagattctcaggtgtgcatgaactccctcttgatcttgccaggcaaccaggagctgcttagctctcatcttcatgtcttcactgtcacactcaatctgccgtaatttctgagtctgtcatttccaagataggtgaggatgaagatgaggaagataatgatgctctactgaaggaaaatgaaagtcctgatgttcggcgagacaaacctgtaacaggagaacaaatagaggtatttgccaacaagctgggtgaacaatggaagattctggctccctacttggaaatgaaagactcagaaattaggcagattgagtgtgacagtgaagacatgaagatgagagctaagcagctcctggttgcctggcaagatcaagagggagttcatgcaacacctgagaatctgattaatgcactgaataagtctggattaagtgaccttgcagaaagtctaactaatgacaatgagacaaatagttagcttcttttttttttctttttattaaaactgtgatagattttgttaccaagcagcatttgataagaggtccactggttttggtaaacaataaacatttttataacaattgttgtacagtcggctggtgctctgagaacaatagaacacatattggctcaaaccagagtttggggaggttgggttgagataatgacctaaacgaagtgacctcaagatcacaaaatatatttttttgttaagtagatgtatttataatgaagttaaataagcactatttagggatatgtcgtttcttataccaaattagtttcctgtgtgttgtttgttagtagttttacaaaatttatcctgaaatcccagaataacactttctgaaaccatatgactgctctgttctcacttattcgtgctttcaagcagaggatcaacaaatgatggtttgttctgcctgccacgagtcttgatcattaaaattgtactggcacccagctgtgctcactcataactaactaactaactgtctatggctccagctacactataacaacagcaaagctaaggagctgcagcactttatagcctgcaaagcctgaaataatttactatcaatcatcaatcaatcatcatctatctatctatctatctatctaatctatctatcttgtccattacagaaaatgtttgtttgccaactttaaaagaaatgaagtctaaaacctcacttttccttctagccttacaaaaattgcctgacctctcaagacttttaatcacttcagggattcttgtgacattcaactgagatatatgtgaacacaccctatacacagcaaagcactaagtagtagtagcagaagacagtaccaccgacttttcttgttcccacataagcatttccctttagggctctaagatgaggtcatcatcgtttttaatcctgaagaagggctactgagtgagtgcagattattcggtaaacactcttaggcctaacctagctagtcagtcaagcagtaatctagcacaactctaatgttgagatgatggcctcggtgtgagtggcacagcatataaggcacattcaggaatcaagacttttttttttttggcctactcctctcccttctcaaagaccttacaggcaaggctgaattctaaaatagccttattagttaaaaacaacactggtataactaactcccatttctacttgaaaaaattctttggaataatgcttttttagatcaaataaaaaaatcaagctttttataatgatgataaggaattaattacaatttttaaaattctaatatagtccatacaaggcttatatactttgctctaaacctagctcacctggtctagtagctacaacatttagtagctacagtcagaaaatctaaattctaattgttaaattcatgtcctcaataaaattgttctgaccaaatgagacaatgaataaaaaagactttgcaaagttacaagcatcatacaaatatacatgaatcattataattttcatggtctcatcctgcccattctattcttaatcccctccacaaagtagaaagtattgattgccaagtcaaagtttaggtgaggaagctatttacaaataagtttccctgcaatgcttaatcccctcctagtgttcacagattgcatcacatcagatttgaaagtaaaatggctgttattttctatttttaatagttatcatcagtgttgtgctctgccgagcattaaaacaacatacacaaagatatgagatgttatgataatccccaaactttattataaataactcaaaatcagagccaaactggctggtattctatgctttatcctttccctagcatcagtcaagggtcctggaacaaagatgagtaactattaaaatgtaagaagcctatcatattgaaatacctcatatgcttggtattttctactatcactttaaaatcactaaaattctgaaacag

SEQ ID NO: 359825 - DNA, 2070 bp, Homo sapiens
agcggcagtggcgggcacgcgcagccgagaagatgtctccgacgccgccgctcttcagtttgcccgaagcgcggacgcggtttacgaagtctaccagagaggccttgaacaacaaaaacatcaagccattgttaagtaccttcagccaggtacctggcagtgaaaatgaaaaaaaatgtacccttgaccaagctttcagaggtattctagaagaagaaattataaatcattcatcatgtgaaaacgttttagctattatttctcttgctattgggggagtaactgaaggtatttgtaccgcatctacaccttttgtattgttgggagatgttttggattgtcttcctttggatcagtgtgacacaatattcacttttgtggaaaaaaatgttgctacttggaaatcaaatacattctattctgctgggaaaaattacttactacgtatgtgcaatgatctcctaagaagattgtctaaatcccagaatacagtcttctgtggacggattcagctctttttggccaggcttttccctctgtctgagaaatcaggtcttaacttgcagagtcagtttaatctggaaaatgtcactgttttcaatacaaatgagcaggaaagcaccctgggtcagaagcacactgaagatagagaagaaggaatggatgtagaagaaggcgaaatgggagatgaggaagctccaacaacgtgctctattccaattgattacaacctgtatcgaaaattctggtcacttcaggattacttcaggaaccctgtgcaatgctatgagaagatttcatggaaaacttttctcaagtattctgaagaagttttagctgtttttaagagttataaattagatgatactcaggcctcaagaaaaaagatggaagaattgaaaacaggaggagaacatgtatattttgcaaaatttttaacaagtgaaaagctgatggatttacaactgagtgacagtaactttcgtcgacacatcctgttgcagtatctcattttattccaatatctcaaggggcaggtcaaattcaaaagttcaaactatgttttaactgatgagcaatcactttggattgaagatactacaaaatcagtttatcaactactatctgaaaacccccccgatggagaaagattttcaaagatggtagagcatatattaaacactgaagaaaactggaactcgtggaaaaatgaaggttgcccaagttttgtgaaagaaagtgtatgttttgttcaccacagaacatcagataccaaacctacgagaataattcggaagagaacagcacccgaggacttcctagggaaaggacccaccaaaaaaattctgatgggaaatgaggagttaacaaggctttggaatctttgccctgataatatggaagcctgtaaatcagagacaagggaacacatgcccactttggaggaattctttgaagaagccattgaacaggcagaccctgaaaatatggtggaaaatgaatataaggctgtgaacaattcaaattatggttggagagccctgagactattagcacggagaagccctcacttcttccagccaaccaaccagcagtttaaaagtttaccagaatatcttgaaaatatggtaataaagctagccaaggaattaccggtaagtaccatagatcaacttttcataccctttagttgacatcttctttaaaattgctgtcactatgtgagcaaaaaactgacttaatcatgtgaaaaaccagtgatccacaagctcccatgttttagaatgagggaaaaacacattggaatatacatttacaggaaatacatgagttgataaagaagtaactgataattttctgtacagcatgtaatttaaagttcaacagggctgtgggtgcggtggctcacgactgtaatcccagcactttgggaggccgaggcgggtggatcatgaggtcaagagattgagaccatcctggccaatatggtgaaaccccgtctctactaaaatataaaaaattagccaggtgtggtggcacgtgcctgtagtcccagctactcaagaggct

SEQ ID NO: 359826 - DNA, 317 bp, Homo sapiens
aagtaaacatggtcttgttcacgtcattcctagatccctaaatgaggaggggaaaggaagggtgggggaagaggtttgaatcttaaaaagaggcaattatgtaacaattatgtaacatttaaaatatttaataatttttttttttttttttttgtgacagagtgaaactccatctcaaaaggaaaaaaaagaaagtttcatgaggccataactttatctattttgttccttggtgtattactagcacctggtatttagtagtttctgaaatatttattgaatgaatgaataagtgtgcaagatcagaattgccattg

SEQ ID NO: 359827 - DNA, 264 bp, Homo sapiens
ccctgtgctgtgttcagaaaatgccccaaacacctccgggcagagagccagggtgaagctggaactccctcatgtgtgtccttctctagggtcacagccctgccatggcacctatgcttaaaaacagttgcttcatataatttgtctagttttctagttgtttatgggggaaaggtaagtctgctatctgtcaccgtcttatggccggacccagcagtcccagcagagctgtgggaatttaaagttggtttcactcctcccacc

SEQ ID NO: 359828 - DNA, 404 bp, Homo sapiens
agctacaggatacataaaagtatgagaggagattatagagttgcaaaaggggtcatgacttttcttatccagaaagggtaggtgaaaatcactagggaagtctaaatttataaaactagaggcaagtttagtattttcattttagaagctgggaccagctatagataattgctccccagttctctgcttctccagtattcttgccctgccataatcaccatcatgattagcagtctgtcatagtatcctcaatagaatctttttgagatctatccccagcccatatttttacctggaactgacatcatgcaaattaagtatgacaacaacgttttaatgctttacttcccctgtcctgcaataaattataatgctaaattgtacacataacttttaaagtctgt

SEQ ID NO: 359829 - DNA, 5433 bp, Homo sapiens
cctccgggcatacgcaggctggtccccaaggcccgcggccgccgccatgtcggtgctgggcgagtacgagcgacactgcgattccatcaactcggactttgggagcgagtccgggggttgcggggactcgagtccggggcctagcgccagtcaggggccgcgagccggcggcggcgcggcggagcaggaggaactgcactacatccccatccgcgtcctgggccgcggcgccttcggggaagccacgctgtaccgccgcaccgaggatgactcactggttgtgtggaaggaagtcgatttgacccggctgtctgagaaggaacgtcgtgatgccttgaatgagatagttattctggcactgctgcagcacgacaacattattgcctactacaatcacttcatggacaataccacgctgctgattgagctggaatattgtaatggagggaacctgtatgacaaaatccttcgtcagaaggacaagttgtttgaggaagagatggtggtgtggtacctatttcagattgtttcagcagtgagctgcatccataaagctggaatccttcatagagatataaagacattaaatatttttctgaccaaggcaaacctgataaaacttggagattatggcctagcaaagaaacttaattctgagtattccatggctgagacgcttgtgggaaccccatattacatgtctccagagctctgtcaaggagtaaagtacaatttcaagtctgatatctgggcagttggctgcgtcatttttgaactgcttaccttaaagaggacgtttgatgctacaaacccacttaacctgtgtgtgaagatcgtgcaaggaattcgggccatggaagttgactctagccagtactctttggaattgatccaaatggttcattcgtgccttgaccaggatcctgagcagagacctactgcagatgaacttctagatcgccctcttctcaggaaacgcaggagagagatggaggaaaaagtcactctgcttaatgcacctacaaagagaccaaggtcaagcactgtgactgaagcacccattgctgtagtaacatcacgaaccagtgaagtctatgtttggggtggtggaaaatccaccccccagaaactggatgttatcaagagtggctgtagtgcccggcaggtctgtgcagggaatacccactttgctgtggtcacagtggagaaggaactgtacacttgggtgaacatgcaaggaggcactaaactccatggtcagctgggccatggagacaaagcctcctatcgacagccaaagcatgtggaaaagttgcaaggcaaagctatccgtcaggtgtcatgtggtgatgatttcactgtctgtgtgactgatgagggtcagctctatgccttcggatcagattattatggctgcatgggggtggacaaagttgctggccctgaagtgctagaacccatgcagctgaacttcttcctcagcaatccagtggagcaggtctcctgtggagataatcatgtggtggttctgacacgaaacaaggaagtctattcttggggctgtggcgaatatggacgactgggtttggattcagaagaggattattatacaccacaaaaggtggatgttcccaaggccttgattattgttgcagttcaatgtggctgtgatgggacatttctgttgacccagtcaggcaaagtgctggcctgtggactcaatgaattcaataagctgggtctgaatcagtgcatgtcgggaattatcaaccatgaagcataccatgaagttccctacacaacgtcctttaccttggccaaacagttgtccttttataagatccgtaccattgccccaggcaagactcacacagctgctattgatgagcgaggccggctgctgacctttggctgcaacaagtgtgggcagctgggcgttgggaactacaagaagcgtctgggaatcaacctgttggggggaccccttggtgggaagcaagtgatcagggtctcctgcggtgatgagtttaccattgctgccactgatgataatcacatttttgcctggggcaatggtggtaatggccgcctggcaatgacccccacagagagaccacatggctctgatatctgtacctcatggcctcggcctatttttggatctctgcatcatgtcccggacctgtcttgccgtggatggcataccattctcatcgttgagaaagtattgaattctaagaccatccgttccaatagcagtggcttatccattggaactgtgtttcagagctctagcccgggaggaggcggcgggggcggcggtggtgaagaagaggacagtcagcaggaatctgaaactcctgacccaagtggaggcttccgaggaacaatggaagcagaccgaggaatggaaggtttaatcagtcccacagaggccatggggaacagtaatggggccagcagctcctgtcctggctggcttcgaaaggagctggaaaatgcagaatttatccccatgcctgacagcccatctcctctcagtgcagcgttttcagaatctgagaaagataccctgccctatgaagagctgcaaggactcaaagtggcctctgaagctcctttggaacacaaaccccaagtagaagcctcgtcacctcggctgaatcctgcagtaacctgtgctgggaagggaacaccactgactcctcctgcgtgtgcgtgcagctctctgcaggtggaggttgagagattgcagggtctggtgttaaagtgtctggctgaacaacagaagctacagcaagaaaacctccagatttttacccaactgcagaagttgaacaagaaattagaaggagggcagcaggtggggatgcattccaaaggaactcagacagcaaaggaagagatggaaatggatccaaagcctgacttagattcagattcctggtgcctcctgggaacagactcctgtagacccagcctctagtctcctgagcctatagagcccccaggagactgggacccaaagaacttcacagcacacttaccgaatgcagagagcagctttcctggctttgttcacttgcagaaaaggagcgcaaggcagaggctctgaagcactttccttgtacatttggagagtggcattgccttttagataggatctaggagtgattttattgttttggagaatggaagggcccccatggccctggctttgtcatcagtgactgccatagcaacagcagctctgtacctcatctgttgatcccacctttgaagaggagacacagtgctcaccttaattgcgctggtagcagcttatatcccatgtatcattttcaccattgattggaagctgccttgggaattcagtaccaggcattacccctctgggtgggagagggagaagtgtaaagttggagtgggctggaatcaggtgtggcccgcccagtgtcctctgcagagtggtgaagtagtctggccctcttgggagccctgagtccaggaaaatatgtctgatggagtcaatctagggcttgtttcgaaaaagttcagttactctgtgcagctaaatgctttaggaggaaaggtaggcttaggttgcttttcctctgagggttgattgaaatttcttcagtgaggaatagagaaagggcaggaccctcctcatcacacagctggtgtttcaggctgtgaccaatgcagggtgggatttcctaactgtggatgaggggatgaggtgtctctgagggatgaggtgtctcagagaattgagtccatggggcagtcagaatagccttaagagaaaatcatgaaggagaagaggtcctcctttagctgcctctacttggtatcttagagagggcttagagggctctcagtcttctgcccatgaaaagacttctttgagcctctgccttcatggctcttagggttctgatcttgatatcagcagccccaaccactttctttctgaatgtctagtcagtatttttccccttttggtgttttatgaagccatgtggtaacgaatgaatctgtatcatttttcctacctgagtggcccaaagccagcaccaaaccctgggagtccctgaagcctaacagaacaggtagaacttgcaaaaggaatttggctgagagctcacttctaatcctgtactcactgtgtctttgtagatagaaacaagctagctttaccaaagagaaatagtgtcatagaagaacaaaacttcatatagaaagttctaggcaagtatttgatggtttccttaaggatgtgagctttgtatttccacctagccttgtaaaatgttcctgtggtattttgtgtcacacatcctacctttgatgagtctcacatcccaccttcctataaacagctaaattaattttgtttcatcttccccagaccaaaatgtttgataatcttatcaacattgtgggaggtcttgtgcaatggaaattttgccatttctccaaaactggtggcataaaggctgatgcttggggagaaccccattgctcgggacaggcaactctgttcaatgggatcttctttggtttgatgttcccattgttttctcagttctgggaagcctagtacattagtactaatgtaatcactgaaaccttttcttgaaataagggaagcagccaaactttgattaaagttgcaagttctggggacttgcgggggttgtcataaactgtaacagtgggttttggttcagcatgtaaatgcaactttgattttcttgaggaccgattgacctgtcatgtccctgtatcctcatgctcatcatctcagcaggcctgagaggctgggtcagtttgggtgttcatcatgaggattgcttctgccatggagctgatggacatgggcaggttgctgagaaggtggggtgaaagtgagtgccgggggtgggtgagtgccctggtcttgttcataggggagcctttccctagcagtggaacgctgtggtcattttctctagcatattcccttgggaagtctagatttgctattaatctggctgagaatctaagttctgtgccttagagacagtttgcactttcccatattgtgcctgggacagccatatgattttttttcccaccaaacaagtatgcaaacagaaaccagttcaaagggggatggagtaaaagatgaggcagtagaaatgcctttgaatggttttctgtagctaattctctttaaattttgtcctgctttttttctttatgcagtgctaggtgttttaagttttctagtagtattgcttttgagttacagtataacctgagttactcctctgctctaacattgttgcagaagaactagtttattgttagccaggttgcttgaaaggttgagagtggagtggtttggcatttctgttttaaataaacatttaagctcttaatcag

SEQ ID NO: 359830 - DNA, 5094 bp, Homo sapiens
acttttctttgcctactcaacctgcaaggaagagatgtcaagtcatgttgaatcataacttctggttgcagttttctttgttttgtttgtttgtgtgtgtgtgtatttacttaaatggagctttttgtttctaatccaaatatttattttttctctgcagatggtggtgtggtacctatttcagattgtttcagcagtgagctgcatccataaagctggaatccttcatagagatataaagacattaaatatttttctgaccaaggcaaacctgataaaacttggagattatggcctagcaaagaaacttaattctgagtattccatggctgagacgcttgtgggaaccccatattacatgtctccagagctctgtcaaggagtaaagtacaatttcaagtctgatatctgggcagttggctgcgtcatttttgaactgcttaccttaaagaggacgtttgatgctacaaacccacttaacctgtgtgtgaagatcgtgcaaggaattcgggccatggaagttgactctagccagtactctttggaattgatccaaatggttcattcgtgccttgaccaggatcctgagcagagacctactgcagatgaacttctagatcgccctcttctcaggaaacgcaggagagagatggaggaaaaagtcactctgcttaatgcacctacaaagagaccaaggtcaagcactgtgactgaagcacccattgctgtagtaacatcacgaaccagtgaagtctatgtttggggtggtggaaaatccaccccccagaaactggatgttatcaagagtggctgtagtgcccggcaggtctgtgcagggaatacccactttgctgtggtcacagtggagaaggaactgtacacttgggtgaacatgcaaggaggcactaaactccatggtcagctgggccatggagacaaagcctcctatcgacagccaaagcatgtggaaaagttgcaaggcaaagctatccgtcaggtgtcatgtggtgatgatttcactgtctgtgtgactgatgagggtcagctctatgccttcggatcagattattatggctgcatgggggtggacaaagttgctggccctgaagtgctagaacccatgcagctgaacttcttcctcagcaatccagtggagcaggtctcctgtggagataatcatgtggtggttctgacacgaaacaaggaagtctattcttggggctgtggcgaatatggacgactgggtttggattcagaagaggattattatacaccacaaaaggtggatgttcccaaggccttgattattgttgcagttcaatgtggctgtgatgggacatttctgttgacccagtcaggcaaagtgctggcctgtggactcaatgaattcaataagctgggtctgaatcagtgcatgtcgggaattatcaaccatgaagcataccatgaagttccctacacaacgtcctttaccttggccaaacagttgtccttttataagatccgtaccattgccccaggcaagactcacacagctgctattgatgagcgaggccggctgctgacctttggctgcaacaagtgtgggcagctgggcgttgggaactacaagaagcgtctgggaatcaacctgttggggggaccccttggtgggaagcaagtgatcagggtctcctgcggtgatgagtttaccattgctgccactgatgataatcacatttttgcctggggcaatggtggtaatggccgcctggcaatgacccccacagagagaccacatggctctgatatctgtacctcatggcctcggcctatttttggatctctgcatcatgtcccggacctgtcttgccgtggatggcataccattctcatcgttgagaaagtattgaattctaagaccatccgttccaatagcagtggcttatccattggaactgtgtttcagagctctagcccgggaggaggcggcgggggcggcggtggtgaagaagaggacagtcagcaggaatctgaaactcctgacccaagtggaggcttccgaggaacaatggaagcagaccgaggaatggaaggtttaatcagtcccacagaggccatggggaacagtaatggggccagcagctcctgtcctggctggcttcgaaaggagctggaaaatgcagaatttatccccatgcctgacagcccatctcctctcagtgcagcgttttcagaatctgagaaagataccctgccctatgaagagctgcaaggactcaaagtggcctctgaagctcctttggaacacaaaccccaagtagaagcctcgtcacctcggctgaatcctgcagtaacctgtgctgggaagggaacaccactgactcctcctgcgtgtgcgtgcagctctctgcaggtggaggttgagagattgcagggtctggtgttaaagtgtctggctgaacaacagaagctacagcaagaaaacctccagatttttacccaactgcagaagttgaacaagaaattagaaggagggcagcaggtggggatgcattccaaaggaactcagacagcaaaggaagagatggaaatggatccaaagcctgacttagattcagattcctggtgcctcctgggaacagactcctgtagacccagcctctagtctcctgagcctatagagcccccaggagactgggacccaaagaacttcacagcacacttaccgaatgcagagagcagctttcctggctttgttcacttgcagaaaaggagcgcaaggcagaggctctgaagcactttccttgtacatttggagagtggcattgccttttagataggatctaggagtgattttattgttttggagaatggaagggcccccatggccctggctttgtcatcagtgactgccatagcaacagcagctctgtacctcatctgttgatcccacctttgaagaggagacacagtgctcaccttaattgcgctggtagcagcttatatcccatgtatcattttcaccattgattggaagctgccttgggaattcagtaccaggcattacccctctgggtgggagagggagaagtgtaaagttggagtgggctggaatcaggtgtggcccgcccagtgtcctctgcagagtggtgaagtagtctggccctcttgggagccctgagtccaggaaaatatgtctgatggagtcaatctagggcttgtttcgaaaaagttcagttactctgtgcagctaaatgctttaggaggaaaggtaggcttaggttgcttttcctctgagggttgattgaaatttcttcagtgaggaatagagaaagggcaggaccctcctcatcacacagctggtgtttcaggctgtgaccaatgcagggtgggatttcctaactgtggatgaggggatgaggtgtctctgagggatgaggtgtctcagagaattgagtccatggggcagtcagaatagccttaagagaaaatcatgaaggagaagaggtcctcctttagctgcctctacttggtatcttagagagggcttagagggctctcagtcttctgcccatgaaaagacttctttgagcctctgccttcatggctcttagggttctgatcttgatatcagcagccccaaccactttctttctgaatgtctagtcagtatttttccccttttggtgttttatgaagccatgtggtaacgaatgaatctgtatcatttttcctacctgagtggcccaaagccagcaccaaaccctgggagtccctgaagcctaacagaacaggtagaacttgcaaaaggaatttggctgagagctcacttctaatcctgtactcactgtgtctttgtagatagaaacaagctagctttaccaaagagaaatagtgtcatagaagaacaaaacttcatatagaaagttctaggcaagtatttgatggtttccttaaggatgtgagctttgtatttccacctagccttgtaaaatgttcctgtggtattttgtgtcacacatcctacctttgatgagtctcacatcccaccttcctataaacagctaaattaattttgtttcatcttccccagaccaaaatgtttgataatcttatcaacattgtgggaggtcttgtgcaatggaaattttgccatttctccaaaactggtggcataaaggctgatgcttggggagaaccccattgctcgggacaggcaactctgttcaatgggatcttctttggtttgatgttcccattgttttctcagttctgggaagcctagtacattagtactaatgtaatcactgaaaccttttcttgaaataagggaagcagccaaactttgattaaagttgcaagttctggggacttgcgggggttgtcataaactgtaacagtgggttttggttcagcatgtaaatgcaactttgattttcttgaggaccgattgacctgtcatgtccctgtatcctcatgctcatcatctcagcaggcctgagaggctgggtcagtttgggtgttcatcatgaggattgcttctgccatggagctgatggacatgggcaggttgctgagaaggtggggtgaaagtgagtgccgggggtgggtgagtgccctggtcttgttcataggggagcctttccctagcagtggaacgctgtggtcattttctctagcatattcccttgggaagtctagatttgctattaatctggctgagaatctaagttctgtgccttagagacagtttgcactttcccatattgtgcctgggacagccatatgattttttttcccaccaaacaagtatgcaaacagaaaccagttcaaagggggatggagtaaaagatgaggcagtagaaatgcctttgaatggttttctgtagctaattctctttaaattttgtcctgctttttttctttatgcagtgctaggtgttttaagttttctagtagtattgcttttgagttacagtataacctgagttactcctctgctctaacattgttgcagaagaactagtttattgttagccaggttgcttgaaaggttgagagtggagtggtttggcatttctgttttaaataaacatttaagctcttaatcag

SEQ ID NO: 359831 - DNA, 5387 bp, Homo sapiens
cctccgggcatacgcaggctggtccccaaggcccgcggccgccgccatgtcggtgctgggcgagtacgagcgacactgcgattccatcaactcggactttgggagcgagtccgggggttgcggggactcgagtccggggcctagcgccagtcaggggccgcgagccggcggcggcgcggcggagcaggaggaactgcactacatccccatccgcgtcctgggccgcggcgccttcggggaagccacgctgtaccgccgcaccgaggatgactcactggttgtgtggaaggaagtcgatttgacccggctgtctgagaaggaacgtcgtgatgccttgaatgagatagttattctggcactgctgcagcacgacaacattattgcctactacaatcacttcatggacaataccacgctgctgattgagctggaatattgtaatggagggaacctgtatgacaaaatccttcgtcagaaggacaagttgtttgaggaagagatggtggtgtggtacctatttcagattgtttcagcagtgagctgcatccataaagctggaatccttcatagagatataaagacattaaatatttttctgaccaaggcaaacctgataaaacttggagattatggcctagcaaagaaacttaattctgagtattccatggctgagacgcttgtgggaaccccatattacatgtctccagagctctgtcaaggagtaaagtacaatttcaagtctgatatctgggcagttggctgcgtcatttttgaactgcttaccttaaagaggacgtttgatgctacaaacccacttaacctgtgtgtgaagatcgtgcaaggaattcgggccatggaagttgactctagccagtactctttggaattgatccaaatggttcattcgtgccttgaccaggatcctgagcagagacctactgcagatgaacttctagatcgccctcttctcaggaaacgcaggagagagatggaggaaaaagtcactctgcttaatgcacctacaaagagaccaaggtcaagcactgtgactgaagcacccattgctgtagtaacatcacgaaccagtgaagtctatgtttggggtggtggaaaatccaccccccagaaactggatgttatcaagagtggctgtagtgcccggcaggtctgtgcagggaatacccactttgctgtggtcacagtggagaaggaactgtacacttgggtgaacatgcaaggaggcactaaactccatggtcagctgggccatggagacaaagcctcctatcgacagccaaagcatgtggaaaagttgcaaggcaaagctatccgtcaggtgtcatgtggtgatgatttcactgtctgtgtgactgatgagggtcagctctatgccttcggatcagattattatggctgcatgggggtggacaaagttgctggccctgaagtgctagaacccatgcagctgaacttcttcctcagcaatccagtggagcaggtctcctgtggagataatcatgtggtggttctgacacgaaacaaggaagtctattcttggggctgtggcgaatatggacgactgggtttggattcagaagaggattattatacaccacaaaaggtggatgttcccaaggccttgattattgttgcagttcaatgtggctgtgatgggacatttctgttgacccagtcaggcaaagtgctggcctgtggactcaatgaattcaataagctgggtctgaatcagtgcatgtcgggaattatcaaccatgaagcataccatgaagttccctacacaacgtcctttaccttggccaaacagttgtccttttataagatccgtaccattgccccaggcaagactcacacagctgctattgatgagcgaggccggctgctgacctttggctgcaacaagtgtgggcagctgggcgttgggaactacaagaagcgtctgggaatcaacctgttggggggaccccttggtgggaagcaagtgatcagggtctcctgcggtgatgagtttaccattgctgccactgatgataatcacatttttgcctggggcaatggtggtaatggccgcctggcaatgacccccacagagagaccacatggctctgatatctgtacctcatggcctcggcctatttttggatctctgcatcatgtcccggacctgtcttgccgtggatggcataccattctcatcgttgagaaagtattgaattctaagaccatccgttccaatagcagtggcttatccattggaactgtgtttcagagctctagcccgggaggaggcggcgggggcggcggtggtgaagaagaggacagtcagcaggaatctgaaactcctgacccaagtggaggcttccgaggaacaatggaagcagaccgaggaatggaaggtttaatcagtcccacagaggccatggggaacagtaatggggccagcagctcctgtcctggctggcttcgaaaggagctggaaaatgcagaatttatccccatgcctgacagcccatctcctctcagtgcagcgttttcagaatctgagaaagataccctgccctatgaagagctgcaaggactcaaagtggcctctgaagctcctttggaacacaaaccccaagtagaagcctcgtcacctcggctgaatcctgcagtaacctgtgctgggaagggaacaccactgactcctcctgcgtgtgcgtgcagctctctgcaggtggaggttgagagattgcagggtctggtgttaaagtgtctggctgaacaacagaagctacagcaagaaaacctccagatttttacccaactgcagaagttgaacaagaaattagaaggagggcagcaggtggggatgcattccaaaggaactcagacagcaaaggaagagatggaaatggatccaaagcctgacttagattcagattcctggtgcctcctgggaacagactcctgtagacccagcctctagtctcctgagcctatagagcccccaggagactgggacccaaagaacttcacagcacacttaccgaatgcagagagcagctttcctggctttgttcacttgcagaaaaggatggcattgccttttagataggatctaggagtgattttattgttttggagaatggaagggcccccatggccctggctttgtcatcagtgactgccatagcaacagcagctctgtacctcatctgttgatcccacctttgaagaggagacacagtgctcaccttaattgcgctggtagcagcttatatcccatgtatcattttcaccattgattggaagctgccttgggaattcagtaccaggcattacccctctgggtgggagagggagaagtgtaaagttggagtgggctggaatcaggtgtggcccgcccagtgtcctctgcagagtggtgaagtagtctggccctcttgggagccctgagtccaggaaaatatgtctgatggagtcaatctagggcttgtttcgaaaaagttcagttactctgtgcagctaaatgctttaggaggaaaggtaggcttaggttgcttttcctctgagggttgattgaaatttcttcagtgaggaatagagaaagggcaggaccctcctcatcacacagctggtgtttcaggctgtgaccaatgcagggtgggatttcctaactgtggatgaggggatgaggtgtctctgagggatgaggtgtctcagagaattgagtccatggggcagtcagaatagccttaagagaaaatcatgaaggagaagaggtcctcctttagctgcctctacttggtatcttagagagggcttagagggctctcagtcttctgcccatgaaaagacttctttgagcctctgccttcatggctcttagggttctgatcttgatatcagcagccccaaccactttctttctgaatgtctagtcagtatttttccccttttggtgttttatgaagccatgtggtaacgaatgaatctgtatcatttttcctacctgagtggcccaaagccagcaccaaaccctgggagtccctgaagcctaacagaacaggtagaacttgcaaaaggaatttggctgagagctcacttctaatcctgtactcactgtgtctttgtagatagaaacaagctagctttaccaaagagaaatagtgtcatagaagaacaaaacttcatatagaaagttctaggcaagtatttgatggtttccttaaggatgtgagctttgtatttccacctagccttgtaaaatgttcctgtggtattttgtgtcacacatcctacctttgatgagtctcacatcccaccttcctataaacagctaaattaattttgtttcatcttccccagaccaaaatgtttgataatcttatcaacattgtgggaggtcttgtgcaatggaaattttgccatttctccaaaactggtggcataaaggctgatgcttggggagaaccccattgctcgggacaggcaactctgttcaatgggatcttctttggtttgatgttcccattgttttctcagttctgggaagcctagtacattagtactaatgtaatcactgaaaccttttcttgaaataagggaagcagccaaactttgattaaagttgcaagttctggggacttgcgggggttgtcataaactgtaacagtgggttttggttcagcatgtaaatgcaactttgattttcttgaggaccgattgacctgtcatgtccctgtatcctcatgctcatcatctcagcaggcctgagaggctgggtcagtttgggtgttcatcatgaggattgcttctgccatggagctgatggacatgggcaggttgctgagaaggtggggtgaaagtgagtgccgggggtgggtgagtgccctggtcttgttcataggggagcctttccctagcagtggaacgctgtggtcattttctctagcatattcccttgggaagtctagatttgctattaatctggctgagaatctaagttctgtgccttagagacagtttgcactttcccatattgtgcctgggacagccatatgattttttttcccaccaaacaagtatgcaaacagaaaccagttcaaagggggatggagtaaaagatgaggcagtagaaatgcctttgaatggttttctgtagctaattctctttaaattttgtcctgctttttttctttatgcagtgctaggtgttttaagttttctagtagtattgcttttgagttacagtataacctgagttactcctctgctctaacattgttgcagaagaactagtttattgttagccaggttgcttgaaaggttgagagtggagtggtttggcatttctgttttaaataaacatttaagctcttaatcag

SEQ ID NO: 359832 - DNA, 3307 bp, Homo sapiens
gcacgagctcgtgccgtccacggcaagacaggtccgggacatgatgcagagatccaaaaataggccgaggatggcataccattctcatcgttgagaaagtattgaattctaagaccatccgttccaatagcagtggcttatccattggaactgtgtttcagagctctagcccgggaggaggcggcgggggcggcggtggtgaagaagaggacagtcagcaggaatctgaaactcctgacccaagtggaggcttccgaggaacaatggaagcagaccgaggaatggaaggtttaatcagtcccacagaggccatggggaacagtaatggggccagcagctcctgtcctggctggcttcgaaaggagctggaaaatgcagaatttatccccatgcctgacagcccatctcctctcagtgcagcgttttcagaatctgagaaagataccctgccctatgaagagctgcaaggactcaaagtggcctctgaagctcctttggaacacaaaccccaagtagaagcctcgtcacctcggctgaatcctgcagtaacctgtgctgggaagggaacaccactgactcctcctgcgtgtgcgtgcagctctctgcaggtggaggttgagagattgcagggtctggtgttaaagtgtctggctgaacaacagaagctacagcaagaaaacctccagatttttacccaactgcagaagttgaacaagaaattagaaggagggcagcaggtggggatgcattccaaaggaactcagacagcaaaggaagagatggaaatggatccaaagcctgacttagattcagattcctggtgcctcctgggaacagactcctgtagacccagcctctagtctcctgagcctatagagcccccaggagactgggacccaaagaacttcacagcacacttaccgaatgcagagagcagctttcctggctttgttcacttgcagaaaaggagcgcaaggcagaggctctgaagcactttccttgtacatttggagagtggcattgccttttagataggatctaggagtgattttattgttttggagaatggaagggcccccatggccctggctttgtcatcagtgactgccatagcaacagcagctctgtacctcatctgttgatcccacctttgaagaggagacacagtgctcaccttaattgcgctggtagcagcttatatcccatgtatcattttcaccattgattggaagctgccttgggaattcagtaccaggcattacccctctgggtgggagagggagaagtgtaaagttggagtgggctggaatcaggtgtggcccgcccagtgtcctctgcagagtggtgaagtagtctggccctcttgggagccctgagtccaggaaaatatgtctgatggagtcaatctagggcttgtttcgaaaaagttcagttactctgtgcagctaaatgctttaggaggaaaggtaggcttaggttgcttttcctctgagggttgattgaaatttcttcagtgaggaatagagaaagggcaggaccctcctcatcacacagctggtgtttcaggctgtgaccaatgcagggtgggatttcctaactgtggatgaggggatgaggtgtctctgagggatgaggtgtctcagagaattgagtccatggggcagtcagaatagccttaagagaaaatcatgaaggagaagaggtcctcctttagctgcctctacttggtatcttagagagggcttagagggctctcagtcttctgcccatgaaaagacttctttgagcctctgccttcatggctcttagggttctgatcttgatatcagcagccccaaccactttctttctgaatgtctagtcagtatttttccccttttggtgttttatgaagccatgtggtaacgaatgaatctgtatcatttttcctacctgagtggcccaaagccagcaccaaaccctgggagtccctgaagcctaacagaacaggtagaacttgcaaaaggaatttggctgagagctcacttctaatcctgtactcactgtgtctttgtagatagaaacaagctagctttaccaaagagaaatagtgtcatagaagaacaaaacttcatatagaaagttctaggcaagtatttgatggtttccttaaggatgtgagctttgtatttccacctagccttgtaaaatgttcctgtggtattttgtgtcacacatcctacctttgatgagtctcacatcccaccttcctataaacagctaaattaattttgtttcatcttccccagaccaaaatgtttgataatcttatcaacattgtgggaggtcttgtgcaatggaaattttgccatttctccaaaactggtggcataaaggctgatgcttggggagaaccccattgctcgggacaggcaactctgttcaatgggatcttctttggtttgatgttcccattgttttctcagttctgggaagcctagtacattagtactaatgtaatcactgaaaccttttcttgaaataagggaagcagccaaactttgattaaagttgcaagttctggggacttgcgggggttgtcataaactgtaacagtgggttttggttcagcatgtaaatgcaactttgattttcttgaggaccgattgacctgtcatgtccctgtatcctcatgctcatcatctcagcaggcctgagaggctgggtcagtttgggtgttcatcatgaggattgcttctgccatggagctgatggacatgggcaggttgctgagaaggtggggtgaaagtgagtgccgggggtgggtgagtgccctggtcttgttcataggggagcctttccctagcagtggaacgctgtggtcattttctctagcatattcccttgggaagtctagatttgctattaatctggctgagaatctaagttctgtgccttagagacagtttgcactttcccatattgtgcctgggacagccatatgattttttttcccaccaaacaagtatgcaaacagaaaccagttcaaagggggatggagtaaaagatgaggcagtagaaatgcctttgaatggttttctgtagctaattctctttaaattttgtcctgctttttttctttatgcagtgctaggtgttttaagttttctagtagtattgcttttgagttacagtataacctgagttactcctctgctctaacattgttgcagaagaactagtttattgttagccaggttgcttgaaaggttgagagtggagtggtttggcatttctgttttaaataaacatttaagctcttaatcag

SEQ ID NO: 359833 - DNA, 1420 bp, Homo sapiens
cgccctgcctgaacttctatatgaagtttgttcttctatgacactatttctctttggtaagctagctgtttctatctacaaagacacagtgagtacaggattagaagtgagctctcagccaaattccttatgcaagttctacctgttctgttaggcttcagggactcccagggtttggtgctagctttaccaaagagaaatagtgtcatagaagaacaaaacttcatatagaaagttctaggcaagtatttgatggtttccttaaggatgtgagctttgtatttccacctagccttgtaaaatgttcctgtggtattttgtgtcacacatcctacctttgatgagtctcacatcccaccttcctataaacagctaaattaattttgtttcatcttccccagaccaaaatgtttgataatcttatcaacattgtgggaggtcttgtgcaatggaaattttgccatttctccaaaactggtggcataaaggctgatgcttggggagaaccccattgctcgggacaggcaactctgttcaatgggatcttctttggtttgatgttcccattgttttctcagttctgggaagcctagtacattagtactaatgtaatcactgaaaccttttcttgaaataagggaagcagccaaactttgattaaagttgcaagttctggggacttgcgggggttgtcataaactgtaacagtgggttttggttcagcatgtaaatgcaactttgattttcttgaggaccgattgacctgtcatgtccctgtatcctcatgctcatcatctcagcaggcctgagaggctgggtcagtttgggtgttcatcatgaggattgcttctgccatggagctgatggacatgggcaggttgctgagaaggtggggtgaaagtgagtgccgggggtgggtgagtgccctggtcttgttcataggggagcctttccctagcagtggaacgctgtggtcattttctctagcatattcccttgggaagtctagatttgctattaatctggctgagaatctaagttctgtgccttagagacagtttgcactttcccatattgtgcctgggacagccatatgattttttttcccaccaaacaagtatgcaaacagaaaccagttcaaagggggatggagtaaaagatgaggcagtagaaatgcctttgaatggttttctgtagctaattctctttaaattttgtcctgctttttttctttatgcagtgctaggtgttttaagttttctagtagtattgcttttgagttacagtataacctgagttactcctctgctctaacattgttgcagaagaactagtttattgttagccaggttgcttgaaaggttgagagtggagtggtttggcatttctgttttaaataaacatttaagctcttaatcag

SEQ ID NO: 359834 - DNA, 2645 bp, Homo sapiens
cctccgggcatacgcaggctggtccccaaggcccgcggccgccgccatgtcggtgctgggcgagtacgagcgacactgcgattccatcaactcggactttgggagcgagtccgggggttgcggggactcgagtccggggcctagcgccagtcaggggccgcgagccggcggcggcgcggcggagcaggaggaactgcactacatccccatccgcgtcctgggccgcggcgccttcggggaagccacgctgtaccgccgcaccgaggatgactcactggttgtgtggaaggaagtcgatttgacccggctgtctgagaaggaacgtcgtgatgccttgaatgagatagttattctggcactgctgcagcacgacaacattattgcctactacaatcacttcatggacaataccacgctgctgattgagctggaatattgtaatggagggaacctgtatgacaaaatccttcgtcagaaggacaagttgtttgaggaagagatggtggtgtggtacctatttcagattgtttcagcagtgagctgcatccataaagctggaatccttcatagagatataaagacattaaatatttttctgaccaaggcaaacctgataaaacttggagattatggcctagcaaagaaacttaattctgagtattccatggctgagacgcttgtgggaaccccatattacatgtctccagagctctgtcaaggagtaaagtacaatttcaagtctgatatctgggcagttggctgcgtcatttttgaactgcttaccttaaagaggacgtttgatgctacaaacccacttaacctgtgtgtgaagatcgtgcaaggaattcgggccatggaagttgactctagccagtactctttggaattgatccaaatggttcattcgtgccttgaccaggatcctgagcagagacctactgcagatgaacttctagatcgccctcttctcaggaaacgcaggagagagatggaggaaaaagtcactctgcttaatgcacctacaaagagaccaaggtcaagcactgtgactgaagcacccattgctgtagtaacatcacgaaccagtgaagtctatgtttggggtggtggaaaatccaccccccagaaactggatgttatcaagagtggctgtagtgcccggcaggtctgtgcagggaatacccactttgctgtggtcacagtggagaaggaactgtacacttgggtgaacatgcaaggaggcactaaactccatggtcagctgggccatggagacaaagcctcctatcgacagccaaagcatgtggaaaagttgcaaggcaaagctatccgtcaggtgtcatgtggtgatgatttcactgtctgtgtgactgatgagggtcagctctatgccttcggatcagattattatggctgcatgggggtggacaaagttgctggccctgaagtgctagaacccatgcagctgaacttcttcctcagcaatccagtggagcaggtctcctgtggagataatcatgtggtggttctgacacgaaacaaggaagtctattcttggggctgtggcgaatatggacgactgggtttggattcagaagaggattattatacaccacaaaaggtggatgttcccaaggccttgattattgttgcagttcaatgtggctgtgatgggacatttctgttgacccagtcaggcaaagtgctggcctgtggactcaatgaattcaataagctgggtctgaatcagtgcatgtcgggaattatcaaccatgaagcataccatgaagttccctacacaacgtcctttaccttggccaaacagttgtccttttataagatccgtaccattgccccaggcaagactcacacagctgctattgatgagcgaggccggctgctgacctttggctgcaacaagtgtgggcagctgggcgttgggaactacaagaagcgtctgggaatcaacctgttggggggaccccttggtgggaagcaagtgatcagggtctcctgcggtgatgagtttaccattgctgccactgatgataatcacatttttgcctggggcaatggtggtaatggccgcctggcaatgacccccacagagagaccacatggctctgatatctgtacctcatggcctcggcctatttttggatctctgcatcatgtcccggacctgtcttgccgtggatggcataccattctcatcgttggtaagagtttcatatgtctggggttgggatggctttgacagaggatggacccacatctgagtactgttagtcacattgttggaaacagaaatgtcctgaagaagccatttctgtaagtcttgtaatggtcaaggatgccatgcctagtggtgggaacagaacattgtcatttcctggagctttgctatctgccatctcttgattattttttaatataagtttgggctctgcctgcccccttagaattgatttttttggttgtttttttttgtcttttttttgagttggagtttcactcttttcgcccaggctggagtgctatggtgtgatctcagctcactgcaacctccgcctcttgggttcaagcaaattctcttgcctcagcctcccaagtagcttggactataggtgcctaccaccacgcct

SEQ ID NO: 359835 - DNA, 477 bp, Homo sapiens
cagaacttagattctcagccagattaatagcaaatctagacttcccaagggaatatgctagagaaaatgaccacagcgttccactgctagggaaagggtccctatgaacaagaccagggcactttcccatattgtgcctgggacagccatatgattttttttcccaccaaacaagtatgcaaacagaaaccagttcaaagggggatggagtaaaagatgaggcagtagaaatgcctttgaatggttttctgtagctaattctctttaaattttgtcctgctttttttctttatgcagtgctaggtgttttaagttttctagtagtattgcttttgagttacagtataacctgagttactcctctgctctaacattgttgcagaagaactagtttattgttagccaggttgcttgaaaggttgagagtggagtggtttggcatttctgttttaaataaacatttaagctcttaatcag

SEQ ID NO: 359836 - DNA, 1622 bp, Homo sapiens
cctccgggcatacgcaggctggtccccaaggcccgcggccgccgccatgtcggtgctgggcgagtacgagcgacactgcgattccatcaactcggactttgggagcgagtccgggggttgcggggactcgagtccggggcctagcgccagtcaggggccgcgagccggcggcggcgcggcggagcaggaggaactgcactacatccccatccgcgtcctgggccgcggcgccttcggggaagccacgctgtaccgccgcaccgaggatgactcactggttgtgtggaaggaagtcgatttgacccggctgtctgagaaggaacgtcgtgatgccttgaatgagatagttattctggcactgctgcagcacgacaacattattgcctactacaatcacttcatggacaataccacgctgctgattgagctggaatattgtaatggagggaacctgtatgacaaaatccttcgtcagaaggacaagttgtttgaggaagagatggtggtgtggtacctatttcagattgtttcagcagtgagctgcatccataaagctggaatccttcatagagatataaagacattaaatatttttctgaccaaggcaaacctgataaaacttggagattatggcctagcaaagaaacttaattctgagtattccatggctgagacgcttgtgggaaccccatattacatgtctccagagctctgtcaaggagtaaagtacaatttcaagtctgatatctgggcagttggctgcgtcatttttgaactgcttaccttaaagaggacgtttgatgctacaaacccacttaacctgtgtgtgaagatcgtgcaaggaattcgggccatggaagttgactctagccagtactctttggaattgatccaaatggttcattcgtgccttgaccaggatcctgagcagagacctactgcagatgaacttctagatcgccctcttctcaggaaacgcaggagagagatggaggaaaaagtcactctgcttaatgcacctacaaagagaccaaggtcaagcactgtgactgaagcacccattgctgtagtaacatcacgaaccagtgaagtctatgtttggggtggtggaaaatccaccccccagaaactggatgttatcaagagtggctgtagtgcccggcaggtctgtgcagggaatacccactttgctgtggtcacagtggagaaggaactgtacacttgggtgaacatgcaaggaggcactaaactccatggtcagctgggccatggagacaaagcctcctatcgacagccaaagcatgtggaaaagttgcaaggcaaagctatccgtcaggtgtcatgtggtgatgatttcactgtctgtgtgactgatgagggtcagctctatgccttcggatcagattattatggctgcatgggggtggacaaagttgctggccctgaagtgctagaacccatgcagctgaacttcttcctcagcaatccagtggagcaggtctcctgtggagataatcatgtggtggttctgacacgaaacaaggaagtctattcttggggctgtggcgaatatggtaggggtagccttgtctctgtccacttcttcacaggtatacaacctg

SEQ ID NO: 359837 - DNA, 457 bp, Homo sapiens
tagtattatcatcttattattattactgccttatctgttgcagcagagtattgcctgtacagccacaattaggatatataaattaggacgcaagttagttggcaagggaactacatgaagccaacaaggatggctaatcttgctttcctttttcttgggattcagttgaaaggtcagattataatatactctgagcatcatattattggccacatagttatagattgtatggccagttggcttcattctgtctgatagcatcagtgcatccctaaccatttttttttgatgcatactagtagttataacaagaagtcagacctattgccaattctttaaataatggtcacagacacctgagagcccctaccagtagagtatagcatcatctttatataaccaggaacaatgcagtcatcattttctcatagaacccacttaacctgtgtgtgaagat

SEQ ID NO: 359838 - DNA, 794 bp, Homo sapiens
gattatagagttgcaaaaggggtcatgacttttcttatccagaaagggtaggtgaaaatcactagggaagtctaaatttataaaactagaggcaagtttagtattttcattttagaagctgggaccagctatagataattgctccccagttctctgcttctccagtattcttgccctgccataatcaccatcatgattagcagtctgtcatagtatcctcaatagaatctttttgagatctatccccagcccatatttttacctggaactgacatcatgcaaattaagtatgacaacaacgttttaatgctttacttcccctgtcctgcaataaattataatgctaaattgtacacataacttttaaagtctgttaaaaggaaaaaataagaggagtcagtctgtgcccctctaggaagttttccttctaggcttacagatctaggtgtggattcatttgctgccaggcaagaggaaaagcacgatacctctgttactgtgtttaggatgactcactggttgtgtggaaggaagtcgatttgacccggctgtctgagaaggaacgtcgtgatgccttgaatgagatagttattctggcactgctgcagcacgacaacattattgcctactacaatcacttcatggacaataccacgctgctgattgagctggaatattgtaatggtaagatagagttcagtgggacttttccagcaagactttcttagactcataattacgttgaggagaagaatataagaagagacatatacagtgataaaaactttaaatga

SEQ ID NO: 359839 - DNA, 617 bp, Homo sapiens
cctccgggcatacgcaggctggtccccaaggcccgcggccgccgccatgtcggtgctgggcgagtacgagcgacactgcgattccatcaactcggactttgggagcgagtccgggggttgcggggactcgagtccggggcctagcgccagtcaggggccgcgagccggcggcggcgcggcggagcaggaggaactgcactacatccccatccgcgtcctgggccgcggcgccttcggggaagccacgctgtaccgccgcaccgaggtagcggccctcggcgccggccgccctgtctggcgctgtcgggtcgccccgagtccctccttctcggccccgctttcccagcgtcgtgagcttagtgctttaggcgcccacggggtatatgtcttagggtcttcaccactcttcccactcaccggcactagaaattggctagatcattggtttgactagtcatttttgattgtcctaagtcacctaaccgtctcttgagctttagtttccccatctgtaaaatgggcttactgataataccttgaaatcatctttttctttttttttaagattatcttgagaatcaaacgaaggctctgttctgtaaattaaagtggtatac

SEQ ID NO: 359840 - DNA, 5255 bp, Homo sapiens
cctccgggcatacgcaggctggtccccaaggcccgcggccgccgccatgtcggtgctgggcgagtacgagcgacactgcgattccatcaactcggactttgggagcgagtccgggggttgcggggactcgagtccggggcctagcgccagtcaggggccgcgagccggcggcggcgcggcggagcaggaggaactgcactacatccccatccgcgtcctgggccgcggcgccttcggggaagccacgctgtaccgccgcaccgaggagggaacctgtatgacaaaatccttcgtcagaaggacaagttgtttgaggaagagatggtggtgtggtacctatttcagattgtttcagcagtgagctgcatccataaagctggaatccttcatagagatataaagacattaaatatttttctgaccaaggcaaacctgataaaacttggagattatggcctagcaaagaaacttaattctgagtattccatggctgagacgcttgtgggaaccccatattacatgtctccagagctctgtcaaggagtaaagtacaatttcaagtctgatatctgggcagttggctgcgtcatttttgaactgcttaccttaaagaggacgtttgatgctacaaacccacttaacctgtgtgtgaagatcgtgcaaggaattcgggccatggaagttgactctagccagtactctttggaattgatccaaatggttcattcgtgccttgaccaggatcctgagcagagacctactgcagatgaacttctagatcgccctcttctcaggaaacgcaggagagagatggaggaaaaagtcactctgcttaatgcacctacaaagagaccaaggtcaagcactgtgactgaagcacccattgctgtagtaacatcacgaaccagtgaagtctatgtttggggtggtggaaaatccaccccccagaaactggatgttatcaagagtggctgtagtgcccggcaggtctgtgcagggaatacccactttgctgtggtcacagtggagaaggaactgtacacttgggtgaacatgcaaggaggcactaaactccatggtcagctgggccatggagacaaagcctcctatcgacagccaaagcatgtggaaaagttgcaaggcaaagctatccgtcaggtgtcatgtggtgatgatttcactgtctgtgtgactgatgagggtcagctctatgccttcggatcagattattatggctgcatgggggtggacaaagttgctggccctgaagtgctagaacccatgcagctgaacttcttcctcagcaatccagtggagcaggtctcctgtggagataatcatgtggtggttctgacacgaaacaaggaagtctattcttggggctgtggcgaatatggacgactgggtttggattcagaagaggattattatacaccacaaaaggtggatgttcccaaggccttgattattgttgcagttcaatgtggctgtgatgggacatttctgttgacccagtcaggcaaagtgctggcctgtggactcaatgaattcaataagctgggtctgaatcagtgcatgtcgggaattatcaaccatgaagcataccatgaagttccctacacaacgtcctttaccttggccaaacagttgtccttttataagatccgtaccattgccccaggcaagactcacacagctgctattgatgagcgaggccggctgctgacctttggctgcaacaagtgtgggcagctgggcgttgggaactacaagaagcgtctgggaatcaacctgttggggggaccccttggtgggaagcaagtgatcagggtctcctgcggtgatgagtttaccattgctgccactgatgataatcacatttttgcctggggcaatggtggtaatggccgcctggcaatgacccccacagagagaccacatggctctgatatctgtacctcatggcctcggcctatttttggatctctgcatcatgtcccggacctgtcttgccgtggatggcataccattctcatcgttgagaaagtattgaattctaagaccatccgttccaatagcagtggcttatccattggaactgtgtttcagagctctagcccgggaggaggcggcgggggcggcggtggtgaagaagaggacagtcagcaggaatctgaaactcctgacccaagtggaggcttccgaggaacaatggaagcagaccgaggaatggaaggtttaatcagtcccacagaggccatggggaacagtaatggggccagcagctcctgtcctggctggcttcgaaaggagctggaaaatgcagaatttatccccatgcctgacagcccatctcctctcagtgcagcgttttcagaatctgagaaagataccctgccctatgaagagctgcaaggactcaaagtggcctctgaagctcctttggaacacaaaccccaagtagaagcctcgtcacctcggctgaatcctgcagtaacctgtgctgggaagggaacaccactgactcctcctgcgtgtgcgtgcagctctctgcaggtggaggttgagagattgcagggtctggtgttaaagtgtctggctgaacaacagaagctacagcaagaaaacctccagatttttacccaactgcagaagttgaacaagaaattagaaggagggcagcaggtggggatgcattccaaaggaactcagacagcaaaggaagagatggaaatggatccaaagcctgacttagattcagattcctggtgcctcctgggaacagactcctgtagacccagcctctagtctcctgagcctatagagcccccaggagactgggacccaaagaacttcacagcacacttaccgaatgcagagagcagctttcctggctttgttcacttgcagaaaaggagcgcaaggcagaggctctgaagcactttccttgtacatttggagagtggcattgccttttagataggatctaggagtgattttattgttttggagaatggaagggcccccatggccctggctttgtcatcagtgactgccatagcaacagcagctctgtacctcatctgttgatcccacctttgaagaggagacacagtgctcaccttaattgcgctggtagcagcttatatcccatgtatcattttcaccattgattggaagctgccttgggaattcagtaccaggcattacccctctgggtgggagagggagaagtgtaaagttggagtgggctggaatcaggtgtggcccgcccagtgtcctctgcagagtggtgaagtagtctggccctcttgggagccctgagtccaggaaaatatgtctgatggagtcaatctagggcttgtttcgaaaaagttcagttactctgtgcagctaaatgctttaggaggaaaggtaggcttaggttgcttttcctctgagggttgattgaaatttcttcagtgaggaatagagaaagggcaggaccctcctcatcacacagctggtgtttcaggctgtgaccaatgcagggtgggatttcctaactgtggatgaggggatgaggtgtctctgagggatgaggtgtctcagagaattgagtccatggggcagtcagaatagccttaagagaaaatcatgaaggagaagaggtcctcctttagctgcctctacttggtatcttagagagggcttagagggctctcagtcttctgcccatgaaaagacttctttgagcctctgccttcatggctcttagggttctgatcttgatatcagcagccccaaccactttctttctgaatgtctagtcagtatttttccccttttggtgttttatgaagccatgtggtaacgaatgaatctgtatcatttttcctacctgagtggcccaaagccagcaccaaaccctgggagtccctgaagcctaacagaacaggtagaacttgcaaaaggaatttggctgagagctcacttctaatcctgtactcactgtgtctttgtagatagaaacaagctagctttaccaaagagaaatagtgtcatagaagaacaaaacttcatatagaaagttctaggcaagtatttgatggtttccttaaggatgtgagctttgtatttccacctagccttgtaaaatgttcctgtggtattttgtgtcacacatcctacctttgatgagtctcacatcccaccttcctataaacagctaaattaattttgtttcatcttccccagaccaaaatgtttgataatcttatcaacattgtgggaggtcttgtgcaatggaaattttgccatttctccaaaactggtggcataaaggctgatgcttggggagaaccccattgctcgggacaggcaactctgttcaatgggatcttctttggtttgatgttcccattgttttctcagttctgggaagcctagtacattagtactaatgtaatcactgaaaccttttcttgaaataagggaagcagccaaactttgattaaagttgcaagttctggggacttgcgggggttgtcataaactgtaacagtgggttttggttcagcatgtaaatgcaactttgattttcttgaggaccgattgacctgtcatgtccctgtatcctcatgctcatcatctcagcaggcctgagaggctgggtcagtttgggtgttcatcatgaggattgcttctgccatggagctgatggacatgggcaggttgctgagaaggtggggtgaaagtgagtgccgggggtgggtgagtgccctggtcttgttcataggggagcctttccctagcagtggaacgctgtggtcattttctctagcatattcccttgggaagtctagatttgctattaatctggctgagaatctaagttctgtgccttagagacagtttgcactttcccatattgtgcctgggacagccatatgattttttttcccaccaaacaagtatgcaaacagaaaccagttcaaagggggatggagtaaaagatgaggcagtagaaatgcctttgaatggttttctgtagctaattctctttaaattttgtcctgctttttttctttatgcagtgctaggtgttttaagttttctagtagtattgcttttgagttacagtataacctgagttactcctctgctctaacattgttgcagaagaactagtttattgttagccaggttgcttgaaaggttgagagtggagtggtttggcatttctgttttaaataaacatttaagctcttaatcag

SEQ ID NO: 359841 - DNA, 4988 bp, Homo sapiens
cctccgggcatacgcaggctggtccccaaggcccgcggccgccgccatgtcggtgctgggcgagtacgagcgacactgcgattccatcaactcggactttgggagcgagtccgggggttgcggggactcgagtccggggcctagcgccagtcaggggccgcgagccggcggcggcgcggcggagcaggaggaactgcactacatccccatccgcgtcctgggccgcggcgccttcggggaagccacgctgtaccgccgcaccgaggatgactcactggttgtgtggaaggaagtcgatttgacccggctgtctgagaaggaacgtcgtgatgccttgaatgagatagttattctggcactgctgcagcacgacaacattattgcctactacaatcacttcatggacaataccacgctgctgattgagctggaatattgtaatggagggaacctgtatgacaaaatccttcgtcagaaggacaagttgtttgaggaagagatggtggtgtggtacctatttcagattgtttcagcagtgagctgcatccataaagctggaatccttcatagagatataaagacattaaatatttttctgaccaaggcaaacctgataaaacttggagattatggcctagcaaagaaacttaattctgagtattccatggctgagacgcttgtgggaaccccatattacatgtctccagagctctgtcaaggagtaaagtacaatttcaagtctgatatctgggcagttggctgcgtcatttttgaactgcttaccttaaagaggacgtttgatgctacaaacccacttaacctgtgtgtgaagatcgtgcaaggaattcgggccatggaagttgactctagccagtactctttggaattgatccaaatggttcattcgtgccttgaccaggatcctgagcagagacctactgcagatgaacttctagatcgccctcttctcaggaaacgcaggagagagatggaggaaaaagtcactctgcttaatgcacctacaaagagaccaaggtcaagcactgtgactgaagcacccattgctgtagtaacatcacgaaccagtgaagtctatgtttggggtggtggaaaatccaccccccagaaactggatgttatcaagagtggctgtagtgcccggcaggtctgtgcagggaatacccactttgctgtggtcacagtggagaaggaactgtacacttgggtgaacatgcaaggaggcactaaactccatggtcagctgggccatggagacaaagcctcctatcgacagccaaagcatgtggaaaagttgcaaggcaaagctatccgtcaggtgtcatgtggtgatgatttcactgtctgtgtgactgatgagggtcagctctatgccttcggatcagattattatggctgcatgggggtggacaaagttgctggccctgaagtgctagaacccatgcagctgaacttcttcctcagcaatccagtggagcaggtctcctgtggagataatcatgtggtggttctgacacgaaacaaggaagtctattcttggggctgtggcgaatatggacgactgggtttggattcagaagaggatataatcacatttttgcctggggcaatggtggtaatggccgcctggcaatgacccccacagagagaccacatggctctgatatctgtacctcatggcctcggcctatttttggatctctgcatcatgtcccggacctgtcttgccgtggatggcataccattctcatcgttgagaaagtattgaattctaagaccatccgttccaatagcagtggcttatccattggaactgtgtttcagagctctagcccgggaggaggcggcgggggcggcggtggtgaagaagaggacagtcagcaggaatctgaaactcctgacccaagtggaggcttccgaggaacaatggaagcagaccgaggaatggaaggtttaatcagtcccacagaggccatggggaacagtaatggggccagcagctcctgtcctggctggcttcgaaaggagctggaaaatgcagaatttatccccatgcctgacagcccatctcctctcagtgcagcgttttcagaatctgagaaagataccctgccctatgaagagctgcaaggactcaaagtggcctctgaagctcctttggaacacaaaccccaagtagaagcctcgtcacctcggctgaatcctgcagtaacctgtgctgggaagggaacaccactgactcctcctgcgtgtgcgtgcagctctctgcaggtggaggttgagagattgcagggtctggtgttaaagtgtctggctgaacaacagaagctacagcaagaaaacctccagatttttacccaactgcagaagttgaacaagaaattagaaggagggcagcaggtggggatgcattccaaaggaactcagacagcaaaggaagagatggaaatggatccaaagcctgacttagattcagattcctggtgcctcctgggaacagactcctgtagacccagcctctagtctcctgagcctatagagcccccaggagactgggacccaaagaacttcacagcacacttaccgaatgcagagagcagctttcctggctttgttcacttgcagaaaaggagcgcaaggcagaggctctgaagcactttccttgtacatttggagagtggcattgccttttagataggatctaggagtgattttattgttttggagaatggaagggcccccatggccctggctttgtcatcagtgactgccatagcaacagcagctctgtacctcatctgttgatcccacctttgaagaggagacacagtgctcaccttaattgcgctggtagcagcttatatcccatgtatcattttcaccattgattggaagctgccttgggaattcagtaccaggcattacccctctgggtgggagagggagaagtgtaaagttggagtgggctggaatcaggtgtggcccgcccagtgtcctctgcagagtggtgaagtagtctggccctcttgggagccctgagtccaggaaaatatgtctgatggagtcaatctagggcttgtttcgaaaaagttcagttactctgtgcagctaaatgctttaggaggaaaggtaggcttaggttgcttttcctctgagggttgattgaaatttcttcagtgaggaatagagaaagggcaggaccctcctcatcacacagctggtgtttcaggctgtgaccaatgcagggtgggatttcctaactgtggatgaggggatgaggtgtctctgagggatgaggtgtctcagagaattgagtccatggggcagtcagaatagccttaagagaaaatcatgaaggagaagaggtcctcctttagctgcctctacttggtatcttagagagggcttagagggctctcagtcttctgcccatgaaaagacttctttgagcctctgccttcatggctcttagggttctgatcttgatatcagcagccccaaccactttctttctgaatgtctagtcagtatttttccccttttggtgttttatgaagccatgtggtaacgaatgaatctgtatcatttttcctacctgagtggcccaaagccagcaccaaaccctgggagtccctgaagcctaacagaacaggtagaacttgcaaaaggaatttggctgagagctcacttctaatcctgtactcactgtgtctttgtagatagaaacaagctagctttaccaaagagaaatagtgtcatagaagaacaaaacttcatatagaaagttctaggcaagtatttgatggtttccttaaggatgtgagctttgtatttccacctagccttgtaaaatgttcctgtggtattttgtgtcacacatcctacctttgatgagtctcacatcccaccttcctataaacagctaaattaattttgtttcatcttccccagaccaaaatgtttgataatcttatcaacattgtgggaggtcttgtgcaatggaaattttgccatttctccaaaactggtggcataaaggctgatgcttggggagaaccccattgctcgggacaggcaactctgttcaatgggatcttctttggtttgatgttcccattgttttctcagttctgggaagcctagtacattagtactaatgtaatcactgaaaccttttcttgaaataagggaagcagccaaactttgattaaagttgcaagttctggggacttgcgggggttgtcataaactgtaacagtgggttttggttcagcatgtaaatgcaactttgattttcttgaggaccgattgacctgtcatgtccctgtatcctcatgctcatcatctcagcaggcctgagaggctgggtcagtttgggtgttcatcatgaggattgcttctgccatggagctgatggacatgggcaggttgctgagaaggtggggtgaaagtgagtgccgggggtgggtgagtgccctggtcttgttcataggggagcctttccctagcagtggaacgctgtggtcattttctctagcatattcccttgggaagtctagatttgctattaatctggctgagaatctaagttctgtgccttagagacagtttgcactttcccatattgtgcctgggacagccatatgattttttttcccaccaaacaagtatgcaaacagaaaccagttcaaagggggatggagtaaaagatgaggcagtagaaatgcctttgaatggttttctgtagctaattctctttaaattttgtcctgctttttttctttatgcagtgctaggtgttttaagttttctagtagtattgcttttgagttacagtataacctgagttactcctctgctctaacattgttgcagaagaactagtttattgttagccaggttgcttgaaaggttgagagtggagtggtttggcatttctgttttaaataaacatttaagctcttaatcag

SEQ ID NO: 359842 - DNA, 5379 bp, Homo sapiens
cctccgggcatacgcaggctggtccccaaggcccgcggccgccgccatgtcggtgctgggcgagtacgagcgacactgcgattccatcaactcggactttgggagcgagtccgggggttgcggggactcgagtccggggcctagcgccagtcaggggccgcgagccggcggcggcgcggcggagcaggaggaactgcactacatccccatccgcgtcctgggccgcggcgccttcggggaagccacgctgtaccgccgcaccgaggatgactcactggttgtgtggaaggaagtcgatttgacccggctgtctgagaaggaacgtcgtgatgccttgaatgagatagttattctggcactgctgcagcacgacaacattattgcctactacaatcacttcatggacaataccacgctgctgattgagctggaatattgtaatggagggaacctgtatgacaaaatccttcgtcagaaggacaagttgtttgaggaagagatggtggtgtggtacctatttcagattgtttcagcagtgagctgcatccataaagctggaatccttcatagagatataaagacattaaatatttttctgaccaaggcaaacctgataaaacttggagattatggcctagcaaagaaacttaattctgagtattccatggctgagacgcttgtgggaaccccatattacatgtctccagagctctgtcaaggagtaaagtacaatttcaagtctgatatctgggcagttggctgcgtcatttttgaactgcttaccttaaagaggacgtttgatgctacaaacccacttaacctgtgtgtgaagatcgtgcaaggaattcgggccatggaagttgactctagccagtactctttggaattgatccaaatggttcattcgtgccttgaccaggatcctgagcagagacctactgcagatgaacttctagatcgccctcttctcaggaaacgcaggagagagatggaggaaaaagtcactctgcttaatgcacctacaaagagaccaaggtcaagcactgtgactgaagcacccattgctgtagtaacatcacgaaccagtgaagtctatgtttggggtggtggaaaatccaccccccagaaactggatgttatcaagagtggctgtagtgcccggcaggtctgtgcagggaatacccactttgctgtggtcacagtggagaaggaactgtacacttgggtgaacatgcaaggaggcactaaactccatggtcagctgggccatggagacaaagcctcctatcgacagccaaagcatgtggaaaagttgcaaggcaaagctatccgtcaggtgtcatgtggtgatgatttcactgtctgtgtgactgatgagggtcagctctatgccttcggatcagattattatggctgcatgggggtggacaaagttgctggccctgaagtgctagaacccatgcagctgaacttcttcctcagcaatccagtggagcaggtctcctgtggagataatcatgtggtggttctgacacgaaacaaggaagtctattcttggggctgtggcgaatatggacgactgggtttggattcagaagaggattattatacaccacaaaaggtggatgttcccaaggccttgattattgttgcagttcaatgtggctgtgatgggacatttctgttgacccagtcaggcaaagtgctggcctgtggactcaatgaattcaataagctgggtctgaatcagtgcatgtcgggaattatcaaccatgaagcataccatgaagttccctacacaacgtcctttaccttggccaaacagttgtccttttataagatccgtaccattgccccaggcaagactcacacagctgctattgatgagcgaggccggctgctgacctttggctgcaacaagtgtgggcagctgggcgttgggaactacaagaagcgtctgggaatcaacctgttggggggaccccttggtgggaagcaagtgatcagggtctcctgcggtgatgagtttaccattgctgccactgatgataatcacatttttgcctggggcaatggtggtaatggccgcctggcaatgacccccacagagagaccacatggctctgatatctgtacctcatggcctcggcctatttttggatctctgcatcatgtcccggacctgtcttgccgtggatggcataccattctcatcgttgagaaagtattgaattctaagaccatccgttccaatagcagtggcttatccattggaactgtgtttcagagctctagcccgggaggaggcggcgggggcggcggtggtgaagaagaggacagtcagcaggaatctgaaactcctgacccaagtggaggcttccgaggaacaatggaagcagaccgaggaatggaaggtttaatcagtcccacagaggccatggggaacagtaatggggccagcagctcctgtcctggctggcttcgaaaggagctggaaaatgcagaatttatccccatgcctgacagcccatctcctctcagtgcagcgttttcagaatctgagaaagataccctgccctatgaagagctgcaaggactcaaagtggcctctgaagctcctttggaacacaaaccccaagtagaagcctcgtcacctcggctgaatcctgcagtaacctgtgctgggaagggaacaccactgactcctcctgcgtgtgcgtgcagctctctgcaggtggaggttgagagattgcagggtctggtgttaaagtgtctggctgaacaacagaagctacagcaagaaaacctccagatttttacccaactgcagaagttgaacaagaaattagaaggagggcagcaggtggggatgcattccaaaggaactcagacagcaaaggaagagatggaaatggatccaaagcctgacttagattcagattcctggtgcctcctgggaacagactcctgtagacccagcctctagtctcctgagcctatagagcccccaggagactgggacccaaagaacttcacagcacacttaccgaatgcagagagcagctttcctggctttgttcacttgcagaaaaggagcgcaaggcagaggctctgaagcactttccttgtacatttggagagtggcattgccttttagataggatctaggagtgattttattgttttggagaatggaagggcccccatggccctggctttgtcatcagtgactgccatagcaacagcagctctgtacctcatctgttgatcccacctttgaagaggagacacagtgctcaccttaattgcgctggtagcagcttatatcccatgtatcattttcaccattgattggaagctgccttgggaattcagtaccaggcattacccctctgggtgggagagggagaagtgtaaagttggagtgggctggaatcaggtgtggcccgcccagtgtcctctgcagagtggtgaagtagtctggccctcttgggagccctgagtccaggaaaatatgtctgatggagtcaatctagggcttgtttcgaaaaagttcagttactctgtgcagctaaatgctttaggaggaaaggtaggcttaggttgcttttcctctgagggttgattgaaatttcttcagtgaggaatagagaaagggcaggaccctcctcatcacacagctggtgtttcaggctgtgaccaatgcagggtgggatttcctaactgtggatgaggggatgaggtgtctctgagggatgaggtgtctcagagaattgagtccatggggcagtcagaatagccttaagagaaaatcatgaaggagaagaggtcctcctttagctgcctctacttggtatcttagagagggcttagagggctctcagtcttctgcccatgaaaagacttctttgagcctctgccttcatggctcttagggttctgatcttgatatcagcagccccaaccactttctttctgaatgtctagtcagtatttttccccttttggtgttttatgaagccatgtggtaacgaatgaatctgtatcatttttcctacctgagtggcccaaagccagcaccaaaccctgggagtccctgaagcctaacagaacaggtagaacttgcaaaaggaatttggctgagagctcacttctaatcctgtactcactgtgtctttgtagatagaaacaagctagctttaccaaagagaaatagtgtcatagaagaacaaaacttcatatagaaagttctaggcaagtatttgatggtttccttaaggatgtgagctttgtatttccacctagccttgtaaaatgttcctgtggtattttgtgtcacacatcctacctttgatgagtctcacatcccaccttcctataaacagctaaattaattttgtttcatcttccccagaccaaaatgtttgataatcttatcaacattgtgggaggtcttgtgcaatggaaattttgccatttctccgcaactctgttcaatgggatcttctttggtttgatgttcccattgttttctcagttctgggaagcctagtacattagtactaatgtaatcactgaaaccttttcttgaaataagggaagcagccaaactttgattaaagttgcaagttctggggacttgcgggggttgtcataaactgtaacagtgggttttggttcagcatgtaaatgcaactttgattttcttgaggaccgattgacctgtcatgtccctgtatcctcatgctcatcatctcagcaggcctgagaggctgggtcagtttgggtgttcatcatgaggattgcttctgccatggagctgatggacatgggcaggttgctgagaaggtggggtgaaagtgagtgccgggggtgggtgagtgccctggtcttgttcataggggagcctttccctagcagtggaacgctgtggtcattttctctagcatattcccttgggaagtctagatttgctattaatctggctgagaatctaagttctgtgccttagagacagtttgcactttcccatattgtgcctgggacagccatatgattttttttcccaccaaacaagtatgcaaacagaaaccagttcaaagggggatggagtaaaagatgaggcagtagaaatgcctttgaatggttttctgtagctaattctctttaaattttgtcctgctttttttctttatgcagtgctaggtgttttaagttttctagtagtattgcttttgagttacagtataacctgagttactcctctgctctaacattgttgcagaagaactagtttattgttagccaggttgcttgaaaggttgagagtggagtggtttggcatttctgttttaaataaacatttaagctcttaatcag

SEQ ID NO: 359843 - DNA, 4587 bp, Homo sapiens
cctccgggcatacgcaggctggtccccaaggcccgcggccgccgccatgtcggtgctgggcgagtacgagcgacactgcgattccatcaactcggactttgggagcgagtccgggggttgcggggactcgagtccggggcctagcgccagtcaggggccgcgagccggcggcggcgcggcggagcaggaggaactgcactacatccccatccgcgtcctgggccgcggcgccttcggggaagccacgctgtaccgccgcaccgaggatgactcactggttgtgtggaaggaagtcgatttgacccggctgtctgagaaggaacgtcgtgatgccttgaatgagatagttattctggcactgctgcagcacgacaacattattgcctactacaatcacttcatggacaataccacgctgctgattgagctggaatattgtaatggagggaacctgtatgacaaaatccttcgtcagaaggacaagttgtttgaggaagagatggtggtgtggtacctatttcagattgtttcagcagtgagctgcatccataaagctggaatccttcatagagatataaagacattaaatatttttctgaccaaggcaaacctgataaaacttggagattatggcctagcaaagaaacttaattctgagtattccatggctgagacgcttgtgggaaccccatattacatgtctccagagctctgtcaaggagtaaagtacaatttcaagtctgatatctgggcagttggctgcgtcatttttgaactgcttaccttaaagaggacgtttgatgctacaaacccacttaacctgtgtgtgaagatcgtgcaaggaattcgggccatggaagttgactctagccagtactctttggaattgatccaaatggttcattcgtgccttgaccaggatcctgagcagagacctactgcagatgaacttctagatcgccctcttctcaggaaacgcaggagagagatggaggaaaaagtcactctgcttaatgcacctacaaagagaccaaggtcaagcactgtgactgaagcacccattgctgtagtaacatcacgaaccagtgaagtctatgtttggggtggtggaaaatccaccccccagaaactggatgttatcaagagtggctgtagtgcccggcaggtctgtgcagggaatacccactttgctgtggtcacagtggagaaggaactgtacacttgggtgaacatgcaaggaggcactaaactccatggtcagctgggccatggagacaaagcctcctatcgacagccaaagcatgtggaaaagttgcaaggcaaagctatccgtcaggtgtcatgtggtgatgatttcactgtctgtgtgactgatgagggtcagctctatgccttcggatcagattattatggctgcatgggggtggacaaagttgctggccctgaagtgctagaacccatgcagctgaacttcttcctcagcaatccagtggagcaggtctcctgtggagataatcatgtggtggttctgacacgaaacaaggaagtctattcttggggctgtggcgaatatggacgactgggtttggattcagaagaggattattatacaccacaaaaggtggatgttcccaaggccttgattattgttgcagttcaatgtggctgtgatgggacatttctgttgacccagtcaggcaaagtgctggcctgtggactcaatgaattcaataagctgggtctgaatcagtgcatgtcgggaattatcaaccatgaagcataccatgaagttccctacacaacgtcctttaccttggccaaacagttgtccttttataagatccgtaccattgccccaggcaagactcacacagctgctattgatgagcgaggccggctgctgacctttggctgcaacaagtgtgggcagctgggcgttgggaactacaagaagcgtctgggaatcaacctgttggggggaccccttggtgggaagcaagtgatcagggtctcctgcggtgatgagtttaccattgctgccactgatgataatcacatttttgcctggggcaatggtggtaatggccgcctggcaatgacccccacagagagaccacatggctctgatatctgtacctcatggcctcggcctatttttggatctctgcatcatgtcccggacctgtcttgccgtggatggcataccattctcatcgttgagaaagtattgaattctaagaccatccgttccaatagcagtggcttatccattggaactgtgtttcagagctctagcccgggaggaggcggcgggggcggcggtggtgaagaagaggacagtcagcaggaatctgaaactcctgacccaagtggaggcttccgaggaacaatggaagcagaccgaggaatggaaggtttaatcagtcccacagaggccatggggaacagtaatggggccagcagctcctgtcctggctggcttcgaaaggagctggaaaatgcagaatttatccccatgcctgacagcccatctcctctcagtgcagcgttttcagaatctgagaaagataccctgccctatgaagagctgcaaggactcaaagtggcctctgaagctcctttggaacacaaaccccaagtagaagcctcgtcacctcggctgaatcctgcagtaacctgtgctgggaagggaacaccactgactcctcctgcgtgtgcgtgcagctctctgcaggtggaggttgagagattgcagggtctggtgttaaagtgtctggctgaacaacagaagctacagcaagaaaacctccagatttttacccaactgcagaagttgaacaagaaattagaaggagggcagcaggtggggatgcattccaaaggaactcagacagcaaaggaagagatggaaatggatccaaagcctgacttagattcagattcctggtgcctcctgggaacagactcctgtagacccagcctctagtctcctgagcctatagagcccccaggagactgggacccaaagaacttcacagcacacttaccgaatgcagagagcagctttcctggctttgttcacttgcagaaaaggagcgcaaggcagaggctctgaagcactttccttgtacatttggagagtggcattgccttttagataggatctaggagtgattttattgttttggagaatggaagggcccccatggccctggctttgtcatcagtgactgccatagcaacagcagctctgtacctcatctgttgatcccacctttgaagaggagacacagtgctcaccttaattgcgctggtagcagcttatatcccatgtatcattttcaccattgattggaagctgccttgggaattcagtaccaggcattacccctctgggtgggagagggagaagtgtaaagttggagtgggctggaatcaggtgtggcccgcccagtgtcctctgcagagtggtgaagtagtctggccctcttgggagccctgagtccaggaaaatatgtctgatggagtcaatctagggcttgtttcgaaaaagttcagttactctgtgcagctaaatgctttaggaggaaaggtaggcttaggttgcttttcctctgagggttgattgaaatttcttcagtgaggaatagagaaagggcaggaccctcctcatcacacagctggtgtttcaggctgtgaccaatgcagggtgggatttcctaactgtggatgaggggatgaggtgtctctgagggatgaggtgtctcagagaattgagtccatggggcagtcagaatagccttaagagaaaatcatgaaggagaagaggtcctcctttagctgcctctacttggtatcttagagagggcttagagggctctcagtcttctgcccatgaaaagacttctttgagcctctgccttcatggctcttagggttctgatcttgatatcagcagccccaaccactttctttctgaatgtctagtcagtatttttccccttttggtgttttatgaagccatgtggtaacgaatgaatctgtatcatttttcctacctgagtggcccaaagccagcaccaaaccctgggagtccctgaagcctaacagaacaggtagaacttgcaaaaggaatttggctgagagctcacttctaatcctgtactcactgtgtctttgtagatagaaacaagctagctttaccaaagagaaatagtgtcatagaagaacaaaacttcatatagaaagttctaggcaagtatttgatggtttccttaaggatgtgagctttgtatttccacctagccttgtaaaatgttcctgtggtattttgtgtcacacatcctacctttgatgagtctcacatcccaccttcctataaacagctaaattaattttgtttcatcttccccagaccaaaatgtttgataatcttatcaacattgtgggaggtcttgtgcaatggaaattttgccatttctccccaaatctgttcaatgggatcttccttgccttgatgttccaacggttctcccgttcttgcaaccctatcccatacacctaccgcatccccgaccctcttttgac

SEQ ID NO: 359844 - DNA, 2066 bp, Homo sapiens
cctccgggcatacgcaggctggtccccaaggcccgcggccgccgccatgtcggtgctgggcgagtacgagcgacactgcgattccatcaactcggactttgggagcgagtccgggggttgcggggactcgagtccggggcctagcgccagtcaggggccgcgagccggcggcggcgcggcggagcaggaggaactgcactacatccccatccgcgtcctgggccgcggcgccttcggggaagccacgctgtaccgccgcaccgaggatgactcactggttgtgtggaaggaagtcgatttgacccggctgtctgagaaggaacgtcgtgatgccttgaatgagatagttattctggcactgctgcagcacgacaacattattgcctactacaatcacttcatggacaataccacgctgctgattgagctggaatattgtaatggagggaacctgtatgacaaaatccttcgtcagaaggacaagttgtttgaggaagagatggtggtgtggtacctatttcagattgtttcagcagtgagctgcatccataaagctggaatccttcatagagatataaagacattaaatatttttctgaccaaggcaaacctgataaaacttggagattatggcctagcaaagaaacttaattctgagtattccatggctgagacgcttgtgggaaccccatattacatgtctccagagctctgtcaaggagtaaagtacaatttcaagtctgatatctgggcagttggctgcgtcatttttgaactgcttaccttaaagaggacgtttgatgctacaaacccacttaacctgtgtgtgaagatcgtgcaaggaattcgggccatggaagttgactctagccagtactctttggaattgatccaaatggttcattcgtgccttgaccaggatcctgagcagagacctactgcagatgaacttctagatcgccctcttctcaggaaacgcaggagagagatggaggaaaaagtcactctgcttaatgcacctacaaagagaccaaggtcaagcactgtgactgaagcacccattgctgtagtaacatcacgaaccagtgaagtctatgtttggggtggtggaaaatccaccccccagaaactggatgttatcaagagtggctgtagtgcccggcaggtctgtgcagggaatacccactttgctgtggtcacagtggagaaggaactgtacacttgggtgaacatgcaaggaggcactaaactccatggtcagctgggccatggagacaaagcctcctatcgacagccaaagcatgtggaaaagttgcaaggcaaagctatccgtcaggtgtcatgtggtgatgatttcactgtctgtgtgactgatgagggtcagctctatgccttcggatcagattattatggctgcatgggggtggacaaagttgctggccctgaagtgctagaacccatgcagctgaacttcttcctcagcaatccagtggagcaggtctcctgtggagataatcatgtggtggttctgacacgaaacaaggaagtctattcttggggctgtggcgaatatggacgactgggtttggattcagaagaggattattatacaccacaaaaggtggatgttcccaaggccttgattattgttgcagttcaatgtggctgtgatgggacatttctgttgacccagtcaggcaaagtgctggcctgtggactcaatgaattcaataagctgggtctgaatcagtgcatgtcgggaattatcaaccatgaagcataccatgaagttccctacacaacgtcctttaccttggccaaacagttgtccttttataagatccgtaccattgccccaggcaagactcacacagctgctattgatgagcgaggccggctgctgacctttggctgcaacaagtgtgggcagctgggcgttgggaactacaagaagcgtctgggaatcaacctgttggggggaccccttggtgggaagcaagtgatcagggtctcctgcagcatggtaactcatcacgtcgagcgccgaatttagtagtagtagtagt

SEQ ID NO: 359845 - DNA, 3629 bp, Homo sapiens
tgtcgcctgagaaccggatgaggcggcgaccgtgaggccgagccgggagcgggcgtcttgccgaggcccgggcgggcggggagcaacggctacagacgccgcggggccaggtcgttgagggtcggcggcgggcgaggagcgcagggcgctcgggccgggggccgccggcgccatgggcaaccgcgggatggaagagctgatcccgctggtcaacaaactgcaggacgccttcagctccatcggccagagctgccacctggacctgccgcagatcgctgtagtgggcggccagagcgccggcaagagctcggtgctggagaacttcgtgggccgggacttccttccccgcggttcaggaatcgtcacccggcggcctctcattctgcagctcatcttctcaaaaacagaacatgccgagtttttgcactgcaagtccaaaaagtttacagactttgatgaagtccggcaggagattgaagcagagaccgacagggtcacggggaccaacaaaggcatctccccagtgcccatcaaccttcgagtctactcgccacacgtgttgaacttgaccctcatcgacctcccgggtatcaccaaggtgcctgtgggcgaccagcctccagacatcgagtaccagatcaaggacatgatcctgcagttcatcagccgggagagcagcctcattctggctgtcacgcccgccaacatggacctggccaactccgacgccctcaagctggccaaggaagtcgatccccaaggcctacggaccatcggtgtcatcaccaagcttgacctgatggacgagggcaccgacgccagggacgtcttggagaacaagttgctcccgttgagaagaggctacattggcgtggtgaaccgcagccagaaggatattgagggcaagaaggacatccgtgcagcactggcagctgagaggaagttcttcctctcccacccggcctaccggcacatggccgaccgcatgggcacgccacatctgcagaagacgctgaatcagcaactgaccaaccacatccgggagtcgctgccggccctacgtagcaaactacagagccagctgctgtccctggagaaggaggtggaggagtacaagaactttcggcccgacgaccccacccgcaaaaccaaagccctgctgcagatggtccagcagtttggggtggattttgagaagaggatcgagggctcaggagatcaggtggacactctggagctctccgggggcgcccgaatcaatcgcatcttccacgagcggttcccatttgagctggtgaagatggagtttgacgagaaggacttacgacgggagatcagctatgccattaagaacatccatggagtcaggaccgggcttttcaccccggacttggcattcgaggccattgtgaaaaagcaggtcgtcaagctgaaagagccctgtctgaaatgtgtcgacctggttatccaggagctaatcaatacagttaggcagtgtaccagtaagctcagttcctacccccggttgcgagaggagacagagcgaatcgtcaccacttacatccgggaacgggaggggagaacgaaggaccagattcttctgctgatcgacattgagcagtcctacatcaacacgaaccatgaggacttcatcgggtttgccaatgcccagcagaggagcacgcagctgaacaagaagagagccatccccaatcaggtgatccgcaggggctggctgaccatcaacaacatcagcctgatgaaaggcggctccaaggagtactggtttgtgctgactgccgagtcactgtcctggtacaaggatgaggaggagaaagagaagaagtacatgctgcctctggacaacctcaagatccgtgatgtggagaagggcttcatgtccaacaagcacgtcttcgccatcttcaacacggagcagagaaacgtctacaaggacctgcggcagatcgagctggcctgtgactcccaggaagacgtggacagctggaaggcctcgttcctccgagctggcgtctaccccgagaaggaccaggcagaaaacgaggatggggcccaggagaacaccttctccatggacccccaactggagcggcaggtggagaccattcgcaacctggtggactcatacgtggccatcatcaacaagtccatccgcgacctcatgccaaagaccatcatgcacctcatgatcaacaatacgaaggccttcatccaccacgagctgctggcctacctatactcctcggcagaccagagcagcctcatggaggagtcggctgaccaggcacagcggcgggacgacatgctgcgcatgtaccatgccctcaaggaggcgctcaacatcatcggtgacatcagcaccagcactgtgtccacgcctgtacccccgcctgtcgatgacacctggctccagagcgccagcagccacagccccactccacagcgccgaccggtgtccagcatacacccccctggccggcccccagcagtgaggggccccactccagggccccccctgattcctgttcccgtgggggcagcagcctccttctcggcgcccccaatcccatcccggcctggaccccagagcgtgtttgccaacagtgacctcttcccagccccgcctcagatcccatctcggccagttcggatccccccagggattcccccaggagtgcccagcagaagaccccctgctgcgcccagccggcccaccattatccgcccagccgagccatccctgctcgactaggcctcgaggggggcgtgctctcgggggggcctcacgcacccgcggcgcaggagcttcagtggtctggggccctccgccgcccctatgctgggaccaggctcccagtgggcagccctggcctcttccttaacgctggccccggtccagggccggcccctgtgcctggctggacaccgcactgcgcaaaggggccctggagctccaggcagggggcgctggggtgttgcactttgggggatggagtctcagggtggcagaggggggaccagaacccttgacaccatcctgaatgaggggtccagcctgggggggactctaccaaggtcttcttgggctgggaaagcccatgtagggcaggccttctataagtgcgggcaccaagggcgcctacatccccaggccttgctggggtgcaggggtatatcaacttcccattagcaggagctccccagcggcaagcctggcccagtgggctcggtagtgcccagctggcaggcctgaggtgtacatagtccttcccggccatattaaccacacagcctgagcctggcccagcctcggctgccagaggtgcctttgctaggcccggagccgttggcccgggccggccttgccctattcctctcctcctcctcctcctgggtcccccagggtggctgggcttgggctatgtgggtggtggtggcggggggtcttgggggcctctcagctcccgcccatgcctccctgatgggtgggcccagggcggcctctctctgaggagacctcacccactcctcgctcagtttgaccactgtaagtgcctgcactctgtattctattaataaactaaaataaagggaagacgctgctggtg

SEQ ID NO: 359846 - DNA, 1436 bp, Homo sapiens
atgggaccccggcaggacgctttggccaagcagctgaaatgcctcccagtgggcagtctgtgcttgcgcgaccacagtgtccccagcgctccgggttgccagggaatttctgcttgagcccctctgttcttagtctggaaaagcccacatttgctgcttaagcttcttcgattagaaaagggagggggaaaacagtccaaacaggttggaaaacgctcgtcctagagccaggtgtcatggacatgaatgttagaggactccgcacaccttggctgtctgtctgtgcaatgacaaccccccgtggcccttctgtaactacaccccagaccgagcccacacccccaaaccccagacctctttgatccgaagcagcttccggggcaaatgcgggcgcaggctcccccatgcatggactaatcagatgactctcgtttcttctcttctctctgtctcctgtcctgcgtgtgtggcctgcactgtccctgggtgtctttctgcctcatcctgccctccgcatgacccaggacggggctcttcacccccgacatggcctttgaagccattgtgaaaaaacagattgtaaaactcaaagagccgagtttgaagtgtgttgatctcgtggtctcagagctggccacggtcataaaaaagtgtgccgagaaggtaacaggttttgttctcatctccgcatttgtccccgtcctccccctccatgtgttagtctcaacccgagcatctggaaaattcagcctcggcaggaacccccttccgcctaccagttgtcacttagagatgtcgccaccttgcattggcagatggaatggggggagtggcatcacacgtgggttgtggctgcccgtgggggcggtcagcctttgttgttgccaaacgcattgcatttactaagcagtgccctttcctggaacccctagagaaaggggtttcccagccagcaccaaaacagcaaaacacaggaaacacatcatctgtatagccctgcatgttctcacagtctaggccacctgagagtaaccattccattttccccgactcgtggacttgacccacactgcagaagatgggactcccctgtgcatgaggtctggttaagttggtgctgcagatgaagcctggggaggtgggggcatttggcgagtgtgtgccacagatacagtgatcaggagtggttctctgcaaggagttcctatcgaggctgatggcccagatacccgccttaccattctagaacagacgctactcactcacgctggcgaggcccttcagggttcctgctctcacccagtgctgggcaagaggggggtgccctgaagccctgcatggcaaacatgcccctgcttttctgctttcatgttgcctcctgcctcctgccccccggtcactggctggaaaagcagctctgctctcctgctgtctcc

SEQ ID NO: 359847 - DNA, 4248 bp, Homo sapiens
tgtcgcctgagaaccggatgaggcggcgaccgtgaggccgagccgggagcgggcgtcttgccgaggcccgggcgggcggggagcaacggctacagacgccgcggggccaggtcgttgagggtcggcggcgggcgaggagcgcagggcgctcgggccgggggccgccggcgccatgggcaaccgcgggatggaagagctgatcccgctggtcaacaaactgcaggacgccttcagctccatcggccagagctgccacctggacctgccgcagatcgctgtagtgggcggccagagcgccggcaagagctcggtgctggagaacttcgtgggccgggacttccttccccgcggttcaggaatcgtcacccggcggcctctcattctgcagctcatcttctcaaaaacagaacatgccgagtttttgcactgcaagtccaaaaagtttacagactttgatgaagtccggcaggagattgaagcagagaccgacagggtcacggggaccaacaaaggcatctccccagtgcccatcaaccttcgagtctactcgccacacgtgttgaacttgaccctcatcgacctcccgggtatcaccaaggtgcctgtgggcgaccagcctccagacatcgagtaccagatcaaggacatgatcctgcagttcatcagccgggagagcagcctcattctggctgtcacgcccgccaacatggacctggccaactccgacgccctcaagctggccaaggaagtcgatccccaaggcctacggaccatcggtgtcatcaccaagcttgacctgatggacgagggcaccgacgccagggacgtcttggagaacaagttgctcccgttgagaagaggctacattggcgtggtgaaccgcagccagaaggatattgagggcaagaaggacatccgtgcagcactggcagctgagaggaagttcttcctctcccacccggcctaccggcacatggccgaccgcatgggcacgccacatctgcagaagacgctgaatcagcaactgaccaaccacatccgggagtcgctgccggccctacgtagcaaactacagagccagctgctgtccctggagaaggaggtggaggagtacaagaactttcggcccgacgaccccacccgcaaaaccaaagccctgctgcagatggtccagcagtttggggtggattttgagaagaggatcgagggctcaggagatcaggtggacactctggagctctccgggggcgcccgaatcaatcgcatcttccacgagcggttcccatttgagctggtgaagatggagtttgacgagaaggacttacgacgggagatcagctatgccattaagaacatccatggagtcaggcaagttccacgaggagagtcaccactgttccttcctctccgtggtgcgaccccccagctaattgggtcacccacacctctgagtccctaatcgttaggccttaagagggctcttggatggttttctgtagctgcgagcccctccctgagggtctccaagggcacatgagggtggatgtgtcttagtcctgcgtccattgcaggcttcagggctgtctgcagctcctgatcaaatagggcttagttcctgcccagtcggttggtgtgaacctcatgctaaactaagaatgctcactgcagatttgcctggggaggggcggggcggcactgaatcagggttttgggaagccagcatgagtccccatcatggcttcctcgtgagcctcttgggtcccctccttattctaacaaaggtagttgctccaggtgtctgcccttccatcgccgtggggtcctcgggtcaccctgagggtttccgggcagtggactcaggcatccgaccccacacatgacacaaccttcattccttgttggggacccggccagggccaatgaaattgctgaccatgctttgtttctctctgacttatctcccctgcccccgggtctggacggtttcgaccgggcttttcaccccggacttggcattcgaggccattgtgaaaaagcaggtcgtcaagctgaaagagccctgtctgaaatgtgtcgacctggttatccaggagctaatcaatacagttaggcagtgtaccagtaagctcagttcctacccccggttgcgagaggagacagagcgaatcgtcaccacttacatccgggaacgggaggggagaacgaaggaccagattcttctgctgatcgacattgagcagtcctacatcaacacgaaccatgaggacttcatcgggtttgccaatgcccagcagaggagcacgcagctgaacaagaagagagccatccccaatcaggtgatccgcaggggctggctgaccatcaacaacatcagcctgatgaaaggcggctccaaggagtactggtttgtgctgactgccgagtcactgtcctggtacaaggatgaggaggagaaagagaagaagtacatgctgcctctggacaacctcaagatccgtgatgtggagaagggcttcatgtccaacaagcacgtcttcgccatcttcaacacggagcagagaaacgtctacaaggacctgcggcagatcgagctggcctgtgactcccaggaagacgtggacagctggaaggcctcgttcctccgagctggcgtctaccccgagaaggaccaggcagaaaacgaggatggggcccaggagaacaccttctccatggacccccaactggagcggcaggtggagaccattcgcaacctggtggactcatacgtggccatcatcaacaagtccatccgcgacctcatgccaaagaccatcatgcacctcatgatcaacaatacgaaggccttcatccaccacgagctgctggcctacctatactcctcggcagaccagagcagcctcatggaggagtcggctgaccaggcacagcggcgggacgacatgctgcgcatgtaccatgccctcaaggaggcgctcaacatcatcggtgacatcagcaccagcactgtgtccacgcctgtacccccgcctgtcgatgacacctggctccagagcgccagcagccacagccccactccacagcgccgaccggtgtccagcatacacccccctggccggcccccagcagtgaggggccccactccagggccccccctgattcctgttcccgtgggggcagcagcctccttctcggcgcccccaatcccatcccggcctggaccccagagcgtgtttgccaacagtgacctcttcccagccccgcctcagatcccatctcggccagttcggatccccccagggattcccccaggagtgcccagcagaagaccccctgctgcgcccagccggcccaccattatccgcccagccgagccatccctgctcgactaggcctcgaggggggcgtgctctcgggggggcctcacgcacccgcggcgcaggagcttcagtggtctggggccctccgccgcccctatgctgggaccaggctcccagtgggcagccctggcctcttccttaacgctggccccggtccagggccggcccctgtgcctggctggacaccgcactgcgcaaaggggccctggagctccaggcagggggcgctggggtgttgcactttgggggatggagtctcagggtggcagaggggggaccagaacccttgacaccatcctgaatgaggggtccagcctgggggggactctaccaaggtcttcttgggctgggaaagcccatgtagggcaggccttctataagtgcgggcaccaagggcgcctacatccccaggccttgctggggtgcaggggtatatcaacttcccattagcaggagctccccagcggcaagcctggcccagtgggctcggtagtgcccagctggcaggcctgaggtgtacatagtccttcccggccatattaaccacacagcctgagcctggcccagcctcggctgccagaggtgcctttgctaggcccggagccgttggcccgggccggccttgccctattcctctcctcctcctcctcctgggtcccccagggtggctgggcttgggctatgtgggtggtggtggcggggggtcttgggggcctctcagctcccgcccatgcctccctgatgggtgggcccagggcggcctctctctgaggagacctcacccactcctcgctcagtttgaccactgtaagtgcctgcactctgtattctattaataaactaaaataaagggaagacgctgctggtg

SEQ ID NO: 359848 - DNA, 4072 bp, Homo sapiens
tgtcgcctgagaaccggatgaggcggcgaccgtgaggccgagccgggagcgggcgtcttgccgaggcccgggcgggcggggagcaacggctacagacgccgcggggccaggtcgttgagggtcggcggcgggcgaggagcgcagggcgctcgggccgggggccgccggcgccatgggcaaccgcgggatggaagagctgatcccgctggtcaacaaactgcaggacgccttcagctccatcggccagagctgccacctggacctgccgcagatcgctgtagtgggcggccagagcgccggcaagagctcggtgctggagaacttcgtgggccgggacttccttccccgcggttcaggaatcgtcacccggcggcctctcattctgcagctcatcttctcaaaaacagaacatgccgagtttttgcactgcaagtccaaaaagtttacagactttgatgaagtccggcaggagattgaagcagagaccgacagggtcacggggaccaacaaaggcatctccccagtgcccatcaaccttcgagtctactcgccacacgtgttgaacttgaccctcatcgacctcccgggtatcaccaaggtgcctgtgggcgaccagcctccagacatcgagtaccagatcaaggacatgatcctgcagttcatcagccgggagagcagcctcattctggctgtcacgcccgccaacatggacctggccaactccgacgccctcaagctggccaaggaagtcgatccccaaggcctacggaccatcggtgtcatcaccaagcttgacctgatggacgagggcaccgacgccagggacgtcttggagaacaagttgctcccgttgagaagaggctacattggcgtggtgaaccgcagccagaaggatattgagggcaagaaggacatccgtgcagcactggcagctgagaggaagttcttcctctcccacccggcctaccggcacatggccgaccgcatgggcacgccacatctgcagaagacgctgaatcagcaactgaccaaccacatccgggagtcgctgccggccctacgtagcaaactacagagccagctgctgtccctggagaaggaggtggaggagtacaagaactttcggcccgacgaccccacccgcaaaaccaaagccctgctgcagatggtccagcagtttggggtggattttgagaagaggatcgagggctcaggagatcaggtggacactctggagctctccgggggcgcccgaatcaatcgcatcttccacgagcggttcccatttgagctggtgaagatggagtttgacgagaaggacttacgacgggagatcagctatgccattaagaacatccatggagtcaggaccgggcttttcaccccggacttggcattcgaggccattgtgaaaaagcaggtcgtcaagctgaaagagccctgtctgaaatgtgtcgacctggttatccaggagctaatcaatacagttaggcagtgtaccagtaagctcagttcctacccccggttgcgagaggagacagagcgaatcgtcaccacttacatccgggaacgggaggggagaacgaaggaccagattcttctgctgatcgacattgagcagtcctacatcaacacgaaccatgaggacttcatcgggtttgccaatgcccagcagaggagcacgcagctgaacaagaagagagccatccccaatcaggtgatccgcaggggctggctgaccatcaacaacatcagcctgatgaaaggcggctccaaggagtactggtttgtgctgactgccgagtcactgtcctggtacaaggatgaggaggagaaagagaagaagtacatgctgcctctggacaacctcaagatccgtgatgtggagaagggcttcatgtccaacaagcacgtcttcgccatcttcaacacggagcagagaaacgtctacaaggacctgcggcagatcgagctggcctgtgactcccaggaagacgtggacagctggaaggcctcgttcctccgagctggcgtctaccccgagaaggaccaggcagaaaacgaggatggggcccaggagaacaccttctccatggacccccaactggagcggcaggtggagaccattcgcaacctggtggactcatacgtggccatcatcaacaagtccatccgcgacctcatgccaaagaccatcatgcacctcatgatcaacaatacgaaggccttcatccaccacgagctgctggcctacctatactcctcggcagaccagagcagcctcatggaggagtcggctgaccaggcacagcggcgggacgacatgctgcgcatgtaccatgccctcaaggaggcgctcaacatcatcggtgacatcagcaccagcactgtgtccacgcctgtacccccgcctgtcgatgacacctggctccagagcgccagcagccacagccccactccacagcgccgaccggtgtccagcatacacccccctggccggcccccagcagtgaggggccccactccagggccccccctgattcctgttcccgtgggggcagcagcctccttctcggcgcccccaatcccatcccggcctggaccccagagcgtgtttgccaacagtgacctcttcccagccccgcctcagatcccatctcggccagttcggatccccccagggattcccccaggagtgcccagcagaagaccccctgctgcgcccagccggcccaccattatccgcccagccgagccatccctgctcgactaggcctcgaggggggcgtgctctcgggggggcctcacgcacccgcggcgcaggagcttcagtggtctggggccctccgccgcccctatgctgggaccaggctcccagtgggcagccctggcctcttccttaacgctggccccggtccagggccggcccctgtgcctggctggacaccgcactgcgcaaaggggccctggagctccaggcagggggcgctggggtgttgcactttgggggatggagtctcagggtggcagaggggggaccagaacccttgacaccatcctgaatgaggggtccagcctgggggggactctaccaaggtcttcttgggctgggaaagcccatgtagggcaggccttctataagtgcgggcaccaagggcgcctacatccccaggccttgctggggtgcaggggtatatcaacttcccattagcaggagctccccagcggcaagcctggcccagtgggctcggtagtgcccagctggcaggcctgaggtgtacatagtccttcccggccatattaaccacacagcctgagcctggcccagcctcggctgccagaggtgcctttgctaggcccggagccgttggcccgggccggccttgccctattcctctcctcctcctcctcctgggtcccccagggtggctgggcttgggctatgtgggtggtggtggcggggggtcttgggggcctctcagctcccgcccatgcctccctgatgggtgggcccagggcggcctctctctgaggagacctcacccactcctcgctcagtttgaccactgtaagtgcctgcactctgtattctattaataaactaaaataaagggaagacgctgctggtgaaaaaaaaaaaaaaaaaaaaaaaaaaaaaaaaaaaaaaaaaaaaaaaaaaaaaaaaaaaaaaaaagggggggggggaaaaaataaccccccggggggccccttttccgccccgttttttgtgacaggggcgcccccaaagagagcgcgtaaaaaaagcaaggcggggcgcggtgaaaacaccggccgtggcgggaccccggcctctggcactccggggaagagccccctcgtcggggggggacttcggcccccccccacaggagtacgccgaggcaataaccttcacgggtactgggacgcagcgatttcgcgcgcggacgtcgtccgattgtagatacgccatgaacaaatactcaccgccatagacccaacaccagagtccacacgtgcatacccgctcccaccacacgcacaacgctcacagatcagtagacggccacgc

SEQ ID NO: 359849 - DNA, 2446 bp, Homo sapiens
  misc_feature (7)..(7): n is a, c, g, or t
aaactanggctaggtacgaggctgggtgtaatcggccgagtggacactctggagctctccgggggcgcccgaatcaatcgcatcttccacgagcggttcccatttgagctggtgaagatggagtttgacgagaaggacttacgacgggagatcagctatgccattaagaacatccatggagtcaggaccgggcttttcaccccggacttggcattcgaggccattgtgaaaaagcaggtcgtcaagctgaaagagccctgtctgaaatgtgtcgacctggttatccaggagctaatcaatacagttaggcagtgtaccagtaagctcagttcctacccccggttgcgagaggagacagagcgaatcgtcaccacttacatccgggaacgggaggggagaacgaaggaccagattcttctgctgatcgacattgagcagtcctacatcaacacgaaccatgaggacttcatcgggtttgccaatgcccagcagaggagcacgcagctgaacaagaagagagccatccccaatcaggtgatccgcaggggctggctgaccatcaacaacatcagcctgatgaaaggcggctccaaggagtactggtttgtgctgactgccgagtcactgtcctggtacaaggatgaggaggagaaagagaagaagtacatgctgcctctggacaacctcaagatccgtgatgtggagaagggcttcatgtccaacaagcacgtcttcgccatcttcaacacggagcagagaaacgtctacaaggacctgcggcagatcgagctggcctgtgactcccaggaagacgtggacagctggaaggcctcgttcctccgagctggcgtctaccccgagaaggaccaggcagaaaacgaggatggggcccaggagaacaccttctccatggacccccaactggagcggcaggtggagaccattcgcaacctggtggactcatacgtggccatcatcaacaagtccatccgcgacctcatgccaaagaccatcatgcacctcatgatcaacaatacgaaggccttcatccaccacgagctgctggcctacctatactcctcggcagaccagagcagcctcatggaggagtcggctgaccaggcacagcggcgggacgacatgctgcgcatgtaccatgccctcaaggaggcgctcaacatcatcggtgacatcagcaccagcactgtgtccacgcctgtacccccgcctgtcgatgacacctggctccagagcgccagcagccacagccccactccacagcgccgaccggtgtccagcatacacccccctggccggcccccagcagtgaggggccccactccagggccccccctgattcctgttcccgtgggggcagcagcctccttctcggcgcccccaatcccatcccggcctggaccccagagcgtgtttgccaacagtgacctcttcccagccccgcctcagatcccatctcggccagttcggatccccccagggattcccccaggagtgcccagcagaagaccccctgctgcgcccagccggcccaccattatccgcccagccgagccatccctgctcgactaggcctcgaggggggcgtgctctcgggggggcctcacgcacccgcggcgcaggagcttcagtggtctggggccctccgccgcccctatgctgggaccaggctcccagtgggcagccctggcctcttccttaacgctggccccggtccagggccggcccctgtgcctggctggacaccgcactgcgcaaaggggccctggagctccaggcagggggcgctggggtgttgcactttgggggatggagtctcagggtggcagaggggggaccagaacccttgacaccatcctgaatgaggggtccagcctgggggggactctaccaaggtcttcttgggctgggaaagcccatgtagggcaggccttctataagtgcgggcaccaagggcgcctacatccccaggccttgctggggtgcaggggtatatcaacttcccattagcaggagctccccagcggcaagcctggcccagtgggctcggtagtgcccagctggcaggcctgaggtgtacatagtccttcccggccatattaaccacacagcctgagcctggcccagcctcggctgccagaggtgcctttgctaggcccggagccgttggcccgggccggccttgccctattcctctcctcctcctcctcctgggtcccccagggtggctgggcttgggctatgtgggtggtggtggcggggggtcttgggggcctctcagctcccgcccatgcctccctgatgggtgggcccagggcggcctctctctgaggagacctcacccactcctcgctcagtttgaccactgtaagtgcctgcactctgtattctattaataaactaaaataaagggaagacgctgctggtg

SEQ ID NO: 359850 - DNA, 3550 bp, Homo sapiens
tgtcgcctgagaaccggatgaggcggcgaccgtgaggccgagccgggagcgggcgtcttgccgaggcccgggcgggcggggagcaacggctacagacgccgcggggccaggtcgttgagggtcggcggcgggcgaggagcgcagggcgctcgggccgggggccgccggcgccatgggcaaccgcgggatggaagagctgatcccgctggtcaacaaactgcaggacgccttcagctccatcggccagagctgccacctggacctgccgcagatcgctgtagtgggcggccagagcgccggcaagagctcggtgctggagaacttcgtgggccgggacttccttccccgcggttcaggaatcgtcacccggcggcctctcattctgcagctcatcttctcaaaaacagaacatgccgagtttttgcactgcaagtccaaaaagtttacagactttgatgaagtccggcaggagattgaagcagagaccgacagggtcacggggaccaacaaaggcatctccccagtgcccatcaaccttcgagtctactcgccacacgtgttgaacttgaccctcatcgacctcccgggtatcaccaaggtgcctgtgggcgaccagcctccagacatcgagtaccagatcaaggacatgatcctgcagttcatcagccgggagagcagcctcattctggctgtcacgcccgccaacatggacctggccaactccgacgccctcaagctggccaaggaagtcgatccccaaggcctacggaccatcggtgtcatcaccaagcttgacctgatggacgagggcaccgacgccagggacgtcttggagaacaagttgctcccgttgagaagaggctacattggcgtggtgaaccgcagccagaaggatattgagggcaagaaggacatccgtgcagcactggcagctgagaggaagttcttcctctcccacccggcctaccggcacatggccgaccgcatgggcacgccacatctgcagaagacgctgaatcagcaactgaccaaccacatccgggagtcgctgccggccctacgtagcaaactacagagccagctgctgtccctggagaaggaggtggaggagtacaagaactttcggcccgacgaccccacccgcaaaaccaaagccctgctgcagatggtccagcagtttggggtggattttgagaagaggatcgagggctcaggagatcaggtggacactctggagctctccgggggcgcccgaatcaatcgcatcttccacgagcggttcccatttgagctggtgaagatggagtttgacgagaaggacttacgacgggagatcagctatgccattaagaacatccatggagtcaggaccgggcttttcaccccggacttggcattcgaggccattgtgaaaaagcaggtcgtcaagctgaaagagccctgtctgaaatgtgtcgacctggttatccaggagctaatcaatacagttaggcagtgtaccagtaagctcagttcctacccccggttgcgagaggagacagagcgaatcgtcaccacttacatccgggaacgggaggggagaacgaaggaccagattcttctgctgatcgacattgagcagtcctacatcaacacgaaccatgaggacttcatcgggtttgccaatgcccagcagaggagcacgcagctgaacaagaagagagccatccccaatcaggtgatccgcaggggctggctgaccatcaacaacatcagcctgatgaaaggcggctccaaggagtactggtttgtgctgactgccgagtcactgtcctggtacaaggatgaggaggagaaagagaagaagtacatgctgcctctggacaacctcaagatccgtgatgtggagaagggcttcatgtccaacaagcacgtcttcgccatcttcaacacggagcagagaaacgtctacaaggacctgcggcagatcgagctggcctgtgactcccaggaagacgtggacagctggaaggcctcgttcctccgagctggcgtctaccccgagaaggaccaggcagaaaacgaggatggggcccaggagaacaccttctccatggacccccaactggagcggcaggtggagaccattcgcaacctggtggactcatacgtggccatcatcaacaagtccatccgcgacctcatgccaaagaccatcatgcacctcatgatcaacaatacgaaggccttcatccaccacgagctgctggcctacctatactcctcggcagaccagagcagcctcatggaggagtcggctgaccaggcacagcggcgggacgacatgctgcgcatgtaccatgccctcaaggaggcgctcaacatcatcggtgacatcagcaccagcactgtgtccacgcctgtacccccgcctgtcgatgacacctggctccagagcgccagcagccacagccccactccacagcgccgaccggtgtccagcatacacccccctggccggcccccagcagtgaggggccccactccagggccccccctgattcctgttcccgtgggggcagcagcctccttctcggcgcccccaatcccatcccggcctggaccccagagcgtgtttgccaacagtgacctcttcccagccccgcctcagatcccatctcggccagttcggatccccccagggattcccccaggagtgcccagcagaagaccccctgctgcgcccagccggcccaccattatccgcccagccgagccatccctgctcgactaggcctcgaggggggcgtgctctcgggggggcctcacgcacccgcggcgcaggagcttcagtggtctggggccctccgccgcccctatgctgggaccaggctcccagtgggcagccctggcctcttccttaacgctggccccggtccagggccggcccctgtgcctggctggacaccgcactgcgcaaaggggccctggagctccaggcagggggcgctggggtgttgcactttgggggatggagtctcagggtggcagaggggggaccagaacccttgacaccatcctgaatgaggggtccagcctgggggggactctaccaaggtcttcttgggctgggaaagcccatgtagggcaggccttctataagtgcgggcaccaagggcgcctacatccccaggccttgctggggtgcaggggtatatcaacttcccattagcaggagctccccagcggcaagcctggcccagtgggctcggtagtgcccagctggcaggcctgaggtgtacatagtccttcccggccatattaaccacacagcctgagcctggcccagcctcggctgccagaggtgcctttgctaggcccggagccgttggcccgggccggccttgccctattcctctcctccctcccgcccatgcctccctgatgggtgggcccagggcggcctctctctgaggagacctcacccactcctcgctcagtttgaccactgtaagtgcctgcactctgtattctattaataaactaaaataaagggaagacgctgctggtg

SEQ ID NO: 359851 - DNA, 3484 bp, Homo sapiens
tgtcgcctgagaaccggatgaggcggcgaccgtgaggccgagccgggagcgggcgtcttgccgaggcccgggcgggcggggagcaacggctacagacgccgcggggccaggtcgttgagggtcggcggcgggcgaggagcgcagggcgctcgggccgggggccgccggcgccatgggcaaccgcgggatggaagagctgatcccgctggtcaacaaactgcaggacgccttcagctccatcggccagagctgccacctggacctgccgcagatcgctgtagtgggcggccagagcgccggcaagagctcggtgctggagaacttcgtgggccgggacttccttccccgcggttcaggaatcgtcacccggcggcctctcattctgcagctcatcttctcaaaaacagaacatgccgagtttttgcactgcaagtccaaaaagtttacagactttgatgaagtccggcaggagattgaagcagagaccgacagggtcacggggaccaacaaaggcatctccccagtgcccatcaaccttcgagtctactcgccacacgtgttgaacttgaccctcatcgacctcccgggtatcaccaaggtgcctgtgggcgaccagcctccagacatcgagtaccagatcaaggacatgatcctgcagttcatcagccgggagagcagcctcattctggctgtcacgcccgccaacatggacctggccaactccgacgccctcaagctggccaaggaagtcgatccccaaggcctacggaccatcggtgtcatcaccaagcttgacctgatggacgagggcaccgacgccagggacgtcttggagaacaagttgctcccgttgagaagaggctacattggcgtggtgaaccgcagccagaaggatattgagggcaagaaggacatccgtgcagcactggcagctgagaggaagttcttcctctcccacccggcctaccggcacatggccgaccgcatgggcacgccacatctgcagaagacgctgaatcagcaactgaccaaccacatccgggagtcgctgccggccctacgtagcaaactacagagccagctgctgtccctggagaaggaggtggaggagtacaagaactttcggcccgacgaccccacccgcaaaaccaaagccctgctgcagatggtccagcagtttggggtggattttgagaagaggatcgagggctcaggagatcaggtggacactctggagctctccgggggcgcccgaatcaatcgcatcttccacgagcggttcccatttgagctggtgaagatggagtttgacgagaaggacttacgacgggagatcagctatgccattaagaacatccatggagtcaggaccgggcttttcaccccggacttggcattcgaggccattgtgaaaaagcaggtcgtcaagctgaaagagccctgtctgaaatgtgtcgacctggttatccaggagctaatcaatacagttaggcagtgtaccagtaagctcagttcctacccccggttgcgagaggagacagagcgaatcgtcaccacttacatccgggaacgggaggggagaacgaaggaccagattcttctgctgatcgacattgagcagtcctacatcaacacgaaccatgaggacttcatcgggtttgccaatgcccagcagaggagcacgcagctgaacaagaagagagccatccccaatcaggtgatccgcaggggctggctgaccatcaacaacatcagcctgatgaaaggcggctccaaggagtactggtttgtgctgactgccgagtcactgtcctggtacaaggatgaggaggagaaagagaagaagtacatgctgcctctggacaacctcaagatccgtgatgtggagaagggcttcatgtccaacaagcacgtcttcgccatcttcaacacggagcagagaaacgtctacaaggacctgcggcagatcgagctggcctgtgactcccaggaagacgtggacagctggaaggcctcgttcctccgagctggcgtctaccccgagaaggaccaggcagaaaacgaggatggggcccaggagaacaccttctccatggacccccaactggagcggcaggtggagaccattcgcaacctggtggactcatacgtggccatcatcaacaagtccatccgcgacctcatgccaaagaccatcatgcacctcatgatcaacaatacgaaggccttcatccaccacgagctgctggcctacctatactcctcggcagaccagagcagcctcatggaggagtcggctgaccaggcacagcggcgggacgacatgctgcgcatgtaccatgccctcaaggaggcgctcaacatcatcggtgacatcagcaccagcactgtgtccacgcctgtacccccgcctgtcgatgacacctggctccagagcgccagcagccacagccccactccacagcgccgaccggtgtccagcatacacccccctggccggcccccagcagtgaggggccccactccagggccccccctgattcctgttcccgtgggggcagcagcctccttctcggcgcccccaatcccatcccggcctggaccccagagcgtgtttgccaacagtgacctcttcccagccccgcctcagatcccatctcggccagttcggatccccccagggattcccccaggagtgcccagcagaagaccccctgctgcgcccagccggcccaccattatccgcccagccgagccatccctgctcgactaggcctcgaggggggcgtgctctcgggggggcctcacgcacccgcggcgcaggagcttcagtggtctggggccctccgccgcccctatgctgggaccaggctcccagtgggcagccctggcctcttccttaacgctggccccggtccagggccggcccctgtgcctggctggacaccgcactgcgcaaaggggccctggagctccaggcagggggcgctggggtgttgcactttgggggatggagtctcagggtggcagaggggggaccagaacccttgacaccatcctgaatgaggggtccagcctgggggggactctaccaaggtcttcttgggctgggaaagcccatgtagggcaggccttctataagtgcgggcaccaagggcgcctacatccccaggccttgctggggtgcaggggtatatcaacttcccattagcaggagctccccagcggcaagcctggcccagtgggctcggtagtgcccagctggcaggcctgaggtgtacatagtccttcccggctatgtgggtggtggtggcggggggtcttgggggcctctcagctcccgcccatgcctccctgatgggtgggcccagggcggcctctctctgaggagacctcacccactcctcgctcagtttgaccactgtaagtgcctgcactctgtattctattaataaactaaaataaagggaagacgctgctggtg

SEQ ID NO: 359852 - DNA, 2947 bp, Homo sapiens
tgtcgcctgagaaccggatgaggcggcgaccgtgaggccgagccgggagcgggcgtcttgccgaggcccgggcgggcggggagcaacggctacagacgccgcggggccaggtcgttgagggtcggcggcgggcgaggagcgcagggcgctcgggccgggggccgccggcgccatgggcaaccgcgggatggaagagctgatcccgctggtcaacaaactgcaggacgccttcagctccatcggccagagctgccacctggacctgccgcagatcgctgtagtgggcggccagagcgccggcaagagctcggtgctggagaacttcgtgggccgggacttccttccccgcggttcaggaatcgtcacccggcggcctctcattctgcagctcatcttctcaaaaacagaacatgccgagtttttgcactgcaagtccaaaaagtttacagactttgatgaagtccggcaggagattgaagcagagaccgacagggtcacggggaccaacaaaggcatctccccagtgcccatcaaccttcgagtctactcgccacacgtgttgaacttgaccctcatcgacctcccgggtatcaccaaggtgcctgtgggcgaccagcctccagacatcgagtaccagatcaaggacatgatcctgcagttcatcagccgggagagcagcctcattctggctgtcacgcccgccaacatggacctggccaactccgacgccctcaagctggccaaggaagtcgatccccaaggcctacggaccatcggtgtcatcaccaagcttgacctgatggacgagggcaccgacgccagggacgtcttggagaacaagttgctcccgttgagaagaggctacattggcgtggtgaaccgcagccagaaggatattgagggcaagaaggacatccgtgcagcactggcagctgagaggaagttcttcctctcccacccggcctaccggcacatggccgaccgcatgggcacgccacatctgcagaagacgctgaatcagcaactgaccaaccacatccgggagtcgctgccggccctacgtagcaaactacagagccagctgctgtccctggagaaggaggtggaggagtacaagaactttcggcccgacgaccccacccgcaaaaccaaagccctgctgcagatggtccagcagtttggggtggattttgagaagaggatcgagggctcaggagatcaggtggacactctggagctctccgggggcgcccgaatcaatcgcatcttccacgagcggttcccatttgagctggtgaagatggagtttgacgagaaggacttacgacgggagatcagctatgccattaagaacatccatggagtcaggaccgggcttttcaccccggacttggcattcgaggccattgtgaaaaagcaggtcgtcaagctgaaagagccctgtctgaaatgtgtcgacctggttatccaggagctaatcaatacagttaggcagtgtaccagtaagctcagttcctacccccggttgcgagaggagacagagcgaatcgtcaccacttacatccgggaacgggaggggagaacgaaggaccagattcttctgctgatcgacattgagcagtcctacatcaacacgaaccatgaggacttcatcgggtttgccaatgcccagcagaggagcacgcagctgaacaagaagagagccatccccaatcaggtgatccgcaggggctggctgaccatcaacaacatcagcctgatgaaaggcggctccaaggagtactggtttgtgctgactgccgagtcactgtcctggtacaaggatgaggaggagaaagagaagaagtacatgctgcctctggacaacctcaagatccgtgatgtggagaagggcttcatgtccaacaagcacgtcttcgccatcttcaacacggagcagagaaacgtctacaaggacctgcggcagatcgagctggcctgtgactcccaggaagacgtggacagctggaaggcctcgttcctccgagctggcgtctaccccgagaaggaccaggcagaaaacgaggatggggcccaggagaacaccttctccatggacccccaactggagcggcaggtggagaccattcgcaacctggtggactcatacgtggccatcatcaacaagtccatccgcgacctcatgccaaagaccatcatgcacctcatgatcaacaatacgaaggccttcatccaccacgagctgctggcctacctatactcctcggcagaccagagcagcctcatggaggagtcggctgaccaggcacagcggcgggacgacatgctgcgcatgtaccatgccctcaaggaggcgctcaacatcatcggtgacatcagcaccagcactgtgtccacgcctgtacccccgcctgtcgatgacacctggctccagagcgccagcagccacagccccactccacagcgccgaccggtgtccagcatacacccccctggccggcccccagcagtgaggggccccactccagggccccccctgattcctgttcccgtgggggcagcagcctccttctcggcgcccccaatcccatcccggcctggaccccagagcgtgtttgccaacagtgacctcttcccagccccgcctcagatcccatctcggccagttcggatccccccagggattcccccaggagtgcccagaaagaccccccttgctggcgcccaactcgggcccaacgaattatcgcgcccaagccgagccaatcccttgctcgactagggcctcgaggggcgtggctgtgcctctccgcgcggggggccttcaacggcaccccggtgggcccgcaaggaacgctttcaaggtggcgtctgggggggcccttcgcgccggcccccttattgcttggggacccaaggggctcccccaaggttggtggcaaggccc

SEQ ID NO: 359853 - DNA, 2674 bp, Homo sapiens
gctaggtcgagcctggtttaaatcggacgagggggcacgccacatctgcagaagacgctgaatcagcaactgaccaaccacatccgggagtcgctgccggccctacgtagcaaactacagagccagctgctgtccctggagaaggaggtggaggagtacaagaactttcggcccgacgaccccacccgcaaaaccaaagccctgctgcagatggtccagcagtttggggtggattttgagaagaggatcgagggctcaggagatcaggtggacactctggagctctccgggggcgcccgaatcaatcgcatcttccacgagcggttcccatttgagctggtgaagatggagtttgacgagaaggacttacgacgggagatcagctatgccattaagaacatccatggagtcaggacggggctcttcacccccgacatggcctttgaagccattgtgaaaaaacagattgtaaaactcaaagagccgagtttgaagtgtgttgatctcgtggtctcagagctggccacggtcataaaaaagtgtgccgagaagctcagttcctacccccggttgcgagaggagacagagcgaatcgtcaccacttacatccgggaacgggaggggagaacgaaggaccagattcttctgctgatcgacattgagcagtcctacatcaacacgaaccatgaggacttcatcgggtttgccaatgcccagcagaggagcacgcagctgaacaagaagagagccatccccaatcaggtgatccgcaggggctggctgaccatcaacaacatcagcctgatgaaaggcggctccaaggagtactggtttgtgctgactgccgagtcactgtcctggtacaaggatgaggaggagaaagagaagaagtacatgctgcctctggacaacctcaagatccgtgatgtggagaagggcttcatgtccaacaagcacgtcttcgccatcttcaacacggagcagagaaacgtctacaaggacctgcggcagatcgagctggcctgtgactcccaggaagacgtggacagctggaaggcctcgttcctccgagctggcgtctaccccgagaaggaccaggcagaaaacgaggatggggcccaggagaacaccttctccatggacccccaactggagcggcaggtggagaccattcgcaacctggtggactcatacgtggccatcatcaacaagtccatccgcgacctcatgccaaagaccatcatgcacctcatgatcaacaatacgaaggccttcatccaccacgagctgctggcctacctatactcctcggcagaccagagcagcctcatggaggagtcggctgaccaggcacagcggcgggacgacatgctgcgcatgtaccatgccctcaaggaggcgctcaacatcatcggtgacatcagcaccagcactgtgtccacgcctgtacccccgcctgtcgatgacacctggctccagagcgccagcagccacagccccactccacagcgccgaccggtgtccagcatacacccccctggccggcccccagcagtgaggggccccactccagggccccccctgattcctgttcccgtgggggcagcagcctccttctcggcgcccccaatcccatcccggcctggaccccagagcgtgtttgccaacagtgacctcttcccagccccgcctcagatcccatctcggccagttcggatccccccagggattcccccaggagtgcccagcagaagaccccctgctgcgcccagccggcccaccattatccgcccagccgagccatccctgctcgactaggcctcgaggggggcgtgctctcgggggggcctcacgcacccgcggcgcaggagcttcagtggtctggggccctccgccgcccctatgctgggaccaggctcccagtgggcagccctggcctcttccttaacgctggccccggtccagggccggcccctgtgcctggctggacaccgcactgcgcaaaggggccctggagctccaggcagggggcgctggggtgttgcactttgggggatggagtctcagggtggcagaggggggaccagaacccttgacaccatcctgaatgaggggtccagcctgggggggactctaccaaggtcttcttgggctgggaaagcccatgtagggcaggccttctataagtgcgggcaccaagggcgcctacatccccaggccttgctggggtgcaggggtatatcaacttcccattagcaggagctccccagcggcaagcctggcccagtgggctcggtagtgcccagctggcaggcctgaggtgtacatagtccttcccggccatattaaccacacagcctgagcctggcccagcctcggctgccagaggtgcctttgctaggcccggagccgttggcccgggccggccttgccctattcctctcctcctcctcctcctgggtcccccagggtggctgggcttgggctatgtgggtggtggtggcggggggtcttgggggcctctcagctcccgcccatgcctccctgatgggtgggcccagggcggcctctctctgaggagacctcacccactcctcgctcagtttgaccactgtaagtgcctgcactctgtattctattaataaactaaaataaagggaagacgctgctggtg

SEQ ID NO: 359854 - DNA, 2646 bp, Homo sapiens
tctctagctgttctagagtatcccagtgcacggaatcgcaactgaccaaccacatccgggagtcgctgccggccctacgtagcaaactacagagccagctgctgtccctggagaaggaggtggaggagtacaagaactttcggcccgacgaccccacccgcaaaaccaaagccctgctgcagatggtccagcagtttggggtggattttgagaagaggatcgagggctcaggagatcaggtggacactctggagctctccgggggcgcccgaatcaatcgcatcttccacgagcggttcccatttgagctggtgaagatggagtttgacgagaaggacttacgacgggagatcagctatgccattaagaacatccatggagtcaggacggggctcttcacccccgacatggcctttgaagccattgtgaaaaaacagattgtaaaactcaaagagccgagtttgaagtgtgttgatctcgtggtctcagagctggccacggtcataaaaaagtgtgccgagaagctcagttcctacccccggttgcgagaggagacagagcgaatcgtcaccacttacatccgggaacgggaggggagaacgaaggaccagattcttctgctgatcgacattgagcagtcctacatcaacacgaaccatgaggacttcatcgggtttgccaatgcccagcagaggagcacgcagctgaacaagaagagagccatccccaatcaggtgatccgcaggggctggctgaccatcaacaacatcagcctgatgaaaggcggctccaaggagtactggtttgtgctgactgccgagtcactgtcctggtacaaggatgaggaggagaaagagaagaagtacatgctgcctctggacaacctcaagatccgtgatgtggagaagggcttcatgtccaacaagcacgtcttcgccatcttcaacacggagcagagaaacgtctacaaggacctgcggcagatcgagctggcctgtgactcccaggaagacgtggacagctggaaggcctcgttcctccgagctggcgtctaccccgagaaggaccaggcagaaaacgaggatggggcccaggagaacaccttctccatggacccccaactggagcggcaggtggagaccattcgcaacctggtggactcatacgtggccatcatcaacaagtccatccgcgacctcatgccaaagaccatcatgcacctcatgatcaacaatacgaaggccttcatccaccacgagctgctggcctacctatactcctcggcagaccagagcagcctcatggaggagtcggctgaccaggcacagcggcgggacgacatgctgcgcatgtaccatgccctcaaggaggcgctcaacatcatcggtgacatcagcaccagcactgtgtccacgcctgtacccccgcctgtcgatgacacctggctccagagcgccagcagccacagccccactccacagcgccgaccggtgtccagcatacacccccctggccggcccccagcagtgaggggccccactccagggccccccctgattcctgttcccgtgggggcagcagcctccttctcggcgcccccaatcccatcccggcctggaccccagagcgtgtttgccaacagtgacctcttcccagccccgcctcagatcccatctcggccagttcggatccccccagggattcccccaggagtgcccagcagaagaccccctgctgcgcccagccggcccaccattatccgcccagccgagccatccctgctcgactaggcctcgaggggggcgtgctctcgggggggcctcacgcacccgcggcgcaggagcttcagtggtctggggccctccgccgcccctatgctgggaccaggctcccagtgggcagccctggcctcttccttaacgctggccccggtccagggccggcccctgtgcctggctggacaccgcactgcgcaaaggggccctggagctccaggcagggggcgctggggtgttgcactttgggggatggagtctcagggtggcagaggggggaccagaacccttgacaccatcctgaatgaggggtccagcctgggggggactctaccaaggtcttcttgggctgggaaagcccatgtagggcaggccttctataagtgcgggcaccaagggcgcctacatccccaggccttgctggggtgcaggggtatatcaacttcccattagcaggagctccccagcggcaagcctggcccagtgggctcggtagtgcccagctggcaggcctgaggtgtacatagtccttcccggccatattaaccacacagcctgagcctggcccagcctcggctgccagaggtgcctttgctaggcccggagccgttggcccgggccggccttgccctattcctctcctcctcctcctcctgggtcccccagggtggctgggcttgggctatgtgggtggtggtggcggggggtcttgggggcctctcagctcccgcccatgcctccctgatgggtgggcccagggcggcctctctctgaggagacctcacccactcctcgctcagtttgaccactgtaagtgcctgcactctgtattctattaataaactaaaataaagggaagacgctgctggtg

SEQ ID NO: 359855 - DNA, 2785 bp, Homo sapiens
atgggaccccggcaggacgctttggccaagcagctgaaatgcctcccagtgggcagtctgtgcttgcgcgaccacagtgtccccagcgctccgggttgccagggaatttctgcttgagcccctctgttcttagtctggaaaagcccacatttgctgcttaagcttcttcgattagaaaagggagggggaaaacagtccaaacaggttggaaaacgctcgtcctagagccaggtgtcatggacatgaatgttagaggactccgcacaccttggctgtctgtctgtgcaatgacaaccccccgtggcccttctgtaactacaccccagaccgagcccacacccccaaaccccagacctctttgatccgaagcagcttccggggcaaatgcgggcgcaggctcccccatgcatggactaatcagatgactctcgtttcttctcttctctctgtctcctgtcctgcgtgtgtggcctgcactgtccctgggtgtctttctgcctcatcctgccctccgcatgacccaggacggggctcttcacccccgacatggcctttgaagccattgtgaaaaaacagattgtaaaactcaaagagccgagtttgaagtgtgttgatctcgtggtctcagagctggccacggtcataaaaaagtgtgccgagaagctcagttcctacccccggttgcgagaggagacagagcgaatcgtcaccacttacatccgggaacgggaggggagaacgaaggaccagattcttctgctgatcgacattgagcagtcctacatcaacacgaaccatgaggacttcatcgggtttgccaatgcccagcagaggagcacgcagctgaacaagaagagagccatccccaatcaggtgatccgcaggggctggctgaccatcaacaacatcagcctgatgaaaggcggctccaaggagtactggtttgtgctgactgccgagtcactgtcctggtacaaggatgaggaggagaaagagaagaagtacatgctgcctctggacaacctcaagatccgtgatgtggagaagggcttcatgtccaacaagcacgtcttcgccatcttcaacacggagcagagaaacgtctacaaggacctgcggcagatcgagctggcctgtgactcccaggaagacgtggacagctggaaggcctcgttcctccgagctggcgtctaccccgagaaggaccaggcagaaaacgaggatggggcccaggagaacaccttctccatggacccccaactggagcggcaggtggagaccattcgcaacctggtggactcatacgtggccatcatcaacaagtccatccgcgacctcatgccaaagaccatcatgcacctcatgatcaacaatacgaaggccttcatccaccacgagctgctggcctacctatactcctcggcagaccagagcagcctcatggaggagtcggctgaccaggcacagcggcgggacgacatgctgcgcatgtaccatgccctcaaggaggcgctcaacatcatcggtgacatcagcaccagcactgtgtccacgcctgtacccccgcctgtcgatgacacctggctccagagcgccagcagccacagccccactccacagcgccgaccggtgtccagcatacacccccctggccggcccccagcagtgaggggccccactccagggccccccctgattcctgttcccgtgggggcagcagcctccttctcggcgcccccaatcccatcccggcctggaccccagagcgtgtttgccaacagtgacctcttcccagccccgcctcagatcccatctcggccagttcggatccccccagggattcccccaggagtgcccagcagaagaccccctgctgcgcccagccggcccaccattatccgcccagccgagccatccctgctcgactaggcctcgaggggggcgtgctctcgggggggcctcacgcacccgcggcgcaggagcttcagtggtctggggccctccgccgcccctatgctgggaccaggctcccagtgggcagccctggcctcttccttaacgctggccccggtccagggccggcccctgtgcctggctggacaccgcactgcgcaaaggggccctggagctccaggcagggggcgctggggtgttgcactttgggggatggagtctcagggtggcagaggggggaccagaacccttgacaccatcctgaatgaggggtccagcctgggggggactctaccaaggtcttcttgggctgggaaagcccatgtagggcaggccttctataagtgcgggcaccaagggcgcctacatccccaggccttgctggggtgcaggggtatatcaacttcccattagcaggagctccccagcggcaagcctggcccagtgggctcggtagtgcccagctggcaggcctgaggtgtacatagtccttcccggccatattaaccacacagcctgagcctggcccagcctcggctgccagaggtgcctttgctaggcccggagccgttggcccgggccggccttgccctattcctctcctcctcctcctcctgggtcccccagggtggctgggcttgggctatgtgggtggtggtggcggggggtcttgggggcctctcagctcccgcccatgcctccctgatgggtgggcccagggcggcctctctctgaggagacctcacccactcctcgctcagtttgaccactgtaagtgcctgcactctgtattctattaataaactaaaataaagggaagacgctgctggtg

SEQ ID NO: 359856 - DNA, 2615 bp, Homo sapiens
tgtcgcctgagaaccggatgaggcggcgaccgtgaggccgagccgggagcgggcgtcttgccgaggcccgggcgggcggggagcaacggctacagacgccgcggggccaggtcgttgagggtcggcggcgggcgaggagcgcagggcgctcgggccgggggccgccggcgccatgggcaaccgcgggatggaagagctgatcccgctggtcaacaaactgcaggacgccttcagctccatcggccagagctgccacctggacctgccgcagatcgctgtagtgggcggccagagcgccggcaagagctcggtgctggagaacttcgtgggccgggacttccttccccgcggttcaggaatcgtcacccggcggcctctcattctgcagctcatcttctcaaaaacagaacatgccgagtttttgcactgcaagtccaaaaagtttacagactttgatgaagtccggcaggagattgaagcagagaccgacagggtcacggggaccaacaaaggcatctccccagtgcccatcaaccttcgagtctactcgccacacgtgttgaacttgaccctcatcgacctcccgggtatcaccaaggtgcctgtgggcgaccagcctccagacatcgagtaccagatcaaggacatgatcctgcagttcatcagccgggagagcagcctcattctggctgtcacgcccgccaacatggacctggccaactccgacgccctcaagctggccaaggaagtcgatccccaaggcctacggaccatcggtgtcatcaccaagcttgacctgatggacgagggcaccgacgccagggacgtcttggagaacaagttgctcccgttgagaagaggctacattggcgtggtgaaccgcagccagaaggatattgagggcaagaaggacatccgtgcagcactggcagctgagaggaagttcttcctctcccacccggcctaccggcacatggccgaccgcatgggcacgccacatctgcagaagacgctgaatcagcaactgaccaaccacatccgggagtcgctgccggccctacgtagcaaactacagagccagctgctgtccctggagaaggaggtggaggagtacaagaactttcggcccgacgaccccacccgcaaaaccaaagccctgctgcagatggtccagcagtttggggtggattttgagaagaggatcgagggctcaggagatcaggtggacactctggagctctccgggggcgcccgaatcaatcgcatcttccacgagcggttcccatttgagctggtgaagatggagtttgacgagaaggacttacgacgggagatcagctatgccattaagaacatccatggagtcaggaccgggcttttcaccccggacttggcattcgaggccattgtgaaaaagcaggtcgtcaagctgaaagagccctgtctgaaatgtgtcgacctggttatccaggagctaatcaatacagttaggcagtgtaccagtaagctcagttcctacccccggttgcgagaggagacagagcgaatcgtcaccacttacatccgggaacgggaggggagaacgaaggaccagattcttctgctgatcgacattgagcagtcctacatcaacacgaaccatgaggacttcatcgggtttgccaatgcccagcagaggagcacgcagctgaacaagaagagagccatccccaatcaggtgatccgcaggggctggctgaccatcaacaacatcagcctgatgaaaggcggctccaaggagtactggtttgtgctgactgccgagtcactgtcctggtacaaggatgaggaggagaaagagaagaagtacatgctgcctctggacaacctcaagatccgtgatgtggagaagggcttcatgtccaacaagcacgtcttcgccatcttcaacacggagcagagaaacgtctacaaggacctgcggcagatcgagctggcctgtgactcccaggaagacgtggacagctggaaggcctcgttcctccgagctggcgtctaccccgagaaggaccaggcagaaaacgaggatggggcccaggagaacaccttctccatggacccccaactggagcggcaggtggagaccattcgcaacctggtggactcatacgtggccatcatcaacaagtccatccgcgacctcatgccaaagaccatcatgcacctcatgatcaacaatacgaaggccttcatccaccacgagctgctggcctacctatactcctcggcagaccagagcagcctcatggaggagtcggctgaccaggcacagcggcgggacgacatgctgcgcatgtaccatgccctcaaggaggcgctcaacatcatcggtgacatcagcaccagcactgtgtccacgcctgtacccccgcctgtcgatgacacctggctccagagcgccagcagccacagacccactccacagcgccgacacggtgtccagccatacacccgccctgggacggccagcagaaagacgaggggaacacaaatcacaggggcacccaccatgataaccaagagcacagaaggaggagaaagcaagaccgacactgatctccggaagacacaacaaa

SEQ ID NO: 359857 - DNA, 2330 bp, Homo sapiens
gcggcgctactactactatataattcgcgccgtcgacggtcaatcaagactccagaccttggggacagcggccctgcctgtgactggcacattgggctgcgtggctgtgctctgttgtcccaggctctgttgcctatgagggtgtggggagtgcgacgccagcccctgttctcctgtctgggaagcctcctggttcccacgccttccctgctggcaaggccaggaaatgctcttgccgctgcccccccttgccaggcttggccttgtactcacagtgacccccgctctcccccagattcttctgctgatcgacattgagcagtcctacatcaacacgaaccatgaggacttcatcgggtttgccaatgcccagcagaggagcacgcagctgaacaagaagagagccatccccaatcaggtgatccgcaggggctggctgaccatcaacaacatcagcctgatgaaaggcggctccaaggagtactggtttgtgctgactgccgagtcactgtcctggtacaaggatgaggaggagaaagagaagaagtacatgctgcctctggacaacctcaagatccgtgatgtggagaagggcttcatgtccaacaagcacgtcttcgccatcttcaacacggagcagagaaacgtctacaaggacctgcggcagatcgagctggcctgtgactcccaggaagacgtggacagctggaaggcctcgttcctccgagctggcgtctaccccgagaaggaccaggcagaaaacgaggatggggcccaggagaacaccttctccatggacccccaactggagcggcaggtggagaccattcgcaacctggtggactcatacgtggccatcatcaacaagtccatccgcgacctcatgccaaagaccatcatgcacctcatgatcaacaatacgaaggccttcatccaccacgagctgctggcctacctatactcctcggcagaccagagcagcctcatggaggagtcggctgaccaggcacagcggcgggacgacatgctgcgcatgtaccatgccctcaaggaggcgctcaacatcatcggtgacatcagcaccagcactgtgtccacgcctgtacccccgcctgtcgatgacacctggctccagagcgccagcagccacagccccactccacagcgccgaccggtgtccagcatacacccccctggccggcccccagcagtgaggggccccactccagggccccccctgattcctgttcccgtgggggcagcagcctccttctcggcgcccccaatcccatcccggcctggaccccagagcgtgtttgccaacagtgacctcttcccagccccgcctcagatcccatctcggccagttcggatccccccagggattcccccaggagtgcccagcagaagaccccctgctgcgcccagccggcccaccattatccgcccagccgagccatccctgctcgactaggcctcgaggggggcgtgctctcgggggggcctcacgcacccgcggcgcaggagcttcagtggtctggggccctccgccgcccctatgctgggaccaggctcccagtgggcagccctggcctcttccttaacgctggccccggtccagggccggcccctgtgcctggctggacaccgcactgcgcaaaggggccctggagctccaggcagggggcgctggggtgttgcactttgggggatggagtctcagggtggcagaggggggaccagaacccttgacaccatcctgaatgaggggtccagcctgggggggactctaccaaggtcttcttgggctgggaaagcccatgtagggcaggccttctataagtgcgggcaccaagggcgcctacatccccaggccttgctggggtgcaggggtatatcaacttcccattagcaggagctccccagcggcaagcctggcccagtgggctcggtagtgcccagctggcaggcctgaggtgtacatagtccttcccggccatattaaccacacagcctgagcctggcccagcctcggctgccagaggtgcctttgctaggcccggagccgttggcccgggccggccttgccctattcctctcctcctcctcctcctgggtcccccagggtggctgggcttgggctatgtgggtggtggtggcggggggtcttgggggcctctcagctcccgcccatgcctccctgatgggtgggcccagggcggcctctctctgaggagacctcacccactcctcgctcagtttgaccactgtaagtgcctgcactctgtattctattaataaactaaaataaagggaagacgctgctggtg

SEQ ID NO: 359858 - DNA, 3333 bp, Homo sapiens
ggcctcggcctgcacggcggctgcggcggcggtagcggcagcggcggcggcggcggcggcggcggcggcggcggcggcggcggcggcggcagcggcggcggcctgggcccgggcgcacggcggcggcggcggggcctggagccggatctaagatggcagcggcggcggcggcggtggggccgggcgcgggcggcgcggggtcggcggtcccgggcggcgcggggccctgcgctaccgtgtcggtgttccccggcgcccgcctcctcaccatcggcgacgcgaacggcgagatccagcggcacgcggagcagcaggcgctgcgcctcgaggtgcgcgccggcccggactcggcgggcatcgccctctacagccatgaagatgtgtgtgtctttaagtgctcagtgtcccgagagacagagtgcagccgtgtgggcaagcagtccttcatcatcaccctgggctgcaacagcgtcctcatccagttcgccacacccaacgatttctgttccttctacaacatcctgaaaacctgccggggccacaccctggagcggtctgtgttcagcgagcggacggaggagtcttctgccgtgcagtacttccagttttatggctacctgtcccagcagcagaacatgatgcaggactacgtgcggacaggcacctaccagcgcgccatcctgcaaaaccacaccgacttcaaggacaagatcgttcttgatgttggctgtggctctgggatcctgtcgttttttgccgcccaagctggagcacggaaaatctacgcggtggaggccagcaccatggcccagcacgctgaggtcttggtgaagagtaacaacctgacggaccgcatcgtggtcatcccgggcaaggtggaggaggtgtcactccccgagcaggtggacatcatcatctcggagcccatgggctacatgctcttcaacgagcgcatgctggagagctacctccacgccaagaagtacctgaagcccagcggaaacatgtttcctaccattggtgacgtccaccttgcacccttcacggatgaacagctctacatggagcagttcaccaaggccaacttctggtaccagccatctttccatggagtggacctgtcggccctccgaggtgccgcggtggatgagtatttccggcagcctgtggtggacacatttgacatccggatcctgatggccaagtctgtcaagtacacggtgaacttcttagaagccaaagaaggagatttgcacaggatagaaatcccattcaaattccacatgctgcattcagggctggtccacggcctggctttctggtttgacgttgctttcatcggctccataatgaccgtgtggctgtccacagccccgacagagcccctgacccactggtaccaggtgcggtgcctgttccagtcaccactgttcgccaaggcaggggacacgctctcagggacatgtctgcttattgccaacaaaagacagagctacgacatcagtattgtggcccaggtggaccagaccggctccaagtccagtaacctcctggatctgaaaaaccccttctttagatacacgggcacaacgccctcacccccacccggctcccactacacatctccctcggaaaacatgtggaacacgggcagcacctacaacctcagcagcgggatggccgtggcagggatgccgaccgcctatgacttgagcagtgttattgccagtggctccagcgtgggccacaacaacctgattcctttagccaacacggggattgtcaatcacacccactcccggatgggctccataatgagcacggggattgtccaagggtcctccggcgcccagggcagtggtggtggcagcacgagtgcccactatgcagtcaacagccagttcaccatgggcggccccgccatctccatggcgtcgcccatgtccatcccgaccaacaccatgcactacgggagctaggggcccgccccgcggactgacagcaccaggaaaccaaatgatgtccctgcccgccgcccccgccgggcggctttcccccttgtactggagaagctcgaacacccggtcacagctctctttgctatgggaactgggacacttttttacacgatgttgccgccgtccccaccctaacccccacctcccggccctgagcgtgtgtcgctgccatattttacacaaaatcatgttgtgggagccctcgtcccccctcctgcccgctctaccctgacctgggcttgtcatctgctggaacaggcgccatggggcctgccagccctgcctgccaggtcccttagcacctgtccccctgcctgtctccagtgggaaggtagcctggccaggcggggcctccccttcgacgaccaggcctcggtcacaacggacgtgacatgctgctttttttaattttatttttttatgaaaagaaccagtgtcaatccgcagaccctctgtgaagccaggccggccgggccgagccagcagcccctctccctagactcagaggcgccgcggggaggggtggccccgccgaggcttcaggggccccctccccaccaaagggttcacctcacacttgaatgtacaacccaccccactgtcgggaaggcctccgtcctcggcccctgcctcttgctgctgtcctgtccccgagcccctgcaggtccccccccgcccccccactcaagagttagagcaggtggctgcaggccttgggcccggagggaaggccactgccggccacttggggcagacacagacacctcaaggatctgtcacggaaggcgtcctttttccttgtagctaacgttaggcctgagtagctcccctccatccttgtagacgctccagtccctactactgtgacggcatttccatccctcccctgcccgggaagggaccttgcagggacctctccctccaaaaaaagaaaaaaagaaaaagaaagaaaaaataaatgaggaaacgtgttgcagcacaggcagttttcttctccttctgctcccctgtttctcatacccccaaactcagatgctggagctcaggcccgccgtgtgtgcacccaggcaggagcgggcgctgtccaggctgggccgcccccttggctctccctcctgttccaggggagccataggagggaaagcaggtggcccgggggggatatgggggccccagccctgtcccaaagctccctgctcggctgcccctcgcccgcctttatataaattctctgaatcacctttgcatagaaaataaaagtgtttgctttgtaagaaaagtctggaaagtagcagaatcatctcaaggtgtcaaa

SEQ ID NO: 359859 - DNA, 2336 bp, Homo sapiens
gggagggcccctgggctcacacctttgaccctagccctctgtgtggatgctacccttggaaccttatctcacgcaaacaagtgcagttcctcagatgtcacatttcatgtgccacagccccacacacaagccccagggactcctcccatgggcccctttccatcaggcctctgtgagtctataccccatcagcccctggcccagtgagtctgtctgtccgcccacctgcccaggtggcgcctcatgttggtttcctgctggaaatgcttgggacagggtggaactgggtttcctgggctttggggctggaggtgtctctattgcggtccctggcttcccactgagctgtgggcaaggctgctgcgctgggggatggctggggcacggagcgaggttccctgctaagctgcgcgctttcccccaggtgatccgcaggggctggctgaccatcaacaacatcagcctgatgaaaggcggctccaaggagtactggtttgtgctgactgccgagtcactgtcctggtacaaggatgaggaggagaaagagaagaagtacatgctgcctctggacaacctcaagatccgtgatgtggagaagggcttcatgtccaacaagcacgtcttcgccatcttcaacacggagcagagaaacgtctacaaggacctgcggcagatcgagctggcctgtgactcccaggaagacgtggacagctggaaggcctcgttcctccgagctggcgtctaccccgagaaggaccaggcagaaaacgaggatggggcccaggagaacaccttctccatggacccccaactggagcggcaggtggagaccattcgcaacctggtggactcatacgtggccatcatcaacaagtccatccgcgacctcatgccaaagaccatcatgcacctcatgatcaacaatacgaaggccttcatccaccacgagctgctggcctacctatactcctcggcagaccagagcagcctcatggaggagtcggctgaccaggcacagcggcgggacgacatgctgcgcatgtaccatgccctcaaggaggcgctcaacatcatcggtgacatcagcaccagcactgtgtccacgcctgtacccccgcctgtcgatgacacctggctccagagcgccagcagccacagccccactccacagcgccgaccggtgtccagcatacacccccctggccggcccccagcagtgaggggccccactccagggccccccctgattcctgttcccgtgggggcagcagcctccttctcggcgcccccaatcccatcccggcctggaccccagagcgtgtttgccaacagtgacctcttcccagccccgcctcagatcccatctcggccagttcggatccccccagggattcccccaggagtgcccagcagaagaccccctgctgcgcccagccggcccaccattatccgcccagccgagccatccctgctcgactaggcctcgaggggggcgtgctctcgggggggcctcacgcacccgcggcgcaggagcttcagtggtctggggccctccgccgcccctatgctgggaccaggctcccagtgggcagccctggcctcttccttaacgctggccccggtccagggccggcccctgtgcctggctggacaccgcactgcgcaaaggggccctggagctccaggcagggggcgctggggtgttgcactttgggggatggagtctcagggtggcagaggggggaccagaacccttgacaccatcctgaatgaggggtccagcctgggggggactctaccaaggtcttcttgggctgggaaagcccatgtagggcaggccttctataagtgcgggcaccaagggcgcctacatccccaggccttgctggggtgcaggggtatatcaacttcccattagcaggagctccccagcggcaagcctggcccagtgggctcggtagtgcccagctggcaggcctgaggtgtacatagtccttcccggccatattaaccacacagcctgagcctggcccagcctcggctgccagaggtgcctttgctaggcccggagccgttggcccgggccggccttgccctattcctctcctcctcctcctcctgggtcccccagggtggctgggcttgggctatgtgggtggtggtggcggggggtcttgggggcctctcagctcccgcccatgcctccctgatgggtgggcccagggcggcctctctctgaggagacctcacccactcctcgctcagtttgaccactgtaagtgcctgcactctgtattctattaataaactaaaataaagggaagacgctgctggtg

SEQ ID NO: 359860 - DNA, 1937 bp, Homo sapiens
tccggacttgggctgtagcgatctggtgatccgcaggggctggctgaccatcaacaacatcagcctgatgaaaggcggctccaaggagtactggtttgtgctgactgccgagtcactgtcctggtacaaggatgaggaggagaaagagaagaagtacatgctgcctctggacaacctcaagatccgtgatgtggagaagggcttcatgtccaacaagcacgtcttcgccatcttcaacacggagcagagaaacgtctacaaggacctgcggcagatcgagctggcctgtgactcccaggaagacgtggacagctggaaggcctcgttcctccgagctggcgtctaccccgagaaggaccaggcagaaaacgaggatggggcccaggagaacaccttctccatggacccccaactggagcggcaggtggagaccattcgcaacctggtggactcatacgtggccatcatcaacaagtccatccgcgacctcatgccaaagaccatcatgcacctcatgatcaacaatacgaaggccttcatccaccacgagctgctggcctacctatactcctcggcagaccagagcagcctcatggaggagtcggctgaccaggcacagcggcgggacgacatgctgcgcatgtaccatgccctcaaggaggcgctcaacatcatcggtgacatcagcaccagcactgtgtccacgcctgtacccccgcctgtcgatgacacctggctccagagcgccagcagccacagccccactccacagcgccgaccggtgtccagcatacacccccctggccggcccccagcagtgaggggccccactccagggccccccctgattcctgttcccgtgggggcagcagcctccttctcggcgcccccaatcccatcccggcctggaccccagagcgtgtttgccaacagtgacctcttcccagccccgcctcagatcccatctcggccagttcggatccccccagggattcccccaggagtgcccagcagaagaccccctgctgcgcccagccggcccaccattatccgcccagccgagccatccctgctcgactaggcctcgaggggggcgtgctctcgggggggcctcacgcacccgcggcgcaggagcttcagtggtctggggccctccgccgcccctatgctgggaccaggctcccagtgggcagccctggcctcttccttaacgctggccccggtccagggccggcccctgtgcctggctggacaccgcactgcgcaaaggggccctggagctccaggcagggggcgctggggtgttgcactttgggggatggagtctcagggtggcagaggggggaccagaacccttgacaccatcctgaatgaggggtccagcctgggggggactctaccaaggtcttcttgggctgggaaagcccatgtagggcaggccttctataagtgcgggcaccaagggcgcctacatccccaggccttgctggggtgcaggggtatatcaacttcccattagcaggagctccccagcggcaagcctggcccagtgggctcggtagtgcccagctggcaggcctgaggtgtacatagtccttcccggccatattaaccacacagcctgagcctggcccagcctcggctgccagaggtgcctttgctaggcccggagccgttggcccgggccggccttgccctattcctctcctcctcctcctcctgggtcccccagggtggctgggcttgggctatgtgggtggtggtggcggggggtcttgggggcctctcagctcccgcccatgcctccctgatgggtgggcccagggcggcctctctctgaggagacctcacccactcctcgctcagtttgaccactgtaagtgcctgcactctgtattctattaataaactaaaataaagggaagacgctgctggtg

SEQ ID NO: 359861 - DNA, 3272 bp, Homo sapiens
ggcctcggcctgcacggcggctgcggcggcggtagcggcagcggcggcggcggcggcggcggcggcggcggcggcggcggcggcggcggcagcggcggcggcctgggcccgggcgcacggcggcggcggcggggcctggagccggatctaagatggcagcggcggcggcggcggtggggccgggcgcgggcggcgcggggtcggcggtcccgggcggcgcggggccctgcgctaccgtgtcggtgttccccggcgcccgcctcctcaccatcggcgacgcgaacggcgagatccagcggcacgcggagcagcaggcgctgcgcctcgaggtgcgcgccggcccggactcggcgggcatcgccctctacagccatgaagatgtgtgtgtctttaagtgctcagtgtcccgagagacagagtgcagccgtgtgggcaagcagtccttcatcatcaccctgggctgcaacagcgtcctcatccagttcgccacacccaacgatttctgttccttctacaacatcctgaaaacctgccggggccacaccctggagcggtctgtgttcagcgagcggacggaggagtcttctgccgtgcagtacttccagttttatggctacctgtcccagcagcagaacatgatgcaggactacgtgcggacaggcacctaccagcgcgccatcctgcaaaaccacaccgacttcaaggacaagatcgttcttgatgttggctgtggctctgggatcctgtcgttttttgccgcccaagctggagcacggaaaatctacgcggtggaggccagcaccatggcccagcacgctgaggtcttggtgaagagtaacaacctgacggaccgcatcgtggtcatcccgggcaaggtggaggaggtgtcactccccgagcaggtggacatcatcatctcggagcccatgggctacatgctcttcaacgagcgcatgctggagagctacctccacgccaagaagtacctgaagcccagcggaaacatgtttcctaccattggtgacgtccaccttgcacccttcacggatgaacagctctacatggagcagttcaccaaggccaacttctggtaccagccatctttccatggagtggacctgtcggccctccgaggtgccgcggtggatgagtatttccggcagcctgtggtggacacatttgacatccggatcctgatggccaagtctgtcaagtacacggtgaacttcttagaagccaaagaaggagatttgcacaggatagaaatcccattcaaattccacatgctgcattcagggctggtccacggcctggctttctggtttgacgttgctttcatcggctccataatgaccgtgtggctgtccacagccccgacagagcccctgacccactggtaccaggtgcggtgcctgttccagtcaccactgttcgccaaggcaggggacacgctctcagggacatgtctgcttattgccaacaaaagacagagctacgacatcagtattgtggcccaggtggaccagaccggctccaagtccagtaacctcctggatctgaaaaaccccttctttagatacacgggcacaacgccctcacccccacccggctcccactacacatctccctcggaaaacatgtggaacacgggcagcacctacaacctcagcagcgggatggccgtggcagggatgccgaccgcctatgacttgagcagtgttattgccagtggctccagcgtgggccacaacaacctgattcctttagccaacacggggattgtcaatcacacccactcccggatgggctccataatgagcacggggattgtccaagggtcctccggcgcccagggcagtggtggtggcagcacgagtgcccactatgcagtcaacagccagttcaccatgggcggccccgccatctccatggcgtcgcccatgtccatcccgaccaacaccatgcactacgggagctaggggcccgccccgcggactgacagcaccaggaaaccaaatgatgtccctgcccgccgcccccgccgggcggctttcccccttgtactggagaagctcgaacacccggtcacagctctctttgctatgggaactgggacacttttttacacgatgttgccgccgtccccaccctaacccccacctcccggccctgagcgtgtgtcgctgccatattttacacaaaatcatgttgtgggagccctcgtcccccctcctgcccgctctaccctgacctgggcttgtcatctgctggaacaggcgccatggggcctgccagccctgcctgccaggtcccttagcacctgtccccctgcctgtctccagtgggaaggtagcctggccaggcggggcctccccttcgacgaccaggcctcggtcacaacggacgtgacatgctgctttttttaattttatttttttatgaaaagaaccagtgtcaatccgcagaccctctgtgaagccaggccggccgggccgagccagcagcccctctccctagactcagaggcgccgcggggaggggtggccccgccgaggcttcaggggccccctccccaccaaagggttcacctcacacttgaatgtacaacccaccccactgtcgggaaggcctccgtcctcggcccctgcctcttgctgctgtcctgtccccgagcccctgcaggtccccccccgcccccccactcaagagttagagcaggtggctgcaggccttgggcccggagggaaggccactgccggccacttggggcagacacagacacctcaaggatctgtcacggaaggcgtcctttttccttgtagctaacgttaggcctgagtagctcccctccatccttgtagacgctccagtccctactactgtgacggcatttccatccctcccctgcccgggaagggaccttgcagggacctctccctccaaaaaaagaaaaaaagaaaaagaaagaaaaaataaatgaggaaacgtgttgcagcacaggcagttttcttctccttctgctcccctgtttctcatacccccgcccgccgtgtgtgcacccaggcaggagcgggcgctgtccaggctgggccgcccccttggctctccctcctgttccaggggagccataggagggaaagcaggtggcccgggggggatatgggggccccagccctgtcccaaagctccctgctcggctgcccctcgcccgcctttatataaattctctgaatcacctttgcatagaaaataaaagtgtttgctttgtaaga

SEQ ID NO: 359862 - DNA, 3328 bp, Homo sapiens
ggcctcggcctgcacggcggctgcggcggcggtagcggcagcggcggcggcggcggcggcggcggcggcggcggcggcggcggcggcggcagcggcggcggcctgggcccgggcgcacggcggcggcggcggggcctggagccggatctaagatggcagcggcggcggcggcggtggggccgggcgcgggcggcgcggggtcggcggtcccgggcggcgcggggccctgcgctaccgtgtcggtgttccccggcgcccgcctcctcaccatcggcgacgcgaacggcgagatccagcggcacgcggagcagcaggcgctgcgcctcgaggtgcgcgccggcccggactcggcgggcatcgccctctacagccatgaagatgtgtgtgtctttaagtgctcagtgtcccgagagacagagtgcagccgtgtgggcaagcagtccttcatcatcaccctgggctgcaacagcgtcctcatccagttcgccacacccaacgatttctgttccttctacaacatcctgaaaacctgccggggccacaccctggagcggtctgtgttcagcgagcggacggaggagtcttctgccgtgcagtacttccagttttatggctacctgtcccagcagcagaacatgatgcaggactacgtgcggacaggcacctaccagcgcgccatcctgcaaaaccacaccgacttcaaggacaagatcgttcttgatgttggctgtggctctgggatcctgtcgttttttgccgcccaagctggagcacggaaaatctacgcggtggaggccagcaccatggcccagcacgctgaggtcttggtgaagagtaacaacctgacggaccgcatcgtggtcatcccgggcaaggtggaggaggtgtcactccccgagcaggtggacatcatcatctcggagcccatgggctacatgctcttcaacgagcgcatgctggagagctacctccacgccaagaagtacctgaagcccagcggaaacatgtttcctaccattggtgacgtccaccttgcacccttcacggatgaacagctctacatggagcagttcaccaaggccaacttctggtaccagccatctttccatggagtggacctgtcggccctccgaggtgccgcggtggatgagtatttccggcagcctgtggtggacacatttgacatccggatcctgatggccaagtctgtcaagtacacggtgaacttcttagaagccaaagaaggagatttgcacaggatagaaatcccattcaaattccacatgctgcattcagggctggtccacggcctggctttctggtttgacgttgctttcatcggctccataatgaccgtgtggctgtccacagccccgacagagcccctgacccactggtaccaggtgcggtgcctgttccagtcaccactgttcgccaaggcaggggacacgctctcagggacatgtctgcttattgccaacaaaagacagagctacgacatcagtattgtggcccaggtggaccagaccggctccaagtccagtaacctcctggatctgaaaaaccccttctttagatacacgggcacaacgccctcacccccacccggctcccactacacatctccctcggaaaacatgtggaacacgggcagcacctacaacctcagcagcgggatggccgtggcaggtgagcagggcccaccccaatgcccagccaacccgggaggccgccctcgccgcaggcctggcccctctgcctccagccctgacgtctccctctctggacacagggatgccgaccgcctatgacttgagcagtgttattgccagtggctccagcgtgggccacaacaacctgattcctttagggtcctccggcgcccagggcagtggtggtggcagcacgagtgcccactatgcagtcaacagccagttcaccatgggcggccccgccatctccatggcgtcgcccatgtccatcccgaccaacaccatgcactacgggagctaggggcccgccccgcggactgacagcaccaggaaaccaaatgatgtccctgcccgccgcccccgccgggcggctttcccccttgtactggagaagctcgaacacccggtcacagctctctttgctatgggaactgggacacttttttacacgatgttgccgccgtccccaccctaacccccacctcccggccctgagcgtgtgtcgctgccatattttacacaaaatcatgttgtgggagccctcgtcccccctcctgcccgctctaccctgacctgggcttgtcatctgctggaacaggcgccatggggcctgccagccctgcctgccaggtcccttagcacctgtccccctgcctgtctccagtgggaaggtagcctggccaggcggggcctccccttcgacgaccaggcctcggtcacaacggacgtgacatgctgctttttttaattttatttttttatgaaaagaaccagtgtcaatccgcagaccctctgtgaagccaggccggccgggccgagccagcagcccctctccctagactcagaggcgccgcggggaggggtggccccgccgaggcttcaggggccccctccccaccaaagggttcacctcacacttgaatgtacaacccaccccactgtcgggaaggcctccgtcctcggcccctgcctcttgctgctgtcctgtccccgagcccctgcaggtccccccccgcccccccactcaagagttagagcaggtggctgcaggccttgggcccggagggaaggccactgccggccacttggggcagacacagacacctcaaggatctgtcacggaaggcgtcctttttccttgtagctaacgttaggcctgagtagctcccctccatccttgtagacgctccagtccctactactgtgacggcatttccatccctcccctgcccgggaagggaccttgcagggacctctccctccaaaaaaagaaaaaaagaaaaagaaagaaaaaataaatgaggaaacgtgttgcagcacaggcagttttcttctccttctgctcccctgtttctcatacccccaaactcagatgctggagctcaggcccgccgtgtgtgcacccaggcaggagcgggcgctgtccaggctgggccgcccccttggctctccctcctgttccaggggagccataggagggaaagcaggtggcccgggggggatatgggggccccagccctgtcccaaagctccctgctcggctgcccctcgcccgcctttatataaattctctgaatcacctttgcatagaaaataaaagtgtttgctttgtaaga

SEQ ID NO: 359863 - DNA, 3179 bp, Homo sapiens
ggcctcggcctgcacggcggctgcggcggcggtagcggcagcggcggcggcggcggcggcggcggcggcggcggcggcggcggcggcggcagcggcggcggcctgggcccgggcgcacggcggcggcggcggggcctggagccggatctaagatggcagcggcggcggcggcggtggggccgggcgcgggcggcgcggggtcggcggtcccgggcggcgcggggccctgcgctaccgtgtcggtgttccccggcgcccgcctcctcaccatcggcgacgcgaacggcgagatccagcggcacgcggagcagcaggcgctgcgcctcgaggtgcgcgccggcccggactcggcgggcatcgccctctacagccatgaagatgtgtgtgtctttaagtgctcagtgtcccgagagacagagtgcagccgtgtgggcaagcagtccttcatcatcaccctgggctgcaacagcgtcctcatccagttcgccacacccaacgatttctgttccttctacaacatcctgaaaacctgccggggccacaccctggagcggtctgtgttcagcgagcggacggaggagtcttctgccgtgcagtacttccagttttatggctacctgtcccagcagcagaacatgatgcaggactacgtgcggacaggcacctaccagcgcgccatcctgcaaaaccacaccgacttcaaggacaagatcgttcttgatgttggctgtggctctgggatcctgtcgttttttgccgcccaagctggagcacggaaaatctacgcggtggaggccagcaccatggcccagcacgctgaggtcttggtgaagagtaacaacctgacggaccgcatcgtggtcatcccgggcaaggtggaggaggtgtcactccccgagcaggtggacatcatcatctcggagcccatgggctacatgctcttcaacgagcgcatgctggagagctacctccacgccaagaagtacctgaagcccagcggaaacatgtttcctaccattggtgacgtccaccttgcacccttcacggatgaacagctctacatggagcagttcaccaaggccaacttctggtaccagccatctttccatggagtggacctgtcggccctccgaggtgccgcggtggatgagtatttccggcagcctgtggtggacacatttgacatccggatcctgatggccaagtctgtcaagtacacggtgaacttcttagaagccaaagaaggagatttgcacaggatagaaatcccattcaaattccacatgctgcattcagggctggtccacggcctggctttctggtttgacgttgctttcatcggctccataatgaccgtgtggctgtccacagccccgacagagcccctgacccactggtaccaggtgcggtgcctgttccagtcaccactgttcgccaaggcaggggacacgctctcagggacatgtctgcttattgccaacaaaagacagagctacgacatcagtattgtggcccaggtggaccagaccggctccaagtccagtaacctcctggatctgaaaaaccccttctttagatacacgggcacaacgccctcacccccacccggctcccactacacatctccctcggaaaacatgtggaacacgggcagcacctacaacctcagcagcgggatggccgtggcagggatgccgaccgcctatgacttgagcagtgttattgccagtggctccagcgtgggccacaacaacctgattcctttagggtcctccggcgcccagggcagtggtggtggcagcacgagtgcccactatgcagtcaacagccagttcaccatgggcggccccgccatctccatggcgtcgcccatgtccatcccgaccaacaccatgcactacgggagctaggggcccgccccgcggactgacagcaccaggaaaccaaatgatgtccctgcccgccgcccccgccgggcggctttcccccttgtactggagaagctcgaacacccggtcacagctctctttgctatgggaactgggacacttttttacacgatgttgccgccgtccccaccctaacccccacctcccggccctgagcgtgtgtcgctgccatattttacacaaaatcatgttgtgggagccctcgtcccccctcctgcccgctctaccctgacctgggcttgtcatctgctggaacaggcgccatggggcctgccagccctgcctgccaggtcccttagcacctgtccccctgcctgtctccagtgggaaggtagcctggccaggcggggcctccccttcgacgaccaggcctcggtcacaacggacgtgacatgctgctttttttaattttatttttttatgaaaagaaccagtgtcaatccgcagaccctctgtgaagccaggccggccgggccgagccagcagcccctctccctagactcagaggcgccgcggggaggggtggccccgccgaggcttcaggggccccctccccaccaaagggttcacctcacacttgaatgtacaacccaccccactgtcgggaaggcctccgtcctcggcccctgcctcttgctgctgtcctgtccccgagcccctgcaggtccccccccgcccccccactcaagagttagagcaggtggctgcaggccttgggcccggagggaaggccactgccggccacttggggcagacacagacacctcaaggatctgtcacggaaggcatccttgtagacgctccagtccctactactgtgacggcatttccatccctcccctgcccgggaagggaccttgcagggacctctccctccaaaaaaagaaaaaaagaaaaagaaagaaaaaataaatgaggaaacgtgttgcagcacaggcagttttcttctccttctgctcccctgtttctcatacccccaaactcagatgctggagctcaggcccgccgtgtgtgcacccaggcaggagcgggcgctgtccaggctgggccgcccccttggctctccctcctgttccaggggagccataggagggaaagcaggtggcccgggggggatatgggggccccagccctgtcccaaagctccctgctcggctgcccctcgcccgcctttatataaattctctgaatcacctttgcatagaaaataaaagtgtttgctttgtaaga

SEQ ID NO: 359864 - DNA, 2869 bp, Homo sapiens
ggcctcggcctgcacggcggctgcggcggcggtagcggcagcggcggcggcggcggcggcggcggcggcggcggcggcggcggcggcggcagcggcggcggcctgggcccgggcgcacggcggcggcggcggggcctggagccggatctaagatggcagcggcggcggcggcggtggggccgggcgcgggcggcgcggggtcggcggtcccgggcggcgcggggccctgcgctaccgtgtcggtgttccccggcgcccgcctcctcaccatcggcgacgcgaacggcgagatccagcggcacgcggagcagcaggcgctgcgcctcgaggtgcgcgccggcccggactcggcgggcatcgccctctacagccatgaagatgtgtgtgtctttaagtgctcagtgtcccgagagacagagtgcagccgtgtgggcaagcagtccttcatcatcaccctgggctgcaacagcgtcctcatccagttcgccacacccaacgatttctgttccttctacaacatcctgaaaacctgccggggccacaccctggagcggtctgtgttcagcgagcggacggaggagtcttctgccgtgcagtacttccagttttatggctacctgtcccagcagcagaacatgatgcaggactacgtgcggacaggcacctaccagcgcgccatcctgcaaaaccacaccgacttcaaggacaagatcgttcttgatgttggctgtggctctgggatcctgtcgttttttgccgcccaagctggagcacggaaaatctacgcggtggaggccagcaccatggcccagcacgctgaggtcttggtgaagagtaacaacctgacggaccgcatcgtggtcatcccgggcaaggtggaggaggtgtcactccccgagcaggtggacatcatcatctcggagcccatgggctacatgctcttcaacgagcgcatgctggagagctacctccacgccaagaagtacctgaagcccagcggaaacatgtttcctaccattggtgacgtccaccttgcacccttcacggatgaacagctctacatggagcagttcaccaaggccaacttctggtaccagccatctttccatggagtggacctgtcggccctccgaggtgccgcggtggatgagtatttccggcagcctgtggtggacacatttgacatccggatcctgatggccaagtctgtcaagtacacggtgaacttcttagaagccaaagaaggagatttgcacaggatagaaatcccattcaaattccacatgctgcattcagggctggtccacggcctggctttctggtttgacgttgctttcatcggctccataatgaccgtgtggctgtccacagccccgacagagcccctgacccactggtaccaggtgcggtgcctgttccagtcaccactgttcgccaaggcaggggacacgctctcagggacatgtctgcttattgccaacaaaagacagagctacgacatcagtattgtggcccaggtggaccagaccggctccaagtccagtaacctcctggatctgaaaaaccccttctttagatacacgggcacaacgccctcacccccacccggctcccactacacatctccctcggaaaacatgtggaacacgggcagcacctacaacctcagcagcgggatggccgtggcagggatgccgaccgcctatgacttgagcagtgttattgccagtggctccagcgtgggccacaacaacctgattcctttagggtcctccggcgcccagggcagtggtggtggcagcacgagtgcccactatgcagtcaacagccagttcaccatgggcggccccgccatctccatggcgtcgcccatgtccatcccgaccaacaccatgcactacgggagctaggggcccgccccgcggactgacagcaccaggaaaccaaatgatgtccctgcccgccgcccccgccgggcggctttcccccttgtactggagaagctcgaacacccggtcacagctctctttgctatgggaactgggacacttttttacacgatgttgccgccgtccccaccctaacccccacctcccggccctgagcgtgtgtcgctgccatattttacacaaaatcatgttgtgggagccctcgtcccccctcctgcccgctctaccctgacctgggcttgtcatctgctggaacaggcgccatggggcctgccagccctgcctgccaggtcccttagcacctgtccccctgcctgtctccagtgggaaggtagcctggccaggcggggcctccccttgggcccggagggaaggccactgccggccacttggggcagacacagacacctcaaggatctgtcacggaaggcgtcctttttccttgtagctaacgttaggcctgagtagctcccctccatccttgtagacgctccagtccctactactgtgacggcatttccatccctcccctgcccgggaagggaccttgcagggacctctccctccaaaaaaagaaaaaaagaaaaagaaagaaaaaataaatgaggaaacgtgttgcagcacaggcagttttcttctccttctgctcccctgtttctcatacccccaaactcagatgctggagctcaggcccgccgtgtgtgcacccaggcaggagcgggcgctgtccaggctgggccgcccccttggctctccctcctgttccaggggagccataggagggaaagcaggtggcccgggggggatatgggggccccagccctgtcccaaagctccctgctcggctgcccctcgcccgcctttatataaattctctgaatcacctttgcatagaaaataaaagtgtttgctttgtaaga

SEQ ID NO: 359865 - DNA, 2429 bp, Homo sapiens
tgtcgcctgagaaccggatgaggcggcgaccgtgaggccgagccgggagcgggcgtcttgccgaggcccgggcgggcggggagcaacggctacagacgccgcggggccaggtcgttgagggtcggcggcgggcgaggagcgcagggcgctcgggccgggggccgccggcgccatgggcaaccgcgggatggaagagctgatcccgctggtcaacaaactgcaggacgccttcagctccatcggccagagctgccacctggacctgccgcagatcgctgtagtgggcggccagagcgccggcaagagctcggtgctggagaacttcgtgggccgggacttccttccccgcggttcaggaatcgtcacccggcggcctctcattctgcagctcatcttctcaaaaacagaacatgccgagtttttgcactgcaagtccaaaaagtttacagactttgatgaagtccggcaggagattgaagcagagaccgacagggtcacggggaccaacaaaggcatctccccagtgcccatcaaccttcgagtctactcgccacacgtgttgaacttgaccctcatcgacctcccgggtatcaccaaggtgcctgtgggcgaccagcctccagacatcgagtaccagatcaaggacatgatcctgcagttcatcagccgggagagcagcctcattctggctgtcacgcccgccaacatggacctggccaactccgacgccctcaagctggccaaggaagtcgatccccaaggcctacggaccatcggtgtcatcaccaagcttgacctgatggacgagggcaccgacgccagggacgtcttggagaacaagttgctcccgttgagaagaggctacattggcgtggtgaaccgcagccagaaggatattgagggcaagaaggacatccgtgcagcactggcagctgagaggaagttcttcctctcccacccggcctaccggcacatggccgaccgcatgggcacgccacatctgcagaagacgctgaatcagcaactgaccaaccacatccgggagtcgctgccggccctacgtagcaaactacagagccagctgctgtccctggagaaggaggtggaggagtacaagaactttcggcccgacgaccccacccgcaaaaccaaagccctgctgcagatggtccagcagtttggggtggattttgagaagaggatcgagggctcaggagatcaggtggacactctggagctctccgggggcgcccgaatcaatcgcatcttccacgagcggttcccatttgagctggtgaagatggagtttgacgagaaggacttacgacgggagatcagctatgccattaagaacatccatggagtcaggaccgggcttttcaccccggacttggcattcgaggccattgtgaaaaagcaggtcgtcaagctgaaagagccctgtctgaaatgtgtcgacctggttatccaggagctaatcaatacagttaggcagtgtaccagtaagctcagttcctacccccggttgcgagaggagacagagcgaatcgtcaccacttacatccgggaacgggaggggagaacgaaggaccagattcttctgctgatcgacattgagcagtcctacatcaacacgaaccatgaggacttcatcgggtttgccaatgcccagcagaggagcacgcagctgaacaagaagagagccatccccaatcaggtgatccgcaggggctggctgaccatcaacaacatcagcctgatgaaaggcggctccaaggagtactggtttgtgctgactgccgagtcactgtcctggtacaaggatgaggaggagaaagagaagaagtacatgctgcctctggacaacctcaagatccgtgatgtggagaagggcttcatgtccaacaagcacgtcttcgccatcttcaacacggagcagagaaacgtctacaaggacctgcggcagatcgagctggcctgtgactcccaggaagacgtggacagctggaaggcctcgttcctccgagctggcgtctaccccgagaaggaccaggcagaaaacgaggatggggcccaggagaacaccttctccatggacccccaactggagcggcaggtggagaccattcgcaacctggtggactcatacgtggccatcatcaacaagtccatccgcgacctcatgccaaagaccatcatgcacctcatgatcaacaatacgaaggccttctcctaggatcccagtggcatttatcagtggccagctacctgccaggcccgggctggggcacggtctgcggccatgaggccaggccgcctcccgcacccctaccccgtggcagcagcatacctctgcatttctggaatgtgtgtgcatcaatgatgtttgtatatttgaggcatttaaaaatctattttcgttacgagga

SEQ ID NO: 359866 - DNA, 2146 bp, Homo sapiens
ggcctcggcctgcacggcggctgcggcggcggtagcggcagcggcggcggcggcggcggcggcggcggcggcggcggcggcggcggcggcagcggcggcggcctgggcccgggcgcacggcggcggcggcggggcctggagccggatctaagatggcagcggcggcggcggcggtggggccgggcgcgggcggcgcggggtcggcggtcccgggcggcgcggggccctgcgctaccgtgtcggtgttccccggcgcccgcctcctcaccatcggcgacgcgaacggcgagatccagcggcacgcggagcagcaggcgctgcgcctcgaggtgcgcgccggcccggactcggcgggcatcgccctctacagccatgaagatgtgtgtgtctttaagtgctcagtgtcccgagagacagagtgcagccgtgtgggcaagcagtccttcatcatcaccctgggctgcaacagcgtcctcatccagttcgccacacccaacgatttctgttccttctacaacatcctgaaaacctgccggggccacaccctggagcggtctgtgttcagcgagcggacggaggagtcttctgccgtgcagtacttccagttttatggctacctgtcccagcagcagaacatgatgcaggactacgtgcggacaggcacctaccagcgcgccatcctgcaaaaccacaccgacttcaaggacaagatcgttcttgatgttggctgtggctctgggatcctgtcgttttttgccgcccaagctggagcacggaaaatctacgcggtggaggccagcaccatggcccagcacgctgaggtcttggtgaagagtaacaacctgacggaccgcatcgtggtcatcccgggcaaggtggaggaggtgtcactccccgagcaggtggacatcatcatctcggagcccatgggctacatgctcttcaacgagcgcatgctggagagctacctccacgccaagaagtacctgaagcccagcggaaacatgtttcctaccattggtgacgtccaccttgcacccttcacggatgaacagctctacatggagcagttcaccaaggccaacttctggtaccagccatctttccatggagtggacctgtcggccctccgaggtgccgcggtggatgagtatttccggcagcctgtggtggacacatttgacatccggatcctgatggccaagtctgtcaagtacacggtgaacttcttagaagccaaagaaggagatttgcacaggatagaaatcccattcaaattccacatgctgcattcagggctggtccacggcctggctttctggtttgacgttgctttcatcggctccataatgaccgtgtggctgtccacagccccgacagagcccctgacccactggtaccaggtgcggtgcctgttccagtcaccactgttcgccaaggcaggggacacgctctcagggacatgtctgcttattgccaacaaaagacagagctacgacatcagtattgtggcccaggtggaccagaccggctccaagtccagtaacctcctggatctgaaaaaccccttctttagatacacgggcacaacgccctcacccccacccggctcccactacacatctccctcggaaaacatgtggaacacgggcagcacctacaacctcagcagcgggatggccgtggcagggatgccgaccgcctatgacttgagcagtgttattgccagtggctccagcgtgggccacaacaacctgattcctttagggtcctccggcgcccagggcagtggtggtggcagcacgagtgcccactatgcagtcaacagccagttcaccatgggcggccccgccatctccatggcgtcgcccatgtccatcccgaccaacaccatgcactacgggagctaggggcccgccccgcggactgacagcaccaggaaaccaaatgatgtccaggctgggccgcccccttggctctccctcctgttccaggggagccataggagggaaagcaggtggcccgggggggatatgggggccccagccctgtcccaaagctccctgctcggctgcccctcgcccgcctttatataaattctctgaatcacctttgcatagaaaataaaagtgtttgctttgtaaga

SEQ ID NO: 359867 - DNA, 2215 bp, Homo sapiens
ggcctcggcctgcacggcggctgcggcggcggtagcggcagcggcggcggcggcggcggcggcggcggcggcggcggcggcggcggcggcagcggcggcggcctgggcccgggcgcacggcggcggcggcggggcctggagccggatctaagatggcagcggcggcggcggcggtggggccgggcgcgggcggcgcggggtcggcggtcccgggcggcgcggggccctgcgctaccgtgtcggtgttccccggcgcccgcctcctcaccatcggcgacgcgaacggcgagatccagcggcacgcggagcagcaggcgctgcgcctcgaggtgcgcgccggcccggactcggcgggcatcgccctctacagccatgaagatgtgtgtgtctttaagtgctcagtgtcccgagagacagagtgcagccgtgtgggcaagcagtccttcatcatcaccctgggctgcaacagcgtcctcatccagttcgccacacccaacgatttctgttccttctacaacatcctgaaaacctgccggggccacaccctggagcggtctgtgttcagcgagcggacggaggagtcttctgccgtgcagtacttccagttttatggctacctgtcccagcagcagaacatgatgcaggactacgtgcggacaggcacctaccagcgcgccatcctgcaaaaccacaccgacttcaaggacaagatcgttcttgatgttggctgtggctctgggatcctgtcgttttttgccgcccaagctggagcacggaaaatctacgcggtggaggccagcaccatggcccagcacgctgaggtcttggtgaagagtaacaacctgacggaccgcatcgtggtcatcccgggcaaggtggaggaggtgtcactccccgagcaggtggacatcatcatctcggagcccatgggctacatgctcttcaacgagcgcatgctggagagctacctccacgccaagaagtacctgaagcccagcggaaacatgtttcctaccattggtgacgtccaccttgcacccttcacggatgaacagctctacatggagcagttcaccaaggccaacttctggtaccagccatctttccatggagtggacctgtcggccctccgaggtgccgcggtggatgagtatttccggcagcctgtggtggacacatttgacatccggatcctgatggccaagtctgtcaagtacacggtgaacttcttagaagccaaagaaggagatttgcacaggatagaaatcccattcaaattccacatgctgcattcagggctggtccacggcctggctttctggtttgacgttgctttcatcggctccataatgaccgtgtggctgtccacagccccgacagagcccctgacccactggtaccaggtgcggtgcctgttccagtcaccactgttcgccaaggcaggggacacgctctcagggacatgtctgcttattgccaacaaaagacagagctacgacatcagtattgtggcccaggtggaccagaccggctccaagtccagtaacctcctggatctgaaaaaccccttctttagatacacgggcacaacgccctcacccccacccggctcccactacacatctccctcggaaaacatgtggaacacgggcagcacctacaacctcagcagcgggatggccgtggcagggatgccgaccgcctatgacttgagcagtgttattgccagtggctccagcgtgggccacaacaacctgattcctttagccaacacggggattgtcaatcacacccactcccggatgggctccataatgagcacggggattgtccaagggtcctccggcgcccagggcagtggtggtggcagcacgagtgcccactatgcagtcaacagccagttcaccatgggcggccccgccatctccatggcgtcgcccatgtccatcccgaccaacaccatgcactacgggagctaggggcccgccccgcggactgacagcaccaggaaaccaaatgatgtccaggctgggccgcccccttggctctccctcctgttccaggggagccataggagggaaagcaggtggcccgggggggatatgggggccccagccctgtcccaaagctccctgctcggctgcccctcgcccgcctttatataaattctctgaatcacctttgcatagaaaataaaagtgtttgctttgtaaga

SEQ ID NO: 359868 - DNA, 1701 bp, Homo sapiens
tgtcgcctgagaaccggatgaggcggcgaccgtgaggccgagccgggagcgggcgtcttgccgaggcccgggcgggcggggagcaacggctacagacgccgcggggccaggtcgttgagggtcggcggcgggcgaggagcgcagggcgctcgggccgggggccgccggcgccatgggcaaccgcgggatggaagagctgatcccgctggtcaacaaactgcaggacgccttcagctccatcggccagagctgccacctggacctgccgcagatcgctgtagtgggcggccagagcgccggcaagagctcggtgctggagaacttcgtgggccgggacttccttccccgcggttcaggaatcgtcacccggcggcctctcattctgcagctcatcttctcaaaaacagaacatgccgagtttttgcactgcaagtccaaaaagtttacagactttgatgaagtccggcaggagattgaagcagagaccgacagggtcacggggaccaacaaaggcatctccccagtgcccatcaaccttcgagtctactcgccacacgtgttgaacttgaccctcatcgacctcccgggtatcaccaaggtgcctgtgggcgaccagcctccagacatcgagtaccagatcaaggacatgatcctgcagttcatcagccgggagagcagcctcattctggctgtcacgcccgccaacatggacctggccaactccgacgccctcaagctggccaaggaagtcgatccccaaggcctacggaccatcggtgtcatcaccaagcttgacctgatggacgagggcaccgacgccagggacgtcttggagaacaagttgctcccgttgagaagaggctacattggcgtggtgaaccgcagccagaaggatattgagggcaagaaggacatccgtgcagcactggcagctgagaggaagttcttcctctcccacccggcctaccggcacatggccgaccgcatgggcacgccacatctgcagaagacgctgaatcagcaactgaccaaccacatccgggagtcgctgccggccctacgtagcaaactacagagccagctgctgtccctggagaaggaggtggaggagtacaagaactttcggcccgacgaccccacccgcaaaaccaaagccctgctgcacaaggtcttcttgggctgggaaagcccatgtagggcaggccttctataagtgcgggcaccaagggcgcctacatccccaggccttgctggggtgcaggggtatatcaacttcccattagcaggagctccccagcggcaagcctggcccagtgggctcggtagtgcccagctggcaggcctgaggtgtacatagtccttcccggccatattaaccacacagcctgagcctggcccagcctcggctgccagaggtgcctttgctaggcccggagccgttggcccgggccggccttgccctattcctctcctcctcctcctcctgggtcccccagggtggctgggcttgggctatgtgggtggtggtggcggggggtcttgggggcctctcagctcccgcccatgcctccctgatgggtgggcccagggcggcctctctctgaggagacctcacccactcctcgctcagtttgaccactgtaagtgcctgcactctgtattctattaataaactaaaataaagggaagacgctgctggtg

SEQ ID NO: 359869 - DNA, 2208 bp, Homo sapiens
tgtcgcctgagaaccggatgaggcggcgaccgtgaggccgagccgggagcgggcgtcttgccgaggcccgggcgggcggggagcaacggctacagacgccgcggggccaggtcgttgagggtcggcggcgggcgaggagcgcagggcgctcgggccgggggccgccggcgccatgggcaaccgcgggatggaagagctgatcccgctggtcaacaaactgcaggacgccttcagctccatcggccagagctgccacctggacctgccgcagatcgctgtagtgggcggccagagcgccggcaagagctcggtgctggagaacttcgtgggccgggacttccttccccgcggttcaggaatcgtcacccggcggcctctcattctgcagctcatcttctcaaaaacagaacatgccgagtttttgcactgcaagtccaaaaagtttacagactttgatgaagtccggcaggagattgaagcagagaccgacagggtcacggggaccaacaaaggcatctccccagtgcccatcaaccttcgagtctactcgccacacgtgttgaacttgaccctcatcgacctcccgggtatcaccaaggtgcctgtgggcgaccagcctccagacatcgagtaccagatcaaggacatgatcctgcagttcatcagccgggagagcagcctcattctggctgtcacgcccgccaacatggacctggccaactccgacgccctcaagctggccaaggaagtcgatccccaaggcctacggaccatcggtgtcatcaccaagcttgacctgatggacgagggcaccgacgccagggacgtcttggagaacaagttgctcccgttgagaagaggctacattggcgtggtgaaccgcagccagaaggatattgagggcaagaaggacatccgtgcagcactggcagctgagaggaagttcttcctctcccacccggcctaccggcacatggccgaccgcatgggcacgccacatctgcagaagacgctgaatcagcaactgaccaaccacatccgggagtcgctgccggccctacgtagcaaactacagagccagctgctgtccctggagaaggaggtggaggagtacaagaactttcggcccgacgaccccacccgcaaaaccaaagccctgctgcagatggtccagcagtttggggtggattttgagaagaggatcgagggctcaggagatcaggtggacactctggagctctccgggggcgcccgaatcaatcgcatcttccacgagcggttcccatttgagctggtgaagatggagtttgacgagaaggacttacgacgggagatcagctatgccattaagaacatccatggagtcaggcaagttccacgaggagagtcaccactgttccttcctctccgtggtgcgaccccccagctaattgggtcacccacacctctgagtccctaatcgttaggccttaagagggctcttggatggttttctgtagctgcgagcccctccctgagggtctccaagggcacatgagggtggatgtgtcttagtcctgcgtccattgcaggcttcagggctgtctgcagctcctgatcaaatagggcttagttcctgcccagtcggttggtgtgaacctcatgctaaactaagaatgctcactgcagatttgcctggggaggggcggggcggcactgaatcagggttttgggaagccagcatgagtccccatcatggcttcctcgtgagcctcttgggtcccctccttattctaacaaaggtagttgctccaggtgtctgcccttccatcgccgtggggtcctcgggtcaccctgagggtttccgggcagtggactcaggcatccgaccccacacatgacacaaccttcattccttgttggggacccggccagggccaatgaaattgctgaccatgctttgtttctctctgacttatctcccctgcccccgggtctggacggtttcgaccgggcttttcaccccggacttggcattcgaggccattgtgaaaaagcaggtcgtcaagctgaaagagccctgtctgaaatgtgtcgacctggttatccaggagctaatcaatacagttaggcagtgtaccagtaaggtattgctccctcggcagggtgactcctgaccttgtggaaacgggggtacgggggtttggtatcaggctcccagcgcctcat

SEQ ID NO: 359870 - DNA, 1671 bp, Homo sapiens
tgtcgcctgagaaccggatgaggcggcgaccgtgaggccgagccgggagcgggcgtcttgccgaggcccgggcgggcggggagcaacggctacagacgccgcggggccaggtcgttgagggtcggcggcgggcgaggagcgcagggcgctcgggccgggggccgccggcgccatgggcaaccgcgggatggaagagctgatcccgctggtcaacaaactgcaggacgccttcagctccatcggccagagctgccacctggacctgccgcagatcgctgtagtgggcggccagagcgccggcaagagctcggtgctggagaacttcgtgggccgggacttccttccccgcggttcaggaatcgtcacccggcggcctctcattctgcagctcatcttctcaaaaacagaacatgccgagtttttgcactgcaagtccaaaaagtttacagactttgatgaagtccggcaggagattgaagcagagaccgacagggtcacggggaccaacaaaggcatctccccagtgcccatcaaccttcgagtctactcgccacacgtgttgaacttgaccctcatcgacctcccgggtatcaccaaggtgcctgtgggcgaccagcctccagacatcgagtaccagatcaaggacatgatcctgcagttcatcagccgggagagcagcctcattctggctgtcacgcccgccaacatggacctggccaactccgacgccctcaagctggccaaggaagtcgatccccaaggcctacggaccatcggtgtcatcaccaagcttgacctgatggacgagggcaccgacgccagggacgtcttggagaacaagttgctcccgttgagaagaggctacattggcgtggtgaaccgcagccagaaggatattgagggcaagaaggacatccgtgcagcactggcagctgagaggaagttcttcctctcccacccggcctaccggcacatggccgaccgcatgggcacgccacatctgcagaagacgctgaatcagcaactgaccaaccacatccgggagtcgctgccggccctacgtagcaaactacagagccagctgctgtccctggagaaggaggtggaggagtacaagaactttcggcccgacgaccccacccgcaaaaccaaagccctgctgcagatggtccagcagtttggggtggattttgagaagaggatcgagggctcaggagatcaggtggacactctggagctctccgggggcgcccgaatcaatcgcatcttccacgagcggttcccatttgagctggtgaagatggagtttgacgagaaggacttacgacgggagatcagctatgccattaagaacatccatggagtcaggacggggctcttcacccccgacatggcctttgaagccattgtgaaaaaacagattgtaaaactcaaagagccgagtttgaagtgtgttgatctcgtggtctcagagctggccacggtcataaaaaagtgtgccgagaagctcagttcctacccccggttgcgagaggagacagagcgaatcgtcaccacttacatccgggaacgggaggggagaacgaaggaccagattcttctgctgggcattggcaaacccgatgaagtcctctggttcgtgttgatgtaggactgctcaatgtcgatggt

SEQ ID NO: 359871 - DNA, 2099 bp, Homo sapiens
tgtcgcctgagaaccggatgaggcggcgaccgtgaggccgagccgggagcgggcgtcttgccgaggcccgggcgggcggggagcaacggctacagacgccgcggggccaggtcgttgagggtcggcggcgggcgaggagcgcagggcgctcgggccgggggccgccggcgccatgggcaaccgcgggatggaagagctgatcccgctggtcaacaaactgcaggacgccttcagctccatcggccagagctgccacctggacctgccgcagatcgctgtagtgggcggccagagcgccggcaagagctcggtgctggagaacttcgtgggccgggacttccttccccgcggttcaggaatcgtcacccggcggcctctcattctgcagctcatcttctcaaaaacagaacatgccgagtttttgcactgcaagtccaaaaagtttacagactttgatgaagtccggcaggagattgaagcagagaccgacagggtcacggggaccaacaaaggcatctccccagtgcccatcaaccttcgagtctactcgccacacgtgttgaacttgaccctcatcgacctcccgggtatcaccaaggtgcctgtgggcgaccagcctccagacatcgagtaccagatcaaggacatgatcctgcagttcatcagccgggagagcagcctcattctggctgtcacgcccgccaacatggacctggccaactccgacgccctcaagctggccaaggaagtcgatccccaaggcctacggaccatcggtgtcatcaccaagcttgacctgatggacgagggcaccgacgccagggacgtcttggagaacaagttgctcccgttgagaagaggctacattggcgtggtgaaccgcagccagaaggatattgagggcaagaaggacatccgtgcagcactggcagctgagaggaagttcttcctctcccacccggcctaccggcacatggccgaccgcatgggcacgccacatctgcagaagacgctgaatcagcaactgaccaaccacatccgggagtcgctgccggccctacgtagcaaactacagagccagctgctgtccctggagaaggaggtggaggagtacaagaactttcggcccgacgaccccacccgcaaaaccaaagccctgctgcacaaggtcttcttgggctgggaaagcccatgtagggcaggccttctataagtgcgggcaccaagggcgcctacatccccaggccttgctggggtgcaggggtatatcaacttcccattagcaggagctccccagcggcaagcctggcccagtgggctcggtagtgcccagctggcaggcctgaggtgtacatagtccttcccggccatattaaccacacagcctgagcctggcccagcctcggctgccagaggtgcctttgctaggcccggagccgttggcccgggccggccttgccctattcctctcctcctcctcctcctgggtcccccagggtggctgggcttgggctatgtgggtggtggtggcggggggtcttgggggcctctcagctcccgcccatgcctccctgatgggtgggcccagggcggcctctctctgaggagacctcacccactcctcgctcagtttgaccactgtaagtgcctgcactctgtattctattaataaactaaaataaagggaagacgctgctggtgaaaaaaaaaaaaaaaaaaaagggggggggggaaaaaataaccccccggggggccccttttccgccccgttttttgtgacaggggcgcccccaaagagagcgcgtaaaaaaagcaaggcggggcgcggtgaaaacaccggccgtggcgggaccccggcctctggcactccggggaagagccccctcgtcggggggggacttcggcccccccccacaggagtacgccgaggcaataaccttcacgggtactgggacgcagcgatttcgcgcgcggacgtcgtccgattgtagatacgccatgaacaaatactcaccgccatagacccaacaccagagtccacacgtgcatacccgctcccaccacacgcacaacgctcacagatcagtagacggccacgc

SEQ ID NO: 359872 - DNA, 1296 bp, Homo sapiens
tgtcgcctgagaaccggatgaggcggcgaccgtgaggccgagccgggagcgggcgtcttgccgaggcccgggcgggcggggagcaacggctacagacgccgcggggccaggtcgttgagggtcggcggcgggcgaggagcgcagggcgctcgggccgggggccgccggcgccatgggcaaccgcgggatggaagagctgatcccgctggtcaacaaactgcaggacgccttcagctccatcggccagagctgccacctggacctgccgcagatcgctgtagtgggcggccagagcgccggcaagagctcggtgctggagaacttcgtgggccgggacttccttccccgcggttcaggaatcgtcacccggcggcctctcattctgcagctcatcttctcaaaaacagaacatgccgagtttttgcactgcaagtccaaaaagtttacagactttgatgaagtccggcaggagattgaagcagagaccgacagggtcacggggaccaacaaaggcatctccccagtgcccatcaaccttcgagtctactcgccacacgtgttgaacttgaccctcatcgacctcccgggtatcaccaaggtgcctgtgggcgaccagcctccagacatcgagtaccagatcaaggacatgatcctgcagttcatcagccgggagagcagcctcattctggctgtcacgcccgccaacatggacctggccaactccgacgccctcaagctggccaaggaagtcgatccccaaggcctacggaccatcggtgtcatcaccaagcttgacctgatggacgagggcaccgacgccagggacgtcttggagaacaagttgctcccgttgagaagaggctacattggcgtggtgaaccgcagccagaaggatattgagggcaagaaggacatccgtgcagcactggcagctgagaggaagttcttcctctcccacccggcctaccggcacatggccgaccgcatgggcacgccacatctgcagaagacgctgaatcagcaactgaccaaccacatccgggagtcgctgccggccctacgtagcaaactacagagccagctgctgtccctggagaaggaggtggaggagtacaagaactttcggcccgacgaccccacccgcaaaaccaaagccctgctgcagatggtccagcagtttggggtggattttgagaagaggagacctcacccactcctcgctcagtttgaccactgtaagtgcctgcactctgtattctattaataaactaaaataaagggaagacgctgctggtg

SEQ ID NO: 359873 - DNA, 1064 bp, Homo sapiens
tgtcgcctgagaaccggatgaggcggcgaccgtgaggccgagccgggagcgggcgtcttgccgaggcccgggcgggcggggagcaacggctacagacgccgcggggccaggtcgttgagggtcggcggcgggcgaggagcgcagggcgctcgggccgggggccgccggcgccatgggcaaccgcgggatggaagagctgatcccgctggtcaacaaactgcaggacgccttcagctccatcggccagagctgccacctggacctgccgcagatcgctgtagtgggcggccagagcgccggcaagagctcggtgctggagaacttcgtgggccgggacttccttccccgcggttcaggaatcgtcacccggcggcctctcattctgcagctcatcttctcaaaaacagaacatgccgagtttttgcactgcaagtccaaaaagtttacagactttgatgaagtccggcaggagattgaagcagagaccgacagggtcacggggaccaacaaaggcatctccccagtgcccatcaaccttcgagtctactcgccacacgtgttgaacttgaccctcatcgacctcccgggtatcaccaaggtgcctgtgggcgaccagcctccagacatcgagtaccagatcaaggacatgatcctgcagttcatcagccgggagagcagcctcattctggctgtcacgcccgccaacatggacctggccaactccgacgccctcaagctggccaaggaagtcgatccccaaggtaaccctgagcctagggcagtcccctcttccaggtgcctctgagcatgggatgtgcccagcatccttggttccaagtcactggcgttctctttaatccatggccgctgtaggaaaaggcctcctggaacatggcacttcctccgagaaccagcagtgctggtgggcatcccctgggaagtcactgtgtggcagttggacggtcctccttggacatggcagtgcccatgttgccagagtgggaagctagcctagggctgaaggaagggcccagcgctccatcgcccagatgcgatcttaggtc

SEQ ID NO: 359874 - DNA, 142 bp, Homo sapiens
catagccagcccccacctcaggttctggcagccacagtggcatggcgggggctcctactccatctgtatctgtagctcacaccctctccttcctcacagccccactccacagcgccgaccggtgtccagcatacacccccct

SEQ ID NO: 359875 - DNA, 563 bp, Homo sapiens
ctcctgtttttcctttgaccactctttcctctggattcctgggccttcccacttaccccagctgttactatactgagcagctggtgacctggtgggtattgcctgctgtgtgcctttgccctggtgtgtgaacggggtacgccctggctgggtggccccagccctgggtgggacatccctggggcccgctgaagagctacggggtgctctctcagagccagggccagtgctgggcctctgggccaggaccttgaccgcaccagctgtagcccctgctgtttcagagcctgcaggctggggaggtggagtccttaaacaaattgtcacaaggatgatgagagtaggaagagagggtaggggatagactatgggaaaggggagctgggaatgtggcctggagagatcttcctgaagaagtcaggtgatgccagggggacccagagaattggacccagggaaggaaggctaccagaccaggcaggtagaggtaagagagccagcggccaggccccatcgccaggagggccctgcaggtccaggggaggattttggattttccccca

SEQ ID NO: 359876 - DNA, 369 bp, Homo sapiens
gcttgcagctgccagctgatgctctttcctggtggcagcctctgacctctgacctctgggctctttcaggcctacggaccatcggtgtcatcaccaagcttgacctgatggacgagggcaccgacgccagggacgtcttggagaacaagttgctcccgttgagaagaggtgtggctttgggggtgctggggaagcaggaggatgggtggggtccttatcattactgaaaccccagcacctgttccctgcctgcctggaagtcattgcttctccatttcaccgtaactccttctttcttttccctttgagctatgtatctttttcttctgatttgtatgcattcgtttttcaagtgcacaattaacacct

SEQ ID NO: 359877 - DNA, 1005 bp, Homo sapiens
attaaaaatacaaaaccaggcaattgacagtgtcatgactattgggatgttacagggaagttttttgtaaaacaacctgtttaccagatgagcattgtaagttactggaggttgcagtgagccgagatcacgccactgcgttccagtctgggcaacagagtgagactccgtcacacaaaaaaaaaaaaagagaaaaaataaataacataaaactgaagtattaagggagtgatgctacctcaggggcctgtggcaagttaataaaaccaggtggtaaaacaaaaaaaaaaaaaaaaaaaaaaaaaaaaaaaaaaaaaaaaaaaaaaaaaaaaaaaaaaaaaaaaaaaaaaaaaaaaaaaaaaaaaaaaaaaaaaaaaaaaaaaaaaaacaaaacagaagcaaagacaaaacaaaaaaaaaaaagaaaaacagaaaaaaaaaataaaaaagaaaaacagagccgcgggggggaacacgaacgcacattattcatgcagcgagagccggcacacgacgacgccgcccacccgccgccgacgcaaccgacgccgaaggcccagcgcagaaatgagaccattcatgacaccacagccgccgctacatacggatgtcaacaacaactagcgagcgacgcgcacccgcaaggggtacactcacgtgccgaacaccacacatacaatacagctggaagaaaaaagtcgaaacacaccaccacacccaatgccaaaacagacagaacataagaataatactcacatagtcggtgacgcgaagaagaaacaaacccagccatctaatgcagcgaaaacagtaaccagatacgcgcgatgcaattaacaaaaaattataatcgcgacggagagaatttaaaagacaaacacgaaacaccaaccaagaaagagacgaaccgacgacagaaccacaacccacaacaagatttcgcgagcgtaccaccaacgaagcctacccacaaacaccacatcgacccacaacacaagatcaccg

SEQ ID NO: 359878 - DNA, 3614 bp, Homo sapiens
tgtcgcctgagaaccggatgaggcggcgaccgtgaggccgagccgggagcgggcgtcttgccgaggcccgggcgggcggggagcaacggctacagacgccgcggggccaggtcgttgagggtcggcggcgggcgaggagcgcagggcgctcgggccgggggccgccggcgccatgggcaaccgcgggatggaagagctgatcccgctggtcaacaaactgcaggacgccttcagctccatcggccagagctgccacctggacctgccgcagatcgctgtagtgggcggccagagcgccggcaagagctcggtgctggagaacttcgtgggccgggacttccttccccgcggttcaggaatcgtcacccggcggcctctcattctgcagctcatcttctcaaaaacagaacatgccgagtttttgcactgcaagtccaaaaagtttacagactttgatgaagtccggcaggagattgaagcagagaccgacagggtcacggggaccaacaaaggcatctccccagtgcccatcaaccttcgagtctactcgccacacgtgttgaacttgaccctcatcgacctcccgggtatcaccaaggtgcctgtgggcgaccagcctccagacatcgagtaccagatcaaggacatgatcctgcagttcatcagccgggagagcagcctcattctggctgtcacgcccgccaacatggacctggccaactccgacgccctcaagctggccaaggaagtcgatccccaaggcctacggaccatcggtgtcatcaccaagcttgacctgatggacgagggcaccgacgccagggacgtcttggagaacaagttgctcccgttgagaagaggctacattggcgtggtgaaccgcagccagaaggatattgagggcaagaaggacatccgtgcagcactggcagctgagaggaagttcttcctctcccacccggcctaccggcacatggccgaccgcatgggcacgccacatctgcagaagacgctgaatcagcaactgaccaaccacatccgggagtcgctgccggccctacgtagcaaactacagagccagctgctgtccctggagaaggaggtggaggagtacaagaactttcggcccgacgaccccacccgcaaaaccaaagccctgctgcagatggtccagcagtttggggtggattttgagaagaggatcgagggctcaggagatcaggtggacactctggagctctccgggggcgcccgaatcaatcgcatcttccacgagcggttcccatttgagctggtgaagatgggttgacgagaggacttcgacggggatcagttgccatgaagaacatccacgaccgggcttttcaccccggacttggcattcgaggccattgtgaaaaagcaggtcgtcaagctgaaagagccctgtctgaaatgtgtcgacctggttatccaggagctaatcaatacagttaggcagtgtaccagtaagctcagttcctacccccggttgcgagaggagacagagcgaatcgtcaccacttacatccgggaacgggaggggagaacgaaggaccagattcttctgctgatcgacattgagcagtcctacatcaacacgaaccatgaggacttcatcgggtttgccaatgcccagcagaggagcacgcagctgaacaagaagagagccatccccaatcaggtgatccgcaggggctggctgaccatcaacaacatcagcctgatgaaaggcggctccaaggagtactggtttgtgctgactgccgagtcactgtcctggtacaaggatgaggaggagaaagagaagaagtacatgctgcctctggacaacctcaagatccgtgatgtggagaagggcttcatgtccaacaagcacgtcttcgccatcttcaacacggagcagagaaacgtctacaaggacctgcggcagatcgagctggcctgtgactcccaggaagacgtggacagctggaaggcctcgttcctccgagctggcgtctaccccgagaaggaccaggcagaaaacgaggatggggcccaggagaacaccttctccatggacccccaactggagcggcaggtggagaccattcgcaacctggtggactcatacgtggccatcatcaacaagtccatccgcgacctcatgccaaagaccatcatgcacctcatgatcaacaatacgaaggccttcatccaccacgagctgctggcctacctatactcctcggcagaccagagcagcctcatggaggagtcggctgaccaggcacagcggcgggacgacatgctgcgcatgtaccatgccctcaaggaggcgctcaacatcatcggtgacatcagcaccagcactgtgtccacgcctgtacccccgcctgtcgatgacacctggctccagagcgccagcagccacagccccactccacagcgccgaccggtgtccagcatacacccccctggccggcccccagcagtgaggggccccactccagggccccccctgattcctgttcccgtgggggcagcagcctccttctcggcgcccccaatcccatcccggcctggaccccagagcgtgtttgccaacagtgacctcttcccagccccgcctcagatcccatctcggccagttcggatccccccagggattcccccaggagtgcccagcagaagaccccctgctgcgcccagccggcccaccattatccgcccagccgagccatccctgctcgactaggcctcgaggggggcgtgctctcgggggggcctcacgcacccgcggcgcaggagcttcagtggtctggggccctccgccgcccctatgctgggaccaggctcccagtgggcagccctggcctcttccttaacgctggccccggtccagggccggcccctgtgcctggctggacaccgcactgcgcaaaggggccctggagctccaggcagggggcgctggggtgttgcactttgggggatggagtctcagggtggcagaggggggaccagaacccttgacaccatcctgaatgaggggtccagcctgggggggactctaccaaggtcttcttgggctgggaaagcccatgtagggcaggccttctataagtgcgggcaccaagggcgcctacatccccaggccttgctggggtgcaggggtatatcaacttcccattagcaggagctccccagcggcaagcctggcccagtgggctcggtagtgcccagctggcaggcctgaggtgtacatagtccttcccggccatattaaccacacagcctgagcctggcccagcctcggctgccagaggtgcctttgctaggcccggagccgttggcccgggccggccttgccctattcctctcctcctcctcctcctgggtcccccagggtggctgggcttgggctatgtgggtggtggtggcggggggtcttgggggcctctcagctcccgcccatgcctccctgatgggtgggcccagggcggcctctctctgaggagacctcacccactcctcgctcagtttgaccactgtaagtgcctgcactctgtattctattaataaactaaaataaagggaagacgctgctggtg

SEQ ID NO: 359879 - DNA, 3629 bp, Homo sapiens
tgtcgcctgagaaccggatgaggcggcgaccgtgaggccgagccgggagcgggcgtcttgccgaggcccgggcgggcggggagcaacggctacagacgccgcggggccaggtcgttgagggtcggcggcgggcgaggagcgcagggcgctcgggccgggggccgccggcgccatgggcaaccgcgggatggaagagctgatcccgctggtcaacaaactgcaggacgccttcagctccatcggccagagctgccacctggacctgccgcagatcgctgtagtgggcggccagagcgccggcaagagctcggtgctggagaacttcgtgggccgggacttccttccccgcggttcaggaatcgtcacccggcggcctctcattctgcagctcatcttctcaaaaacagaacatgccgagtttttgcactgcaagtccaaaaagtttacagactttgatgaagtccggcaggagattgaagcagagaccgacagggtcacggggaccaacaaaggcatctccccagtgcccatcaaccttcgagtctactcgccacacgtgttgaacttgaccctcatcgacctcccgggtatcaccaaggtgcctgtgggcgaccagcctccagacatcgagtaccagatcaaggacatgatcctgcagttcatcagccgggagagcagcctcattctggctgtcacgcccgccaacatggacctggccaactccgacgccctcaagctggccaaggaagtcgatccccaaggcctacggaccatcggtgtcatcaccaagcttgacctgatggacgagggcaccgacgccagggacgtcttggagaacaagttgctcccgttgagaagaggctacattggcgtggtgaaccgcagccagaaggatattgagggcaagaaggacatccgtgcagcactggcagctgagaggaagttcttcctctcccacccggcctaccggcacatggccgaccgcatgggcacgccacatctgcagaagacgctgaatcagcaactgaccaaccacatccgggagtcgctgccggccctacgtagcaaactacagagccagctgctgtccctggagaaggaggtggaggagtacaagaactttcggcccgacgaccccacccgcaaaaccaaagccctgctgcagatggtccagcagtttggggtggattttgagaagaggatcgagggctcaggagatcaggtggacactctggagctctccgggggcgcccgaatcaatcgcatcttccacgagcggttcccatttgagctggtgaagatggagtttgacgagaaggacttacgacgggagatcagctatgccattaagaacatccatggagtcaggacggggctcttcacccccgacatggcctttgaagccattgtgaaaaaacagattgtaaaactcaaagagccgagtttgaagtgtgttgatctcgtggtctcagagctggccacggtcataaaaaagtgtgccgagaagctcagttcctacccccggttgcgagaggagacagagcgaatcgtcaccacttacatccgggaacgggaggggagaacgaaggaccagattcttctgctgatcgacattgagcagtcctacatcaacacgaaccatgaggacttcatcgggtttgccaatgcccagcagaggagcacgcagctgaacaagaagagagccatccccaatcaggtgatccgcaggggctggctgaccatcaacaacatcagcctgatgaaaggcggctccaaggagtactggtttgtgctgactgccgagtcactgtcctggtacaaggatgaggaggagaaagagaagaagtacatgctgcctctggacaacctcaagatccgtgatgtggagaagggcttcatgtccaacaagcacgtcttcgccatcttcaacacggagcagagaaacgtctacaaggacctgcggcagatcgagctggcctgtgactcccaggaagacgtggacagctggaaggcctcgttcctccgagctggcgtctaccccgagaaggaccaggcagaaaacgaggatggggcccaggagaacaccttctccatggacccccaactggagcggcaggtggagaccattcgcaacctggtggactcatacgtggccatcatcaacaagtccatccgcgacctcatgccaaagaccatcatgcacctcatgatcaacaatacgaaggccttcatccaccacgagctgctggcctacctatactcctcggcagaccagagcagcctcatggaggagtcggctgaccaggcacagcggcgggacgacatgctgcgcatgtaccatgccctcaaggaggcgctcaacatcatcggtgacatcagcaccagcactgtgtccacgcctgtacccccgcctgtcgatgacacctggctccagagcgccagcagccacagccccactccacagcgccgaccggtgtccagcatacacccccctggccggcccccagcagtgaggggccccactccagggccccccctgattcctgttcccgtgggggcagcagcctccttctcggcgcccccaatcccatcccggcctggaccccagagcgtgtttgccaacagtgacctcttcccagccccgcctcagatcccatctcggccagttcggatccccccagggattcccccaggagtgcccagcagaagaccccctgctgcgcccagccggcccaccattatccgcccagccgagccatccctgctcgactaggcctcgaggggggcgtgctctcgggggggcctcacgcacccgcggcgcaggagcttcagtggtctggggccctccgccgcccctatgctgggaccaggctcccagtgggcagccctggcctcttccttaacgctggccccggtccagggccggcccctgtgcctggctggacaccgcactgcgcaaaggggccctggagctccaggcagggggcgctggggtgttgcactttgggggatggagtctcagggtggcagaggggggaccagaacccttgacaccatcctgaatgaggggtccagcctgggggggactctaccaaggtcttcttgggctgggaaagcccatgtagggcaggccttctataagtgcgggcaccaagggcgcctacatccccaggccttgctggggtgcaggggtatatcaacttcccattagcaggagctccccagcggcaagcctggcccagtgggctcggtagtgcccagctggcaggcctgaggtgtacatagtccttcccggccatattaaccacacagcctgagcctggcccagcctcggctgccagaggtgcctttgctaggcccggagccgttggcccgggccggccttgccctattcctctcctcctcctcctcctgggtcccccagggtggctgggcttgggctatgtgggtggtggtggcggggggtcttgggggcctctcagctcccgcccatgcctccctgatgggtgggcccagggcggcctctctctgaggagacctcacccactcctcgctcagtttgaccactgtaagtgcctgcactctgtattctattaataaactaaaataaagggaagacgctgctggtg

SEQ ID NO: 359880 - DNA, 3024 bp, Homo sapiens
aagatcatgtctgatgtacgatgagcggtgttatcgtgcgaggacagatcaaggacatgatcctgcagttcatcagccgggagagcagcctcattctggctgtcacgcccgccaacatggacctggccaactccgacgccctcaagctggccaaggaagtcgatccccaaggcctacggaccatcggtgtcatcaccaagcttgacctgatggacgagggcaccgacgccagggacgtcttggagaacaagttgctcccgttgagaagaggctacattggcgtggtgaaccgcagccagaaggatattgagggcaagaaggacatccgtgcagcactggcagctgagaggaagttcttcctctcccacccggcctaccggcacatggccgaccgcatgggcacgccacatctgcagaagacgctgaatcagcaactgaccaaccacatccgggagtcgctgccggccctacgtagcaaactacagagccagctgctgtccctggagaaggaggtggaggagtacaagaactttcggcccgacgaccccacccgcaaaaccaaagccctgctgcagatggtccagcagtttggggtggattttgagaagaggatcgagggctcaggagatcaggtggacactctggagctctccgggggcgcccgaatcaatcgcatcttccacgagcggttcccatttgagctggtgaagatgggttgacgagaggacttcgacggggatcagttgccatgaagaacatccacgaccgggcttttcaccccggacttggcattcgaggccattgtgaaaaagcaggtcgtcaagctgaaagagccctgtctgaaatgtgtcgacctggttatccaggagctaatcaatacagttaggcagtgtaccagtaagctcagttcctacccccggttgcgagaggagacagagcgaatcgtcaccacttacatccgggaacgggaggggagaacgaaggaccagattcttctgctgatcgacattgagcagtcctacatcaacacgaaccatgaggacttcatcgggtttgccaatgcccagcagaggagcacgcagctgaacaagaagagagccatccccaatcaggtgatccgcaggggctggctgaccatcaacaacatcagcctgatgaaaggcggctccaaggagtactggtttgtgctgactgccgagtcactgtcctggtacaaggatgaggaggagaaagagaagaagtacatgctgcctctggacaacctcaagatccgtgatgtggagaagggcttcatgtccaacaagcacgtcttcgccatcttcaacacggagcagagaaacgtctacaaggacctgcggcagatcgagctggcctgtgactcccaggaagacgtggacagctggaaggcctcgttcctccgagctggcgtctaccccgagaaggaccaggcagaaaacgaggatggggcccaggagaacaccttctccatggacccccaactggagcggcaggtggagaccattcgcaacctggtggactcatacgtggccatcatcaacaagtccatccgcgacctcatgccaaagaccatcatgcacctcatgatcaacaatacgaaggccttcatccaccacgagctgctggcctacctatactcctcggcagaccagagcagcctcatggaggagtcggctgaccaggcacagcggcgggacgacatgctgcgcatgtaccatgccctcaaggaggcgctcaacatcatcggtgacatcagcaccagcactgtgtccacgcctgtacccccgcctgtcgatgacacctggctccagagcgccagcagccacagccccactccacagcgccgaccggtgtccagcatacacccccctggccggcccccagcagtgaggggccccactccagggccccccctgattcctgttcccgtgggggcagcagcctccttctcggcgcccccaatcccatcccggcctggaccccagagcgtgtttgccaacagtgacctcttcccagccccgcctcagatcccatctcggccagttcggatccccccagggattcccccaggagtgcccagcagaagaccccctgctgcgcccagccggcccaccattatccgcccagccgagccatccctgctcgactaggcctcgaggggggcgtgctctcgggggggcctcacgcacccgcggcgcaggagcttcagtggtctggggccctccgccgcccctatgctgggaccaggctcccagtgggcagccctggcctcttccttaacgctggccccggtccagggccggcccctgtgcctggctggacaccgcactgcgcaaaggggccctggagctccaggcagggggcgctggggtgttgcactttgggggatggagtctcagggtggcagaggggggaccagaacccttgacaccatcctgaatgaggggtccagcctgggggggactctaccaaggtcttcttgggctgggaaagcccatgtagggcaggccttctataagtgcgggcaccaagggcgcctacatccccaggccttgctggggtgcaggggtatatcaacttcccattagcaggagctccccagcggcaagcctggcccagtgggctcggtagtgcccagctggcaggcctgaggtgtacatagtccttcccggccatattaaccacacagcctgagcctggcccagcctcggctgccagaggtgcctttgctaggcccggagccgttggcccgggccggccttgccctattcctctcctcctcctcctcctgggtcccccagggtggctgggcttgggctatgtgggtggtggtggcggggggtcttgggggcctctcagctcccgcccatgcctccctgatgggtgggcccagggcggcctctctctgaggagacctcacccactcctcgctcagtttgaccactgtaagtgcctgcactctgtattctattaataaactaaaataaagggaagacgctgctggtg

SEQ ID NO: 359881 - DNA, 2223 bp, Homo sapiens
gctggtacggctcggagtacgggatcaaagagccgagtttgaagtgtgttgatctcgtggtctcagagctggccacggtcataaaaaagtgtgccgagaagctcagttcctacccccggttgcgagaggagacagagcgaatcgtcaccacttacatccgggaacgggaggggagaacgaaggaccagattcttctgctgatcgacattgagcagtcctacatcaacacgaaccatgaggacttcatcgggtttgccaatgcccagcagaggagcacgcagctgaacaagaagagagccatccccaatcaggtgatccgcaggggctggctgaccatcaacaacatcagcctgatgaaaggcggctccaaggagtactggtttgtgctgactgccgagtcactgtcctggtacaaggatgaggaggagaaagagaagaagtacatgctgcctctggacaacctcaagatccgtgatgtggagaagggcttcatgtccaacaagcacgtcttcgccatcttcaacacggagcagagaaacgtctacaaggacctgcggcagatcgagctggcctgtgactcccaggaagacgtggacagctggaaggcctcgttcctccgagctggcgtctaccccgagaaggaccaggcagaaaacgaggatggggcccaggagaacaccttctccatggacccccaactggagcggcaggtggagaccattcgcaacctggtggactcatacgtggccatcatcaacaagtccatccgcgacctcatgccaaagaccatcatgcacctcatgatcaacaatacgaaggccttcatccaccacgagctgctggcctacctatactcctcggcagaccagagcagcctcatggaggagtcggctgaccaggcacagcggcgggacgacatgctgcgcatgtaccatgccctcaaggaggcgctcaacatcatcggtgacatcagcaccagcactgtgtccacgcctgtacccccgcctgtcgatgacacctggctccagagcgccagcagccacagccccactccacagcgccgaccggtgtccagcatacacccccctggccggcccccagcagtgaggggccccactccagggccccccctgattcctgttcccgtgggggcagcagcctccttctcggcgcccccaatcccatcccggcctggaccccagagcgtgtttgccaacagtgacctcttcccagccccgcctcagatcccatctcggccagttcggatccccccagggattcccccaggagtgcccagcagaagaccccctgctgcgcccagccggcccaccattatccgcccagccgagccatccctgctcgactaggcctcgaggggggcgtgctctcgggggggcctcacgcacccgcggcgcaggagcttcagtggtctggggccctccgccgcccctatgctgggaccaggctcccagtgggcagccctggcctcttccttaacgctggccccggtccagggccggcccctgtgcctggctggacaccgcactgcgcaaaggggccctggagctccaggcagggggcgctggggtgttgcactttgggggatggagtctcagggtggcagaggggggaccagaacccttgacaccatcctgaatgaggggtccagcctgggggggactctaccaaggtcttcttgggctgggaaagcccatgtagggcaggccttctataagtgcgggcaccaagggcgcctacatccccaggccttgctggggtgcaggggtatatcaacttcccattagcaggagctccccagcggcaagcctggcccagtgggctcggtagtgcccagctggcaggcctgaggtgtacatagtccttcccggccatattaaccacacagcctgagcctggcccagcctcggctgccagaggtgcctttgctaggcccggagccgttggcccgggccggccttgccctattcctctcctcctcctcctcctgggtcccccagggtggctgggcttgggctatgtgggtggtggtggcggggggtcttgggggcctctcagctcccgcccatgcctccctgatgggtgggcccagggcggcctctctctgaggagacctcacccactcctcgctcagtttgaccactgtaagtgcctgcactctgtattctattaataaactaaaataaagggaagacgctgctggtg

SEQ ID NO: 359882 - DNA, 2334 bp, Homo sapiens
ctggggaagagggatgggggggcccaccgaccccactcttctgctcttagctcccagctggactcactgggggccaggagcaaggtgtgggctcggtgggccccctcatatctcattccccacccccctccgcattttctacctgtgtggttcatgttgcttcccgtgccacgaggaccccgccaatgcgaccactctgcttgttcccccagctcagttcctacccccggttgcgagaggagacagagcgaatcgtcaccacttacatccgggaacgggaggggagaacgaaggaccagattcttctgctgatcgacattgagcagtcctacatcaacacgaaccatgaggacttcatcgggtttgccaatgcccagcagaggagcacgcagctgaacaagaagagagccatccccaatcaggtgatccgcaggggctggctgaccatcaacaacatcagcctgatgaaaggcggctccaaggagtactggtttgtgctgactgccgagtcactgtcctggtacaaggatgaggaggagaaagagaagaagtacatgctgcctctggacaacctcaagatccgtgatgtggagaagggcttcatgtccaacaagcacgtcttcgccatcttcaacacggagcagagaaacgtctacaaggacctgcggcagatcgagctggcctgtgactcccaggaagacgtggacagctggaaggcctcgttcctccgagctggcgtctaccccgagaaggaccaggcagaaaacgaggatggggcccaggagaacaccttctccatggacccccaactggagcggcaggtggagaccattcgcaacctggtggactcatacgtggccatcatcaacaagtccatccgcgacctcatgccaaagaccatcatgcacctcatgatcaacaatacgaaggccttcatccaccacgagctgctggcctacctatactcctcggcagaccagagcagcctcatggaggagtcggctgaccaggcacagcggcgggacgacatgctgcgcatgtaccatgccctcaaggaggcgctcaacatcatcggtgacatcagcaccagcactgtgtccacgcctgtacccccgcctgtcgatgacacctggctccagagcgccagcagccacagccccactccacagcgccgaccggtgtccagcatacacccccctggccggcccccagcagtgaggggccccactccagggccccccctgattcctgttcccgtgggggcagcagcctccttctcggcgcccccaatcccatcccggcctggaccccagagcgtgtttgccaacagtgacctcttcccagccccgcctcagatcccatctcggccagttcggatccccccagggattcccccaggagtgcccagcagaagaccccctgctgcgcccagccggcccaccattatccgcccagccgagccatccctgctcgactaggcctcgaggggggcgtgctctcgggggggcctcacgcacccgcggcgcaggagcttcagtggtctggggccctccgccgcccctatgctgggaccaggctcccagtgggcagccctggcctcttccttaacgctggccccggtccagggccggcccctgtgcctggctggacaccgcactgcgcaaaggggccctggagctccaggcagggggcgctggggtgttgcactttgggggatggagtctcagggtggcagaggggggaccagaacccttgacaccatcctgaatgaggggtccagcctgggggggactctaccaaggtcttcttgggctgggaaagcccatgtagggcaggccttctataagtgcgggcaccaagggcgcctacatccccaggccttgctggggtgcaggggtatatcaacttcccattagcaggagctccccagcggcaagcctggcccagtgggctcggtagtgcccagctggcaggcctgaggtgtacatagtccttcccggccatattaaccacacagcctgagcctggcccagcctcggctgccagaggtgcctttgctaggcccggagccgttggcccgggccggccttgccctattcctctcctcctcctcctcctgggtcccccagggtggctgggcttgggctatgtgggtggtggtggcggggggtcttgggggcctctcagctcccgcccatgcctccctgatgggtgggcccagggcggcctctctctgaggagacctcacccactcctcgctcagtttgaccactgtaagtgcctgcactctgtattctattaataaactaaaataaagggaagacgctgctggtg

SEQ ID NO: 359883 - DNA, 3294 bp, Homo sapiens
ggcctcggcctgcacggcggctgcggcggcggtagcggcagcggcggcggcggcggcggcggcggcggcggcggcggcggcggcggcggcagcggcggcggcctgggcccgggcgcacggcggcggcggcggggcctggagccggatctaagatggcagcggcggcggcggcggtggggccgggcgcgggcggcgcggggtcggcggtcccgggcggcgcggggccctgcgctaccgtgtcggtgttccccggcgcccgcctcctcaccatcggcgacgcgaacggcgagatccagcggcacgcggagcagcaggcgctgcgcctcgaggtgcgcgccggcccggactcggcgggcatcgccctctacagccatgaagatgtgtgtgtctttaagtgctcagtgtcccgagagacagagtgcagccgtgtgggcaagcagtccttcatcatcaccctgggctgcaacagcgtcctcatccagttcgccacacccaacgatttctgttccttctacaacatcctgaaaacctgccggggccacaccctggagcggtctgtgttcagcgagcggacggaggagtcttctgccgtgcagtacttccagttttatggctacctgtcccagcagcagaacatgatgcaggactacgtgcggacaggcacctaccagcgcgccatcctgcaaaaccacaccgacttcaaggacaagatcgttcttgatgttggctgtggctctgggatcctgtcgttttttgccgcccaagctggagcacggaaaatctacgcggtggaggccagcaccatggcccagcacgctgaggtcttggtgaagagtaacaacctgacggaccgcatcgtggtcatcccgggcaaggtggaggaggtgtcactccccgagcaggtggacatcatcatctcggagcccatgggctacatgctcttcaacgagcgcatgctggagagctacctccacgccaagaagtacctgaagcccagcggaaacatgtttcctaccattggtgacgtccaccttgcacccttcacggatgaacagctctacatggagcagttcaccaaggccaacttctggtaccagccatctttccatggagtggacctgtcggccctccgaggtgccgcggtggatgagtatttccggcagcctgtggtggacacatttgacatccggatcctgatggccaagtctgtcaagtacacggtgaacttcttagaagccaaagaaggagatttgcacaggatagaaatcccattcaaattccacatgctgcattcagggctggtccacggcctggctttctggtttgacgttgctttcatcggctccataatgaccgtgtggctgtccacagccccgacagagcccctgacccactggtaccaggtgcggtgcctgttccagtcaccactgttcgccaaggcaggggacacgctctcagggacatgtctgcttattgccaacaaaagacagagctacgacatcagtattgtggcccaggtggaccagaccggctccaagtccagtaacctcctggatctgaaaaaccccttctttagatacacgggcacaacgccctcacccccacccggctcccactacacatctccctcggaaaacatgtggaacacgggcagcacctacaacctcagcagcgggatggccgtggcagggatgccgaccgcctatgacttgagcagtgttattgccagtggctccagcgtgggccacaacaacctgattcctttagccaacacggggattgtcaatcacacccactcccggatgggctccataatgagcacggggattgtccaagggtcctccggcgcccagggcagtggtggtggcagcacgagtgcccactatgcagtcaacagccagttcaccatgggcggccccgccatctccatggcgtcgcccatgtccatcccgaccaacaccatgcactacgggagctaggggcccgccccgcggactgacagcaccaggaaaccaaatgatgtccctgcccgccgcccccgccgggcggctttcccccttgtactggagaagctcgaacacccggtcacagctctctttgctatgggaactgggacacttttttacacgatgttgccgccgtccccaccctaacccccacctcccggccctgagcgtgtgtcgctgccatattttacacaaaatcatgttgtgggagccctcgtcccccctcctgcccgctctaccctgacctgggcttgtcatctgctggaacaggcgccatggggcctgccagccctgcctgccaggtcccttagcacctgtccccctgcctgtctccagtgggaaggtagcctggccaggcggggcctccccttcgacgaccaggcctcggtcacaacggacgtgacatgctgctttttttaattttatttttttatgaaaagaaccagtgtcaatccgcagaccctctgtgaagccaggccggccgggccgagccagcagcccctctccctagactcagaggcgccgcggggaggggtggccccgccgaggcttcaggggccccctccccaccaaagggttcacctcacacttgaatgtacaacccaccccactgtcgggaaggcctccgtcctcggcccctgcctcttgctgctgtcctgtccccgagcccctgcaggtccccccccgcccccccactcaagagttagagcaggtggctgcaggccttgggcccggagggaaggccactgccggccacttggggcagacacagacacctcaaggatctgtcacggaaggcgtcctttttccttgtagctaacgttaggcctgagtagctcccctccatccttgtagacgctccagtccctactactgtgacggcatttccatccctcccctgcccgggaagggaccttgcagggacctctccctccaaaaaaagaaaaaaagaaaaagaaagaaaaaataaatgaggaaacgtgttgcagcacaggcagttttcttctccttctgctcccctgtttctcatacccccaaactcagatgctggagctcaggcccgccgtgtgtgcacccaggcaggagcgggcgctgtccaggctgggccgcccccttggctctccctcctgttccaggggagccataggagggaaagcaggtggcccgggggggatatgggggccccagccctgtcccaaagctccctgctcggctgcccctcgcccgcctttatataaattctctgaatcacctttgcatagaaaataaaagtgtttgctttgtaaga

SEQ ID NO: 359884 - DNA, 2360 bp, Homo sapiens
gcggcgctactactactatataattcgcgccgtcgacggtcaatcaagactccagaccttggggacagcggccctgcctgtgactggcacattgggctgcgtggctgtgctctgttgtcccaggctctgttgcctatgagggtgtggggagtgcgacgccagcccctgttctcctgtctgggaagcctcctggttcccacgccttccctgctggcaaggccaggaaatgctcttgccgctgcccccccttgccaggcttggccttgtactcacagtgacccccgctctcccccagattcttctgctgatcgacattgagcagtcctacatcaacacgaaccatgaggacttcatcgggtttgccaactgttactatactgagcagctggtgacctgtgcccagcagaggagcacgcagctgaacaagaagagagccatccccaatcaggtgatccgcaggggctggctgaccatcaacaacatcagcctgatgaaaggcggctccaaggagtactggtttgtgctgactgccgagtcactgtcctggtacaaggatgaggaggagaaagagaagaagtacatgctgcctctggacaacctcaagatccgtgatgtggagaagggcttcatgtccaacaagcacgtcttcgccatcttcaacacggagcagagaaacgtctacaaggacctgcggcagatcgagctggcctgtgactcccaggaagacgtggacagctggaaggcctcgttcctccgagctggcgtctaccccgagaaggaccaggcagaaaacgaggatggggcccaggagaacaccttctccatggacccccaactggagcggcaggtggagaccattcgcaacctggtggactcatacgtggccatcatcaacaagtccatccgcgacctcatgccaaagaccatcatgcacctcatgatcaacaatacgaaggccttcatccaccacgagctgctggcctacctatactcctcggcagaccagagcagcctcatggaggagtcggctgaccaggcacagcggcgggacgacatgctgcgcatgtaccatgccctcaaggaggcgctcaacatcatcggtgacatcagcaccagcactgtgtccacgcctgtacccccgcctgtcgatgacacctggctccagagcgccagcagccacagccccactccacagcgccgaccggtgtccagcatacacccccctggccggcccccagcagtgaggggccccactccagggccccccctgattcctgttcccgtgggggcagcagcctccttctcggcgcccccaatcccatcccggcctggaccccagagcgtgtttgccaacagtgacctcttcccagccccgcctcagatcccatctcggccagttcggatccccccagggattcccccaggagtgcccagcagaagaccccctgctgcgcccagccggcccaccattatccgcccagccgagccatccctgctcgactaggcctcgaggggggcgtgctctcgggggggcctcacgcacccgcggcgcaggagcttcagtggtctggggccctccgccgcccctatgctgggaccaggctcccagtgggcagccctggcctcttccttaacgctggccccggtccagggccggcccctgtgcctggctggacaccgcactgcgcaaaggggccctggagctccaggcagggggcgctggggtgttgcactttgggggatggagtctcagggtggcagaggggggaccagaacccttgacaccatcctgaatgaggggtccagcctgggggggactctaccaaggtcttcttgggctgggaaagcccatgtagggcaggccttctataagtgcgggcaccaagggcgcctacatccccaggccttgctggggtgcaggggtatatcaacttcccattagcaggagctccccagcggcaagcctggcccagtgggctcggtagtgcccagctggcaggcctgaggtgtacatagtccttcccggccatattaaccacacagcctgagcctggcccagcctcggctgccagaggtgcctttgctaggcccggagccgttggcccgggccggccttgccctattcctctcctcctcctcctcctgggtcccccagggtggctgggcttgggctatgtgggtggtggtggcggggggtcttgggggcctctcagctcccgcccatgcctccctgatgggtgggcccagggcggcctctctctgaggagacctcacccactcctcgctcagtttgaccactgtaagtgcctgcactctgtattctattaataaactaaaataaagggaagacgctgctggtg

SEQ ID NO: 359885 - DNA, 3762 bp, Homo sapiens
ggcctcggcctgcacggcggctgcggcggcggtagcggcagcggcggcggcggcggcggcggcggcggcggcggcggcggcggcggcggcagcggcggcggcctgggcccgggcgcacggcggcggcggcggggcctggagccggatctaagatggcagcggcggcggcggcggtggggccgggcgcgggcggcgcggggtcggcggtcccgggcggcgcggggccctgcgctaccgtgtcggtgttccccggcgcccgcctcctcaccatcggcgacgcgaacggcgagatccagcggcacgcggagcagcaggcgctgcgcctcgaggtgcgcgccggcccggactcggcgggcatcgccctctacagccatgaagatgtgtgtgtctttaagtgctcagtgtcccgagagacagagtgcagccgtgtgggcaagcagtccttcatcatcaccctgggctgcaacagcgtcctcatccagttcgccacacccaacgatttctgttccttctacaacatcctgaaaacctgccggggccacaccctggagcggtctgtgttcagcgagcggacggaggagtcttctgccgtgcagtacttccagttttatggctacctgtcccagcagcagaacatgatgcaggactacgtgcggacaggcacctaccagcgcgccatcctgcaaaaccacaccgacttcaaggacaagatcgttcttgatgttggctgtggctctgggatcctgtcgttttttgccgcccaagctggagcacggaaaatctacgcggtggaggccagcaccatggcccagcacgctgaggtcttggtgaagagtaacaacctgacggaccgcatcgtggtcatcccgggcaaggtggaggaggtgtcactccccgagcaggtggacatcatcatctcggagcccatgggctacatgctcttcaacgagcgcatgctggagagctacctccacgccaagaagtacctgaagcccagcggaaacatgtttcctaccattggtgacgtccaccttgcacccttcacggatgaacagctctacatggagcagttcaccaaggccaacttctggtaccagccatctttccatggagtggacctgtcggccctccgaggtgccgcggtggatgagtatttccggcagcctgtggtggacacatttgacatccggatcctgatggccaagtctgtcaagtacacggtgaacttcttagaagccaaagaaggagatttgcacaggatagaaatcccattcaaattccacatgctgcattcagggctggtccacggcctggctttctggtttgacgttgctttcatcggctccataatgaccgtgtggctgtccacagccccgacagagcccctgacccactggtaccaggtgcggtgcctgttccagtcaccactgttcgccaaggcaggggacacgctctcagggacatgtctgcttattgccaacaaaagacagagctacgacatcagtattgtggcccaggtggaccagaccggctccaagtccagtaacctcctggatctgaaaaaccccttctttagatacacgggcacaacgccctcacccccacccggctcccactacacatctccctcggaaaacatgtggaacacgggcagcacctacaacctcagcagcgggatggccgtggcagggatgccgaccgcctatgacttgagcagtgttattgccagtggctccagcgtgggccacaacaacctgattcctttagccaacacggggattgtcaatcacacccactcccggatgggctccataatgagcacggggattgtccaagggtcctccggcgcccagggcagtggtggtggcagcacgagtgcccactatgcagtcaacagccagttcaccatgggcggccccgccatctccatggcgtcgcccatgtccatcccgaccaacaccatgcactacgggagctaggggcccgccccgcggactgacagcaccaggaaaccaaatgatgtccctgcccgccgcccccgccgggcggctttcccccttgtactggagaagctcgaacacccggtcacagctctctttgctatgggaactgggacacttttttacacgatgttgccgccgtccccaccctaacccccacctcccggccctgagcgtgtgtcgctgccatattttacacaaaatcatgttgtgggagccctcgtcccccctcctgcccgctctaccctgacctgggcttgtcatctgctggaacaggcgccatggggcctgccagccctgcctgccaggtcccttagcacctgtccccctgcctgtctccagtgggaaggtagcctggccaggcggggcctccccttcgacgaccaggcctcggtcacaacggacgtgacatgctgctttttttaattttatttttttatgaaaagaaccagtgtcaatccgcagaccctctgtgaagccaggccggccgggccgagccagcagcccctctccctagactcagaggcgccgcggggaggggtggccccgccgaggcttcaggggccccctccccaccaaagggttcacctcacacttgaatgtacaacccaccccactgtcgggaaggcctccgtcctcggcccctgcctcttgctgctgtcctgtccccgagcccctgcaggtccccccccgcccccccactcaagagttagagcaggtggctgcaggccttgggcccggagggaaggccactgccggccacttggggcagacacagacacctcaaggatctgtcacggaaggcgtcctttttccttgtagctaacgttaggcctgagtagctcccctccatccttgtagacgctccagtccctactactgtgacggcatttccatccctcccctgcccgggaagggaccttgcagggacctctccctccaaaaaaagaaaaaaagaaaaagaaagaaaaaataaatgaggaaacgtgttgcagcacaggcagttttcttctccttctgctcccctgtttctcatacccccaaactcagatgctggagctcaggcccgccgtgtgtgcacccaggcaggagcgggcgctgtccaggctgggccgcccccttggctctccctcctgttccaggggagccataggagggaaagcaggtggcccgggggggatatgggggccccagccctgtcccaaagctccctgctcggctgcccctcgcccgcctttatataaattctctgaatcacctttgcatagaaaataaaagtgtttgctttgtaagaaaaaaaaaaaaaaaaaaaaaaaaaaaaaaaaaaaaaaaaaaaaaaaaaaaaaaaaaaaaaaaaaaaaaaaaacggaagagaaaaaaaaaaaaagccagccataagaagaagcaaataacacaaacagagacaaaagaatacaaacaacacaaagcgaagcaccagggacgcgcaacacaaaaaggcagcagcaagaaacaaagagagagcgagggcagacgaaccgaccgacaacacaacgacgcggagcgaggcagccgacaggacggagagaaaaagaacaacaggcacggcgacacacagacagacagcgggggcacaacgacaccacgcgaagcacgaagcccgtaataggaaacagcgaacccgagcctaacaagaagaccaaagaagaacgagcgaggaacgacacggagaagcgaagacagaaggcgaagaaacccaagaacgacgcgcagacgccagccc

SEQ ID NO: 359886 - DNA, 3225 bp, Homo sapiens
ggcctcggcctgcacggcggctgcggcggcggtagcggcagcggcggcggcggcggcggcggcggcggcggcggcggcggcggcggcggcagcggcggcggcctgggcccgggcgcacggcggcggcggcggggcctggagccggatctaagatggcagcggcggcggcggcggtggggccgggcgcgggcggcgcggggtcggcggtcccgggcggcgcggggccctgcgctaccgtgtcggtgttccccggcgcccgcctcctcaccatcggcgacgcgaacggcgagatccagcggcacgcggagcagcaggcgctgcgcctcgaggtgcgcgccggcccggactcggcgggcatcgccctctacagccatgaagatgtgtgtgtctttaagtgctcagtgtcccgagagacagagtgcagccgtgtgggcaagcagtccttcatcatcaccctgggctgcaacagcgtcctcatccagttcgccacacccaacgatttctgttccttctacaacatcctgaaaacctgccggggccacaccctggagcggtctgtgttcagcgagcggacggaggagtcttctgccgtgcagtacttccagttttatggctacctgtcccagcagcagaacatgatgcaggactacgtgcggacaggcacctaccagcgcgccatcctgcaaaaccacaccgacttcaaggacaagatcgttcttgatgttggctgtggctctgggatcctgtcgttttttgccgcccaagctggagcacggaaaatctacgcggtggaggccagcaccatggcccagcacgctgaggtcttggtgaagagtaacaacctgacggaccgcatcgtggtcatcccgggcaaggtggaggaggtgtcactccccgagcaggtggacatcatcatctcggagcccatgggctacatgctcttcaacgagcgcatgctggagagctacctccacgccaagaagtacctgaagcccagcggaaacatgtttcctaccattggtgacgtccaccttgcacccttcacggatgaacagctctacatggagcagttcaccaaggccaacttctggtaccagccatctttccatggagtggacctgtcggccctccgaggtgccgcggtggatgagtatttccggcagcctgtggtggacacatttgacatccggatcctgatggccaagtctgtcaagtacacggtgaacttcttagaagccaaagaaggagatttgcacaggatagaaatcccattcaaattccacatgctgcattcagggctggtccacggcctggctttctggtttgacgttgctttcatcggctccataatgaccgtgtggctgtccacagccccgacagagcccctgacccactggtaccaggtgcggtgcctgttccagtcaccactgttcgccaaggcaggggacacgctctcagggacatgtctgcttattgccaacaaaagacagagctacgacatcagtattgtggcccaggtggaccagaccggctccaagtccagtaacctcctggatctgaaaaaccccttctttagatacacgggcacaacgccctcacccccacccggctcccactacacatctccctcggaaaacatgtggaacacgggcagcacctacaacctcagcagcgggatggccgtggcagggatgccgaccgcctatgacttgagcagtgttattgccagtggctccagcgtgggccacaacaacctgattcctttagggtcctccggcgcccagggcagtggtggtggcagcacgagtgcccactatgcagtcaacagccagttcaccatgggcggccccgccatctccatggcgtcgcccatgtccatcccgaccaacaccatgcactacgggagctaggggcccgccccgcggactgacagcaccaggaaaccaaatgatgtccctgcccgccgcccccgccgggcggctttcccccttgtactggagaagctcgaacacccggtcacagctctctttgctatgggaactgggacacttttttacacgatgttgccgccgtccccaccctaacccccacctcccggccctgagcgtgtgtcgctgccatattttacacaaaatcatgttgtgggagccctcgtcccccctcctgcccgctctaccctgacctgggcttgtcatctgctggaacaggcgccatggggcctgccagccctgcctgccaggtcccttagcacctgtccccctgcctgtctccagtgggaaggtagcctggccaggcggggcctccccttcgacgaccaggcctcggtcacaacggacgtgacatgctgctttttttaattttatttttttatgaaaagaaccagtgtcaatccgcagaccctctgtgaagccaggccggccgggccgagccagcagcccctctccctagactcagaggcgccgcggggaggggtggccccgccgaggcttcaggggccccctccccaccaaagggttcacctcacacttgaatgtacaacccaccccactgtcgggaaggcctccgtcctcggcccctgcctcttgctgctgtcctgtccccgagcccctgcaggtccccccccgcccccccactcaagagttagagcaggtggctgcaggccttgggcccggagggaaggccactgccggccacttggggcagacacagacacctcaaggatctgtcacggaaggcgtcctttttccttgtagctaacgttaggcctgagtagctcccctccatccttgtagacgctccagtccctactactgtgacggcatttccatccctcccctgcccgggaagggaccttgcagggacctctccctccaaaaaaagaaaaaaagaaaaagaaagaaaaaataaatgaggaaacgtgttgcagcacaggcagttttcttctccttctgctcccctgtttctcatacccccaaactcagatgctggagctcaggcccgccgtgtgtgcacccaggcaggagcgggcgctgtccaggctgggccgcccccttggctctccctcctgttccaggggagccataggagggaaagcaggtggcccgggggggatatgggggccccagccctgtcccaaagctccctgctcggctgcccctcgcccgcctttatataaattctctgaatcacctttgcatagaaaataaaagtgtttgctttgtaaga

SEQ ID NO: 359887 - DNA, 1837 bp, Homo sapiens
  misc_feature (7)..(7): n is a, c, g, or t
aaactanggctaggtacgaggctgggtgtaatcggccgagagaaagagaagaagtacatgctgcctctggacaacctcaagatccgtgatgtggagaagggcttcatgtccaacaagcacgtcttcgccatcttcaacacggagcagagaaacgtctacaaggacctgcggcagatcgagctggcctgtgactcccaggaagacgtggacagctggaaggcctcgttcctccgagctggcgtctaccccgagaaggaccaggcagaaaacgaggatggggcccaggagaacaccttctccatggacccccaactggagcggcaggtggagaccattcgcaacctggtggactcatacgtggccatcatcaacaagtccatccgcgacctcatgccaaagaccatcatgcacctcatgatcaacaatacgaaggccttcatccaccacgagctgctggcctacctatactcctcggcagaccagagcagcctcatggaggagtcggctgaccaggcacagcggcgggacgacatgctgcgcatgtaccatgccctcaaggaggcgctcaacatcatcggtgacatcagcaccagcactgtgtccacgcctgtacccccgcctgtcgatgacacctggctccagagcgccagcagccacagccccactccacagcgccgaccggtgtccagcatacacccccctggccggcccccagcagtgaggggccccactccagggccccccctgattcctgttcccgtgggggcagcagcctccttctcggcgcccccaatcccatcccggcctggaccccagagcgtgtttgccaacagtgacctcttcccagccccgcctcagatcccatctcggccagttcggatccccccagggattcccccaggagtgcccagcagaagaccccctgctgcgcccagccggcccaccattatccgcccagccgagccatccctgctcgactaggcctcgaggggggcgtgctctcgggggggcctcacgcacccgcggcgcaggagcttcagtggtctggggccctccgccgcccctatgctgggaccaggctcccagtgggcagccctggcctcttccttaacgctggccccggtccagggccggcccctgtgcctggctggacaccgcactgcgcaaaggggccctggagctccaggcagggggcgctggggtgttgcactttgggggatggagtctcagggtggcagaggggggaccagaacccttgacaccatcctgaatgaggggtccagcctgggggggactctaccaaggtcttcttgggctgggaaagcccatgtagggcaggccttctataagtgcgggcaccaagggcgcctacatccccaggccttgctggggtgcaggggtatatcaacttcccattagcaggagctccccagcggcaagcctggcccagtgggctcggtagtgcccagctggcaggcctgaggtgtacatagtccttcccggccatattaaccacacagcctgagcctggcccagcctcggctgccagaggtgcctttgctaggcccggagccgttggcccgggccggccttgccctattcctctcctcctcctcctcctgggtcccccagggtggctgggcttgggctatgtgggtggtggtggcggggggtcttgggggcctctcagctcccgcccatgcctccctgatgggtgggcccagggcggcctctctctgaggagacctcacccactcctcgctcagtttgaccactgtaagtgcctgcactctgtattctattaataaactaaaataaagggaagacgctgctggtg

SEQ ID NO: 359888 - DNA, 2662 bp, Homo sapiens
gcagcactagtgttgttgttgtttttaagagacagggtctccctgtgtttcccaggcttgattcacactctcgggcttaagcgatcctcctgcctcagcctcctgagtagctggagttacaggcatacaattccacacccagctagcacctagttctttaacttgcttttttggttaacttgcttaatgatttagcttggagatctttcctcatctgttcataaagagcctcttcattctttctcacgtccgcatggtctttgatgggagagccatcactggtttaattagatggtttccagtgtgtcgctaccacggacaatctaattatacatgtaagtttgttgatgtgttcatgtatctggaggttaaactcctgtagtgccaaatcttttatgtggataaacacttgtcatttggagagctgtcacctgattgccctcggtggcgttgtgccggtcccctcctcacggcgtgtctgggaagagcaagctcgttttagctgcacagcctagaagccgtgggcagacctgggggaaggggcagggctctcccctcccatgctggccctggcgtcagatgccacgtcacacctgtggtctctcccaggacacatttgacatccggatcctgatggccaagtctgtcaagtacacggtgaacttcttagaagccaaagaaggagatttgcacaggatagaaatcccattcaaattccacatgctgcattcagggctggtccacggcctggctttctggtttgacgttgctttcatcggctccataatgaccgtgtggctgtccacagccccgacagagcccctgacccactggtaccaggtgcggtgcctgttccagtcaccactgttcgccaaggcaggggacacgctctcagggacatgtctgcttattgccaacaaaagacagagctacgacatcagtattgtggcccaggtggaccagaccggctccaagtccagtaacctcctggatctgaaaaaccccttctttagatacacgggcacaacgccctcacccccacccggctcccactacacatctccctcggaaaacatgtggaacacgggcagcacctacaacctcagcagcgggatggccgtggcagggatgccgaccgcctatgacttgagcagtgttattgccagtggctccagcgtgggccacaacaacctgattcctttagggtcctccggcgcccagggcagtggtggtggcagcacgagtgcccactatgcagtcaacagccagttcaccatgggcggccccgccatctccatggcgtcgcccatgtccatcccgaccaacaccatgcactacgggagctaggggcccgccccgcggactgacagcaccaggaaaccaaatgatgtccctgcccgccgcccccgccgggcggctttcccccttgtactggagaagctcgaacacccggtcacagctctctttgctatgggaactgggacacttttttacacgatgttgccgccgtccccaccctaacccccacctcccggccctgagcgtgtgtcgctgccatattttacacaaaatcatgttgtgggagccctcgtcccccctcctgcccgctctaccctgacctgggcttgtcatctgctggaacaggcgccatggggcctgccagccctgcctgccaggtcccttagcacctgtccccctgcctgtctccagtgggaaggtagcctggccaggcggggcctccccttcgacgaccaggcctcggtcacaacggacgtgacatgctgctttttttaattttatttttttatgaaaagaaccagtgtcaatccgcagaccctctgtgaagccaggccggccgggccgagccagcagcccctctccctagactcagaggcgccgcggggaggggtggccccgccgaggcttcaggggccccctccccaccaaagggttcacctcacacttgaatgtacaacccaccccactgtcgggaaggcctccgtcctcggcccctgcctcttgctgctgtcctgtccccgagcccctgcaggtccccccccgcccccccactcaagagttagagcaggtggctgcaggccttgggcccggagggaaggccactgccggccacttggggcagacacagacacctcaaggatctgtcacggaaggcgtcctttttccttgtagctaacgttaggcctgagtagctcccctccatccttgtagacgctccagtccctactactgtgacggcatttccatccctcccctgcccgggaagggaccttgcagggacctctccctccaaaaaaagaaaaaaagaaaaagaaagaaaaaataaatgaggaaacgtgttgcagcacaggcagttttcttctccttctgctcccctgtttctcatacccccaaactcagatgctggagctcaggcccgccgtgtgtgcacccaggcaggagcgggcgctgtccaggctgggccgcccccttggctctccctcctgttccaggggagccataggagggaaagcaggtggcccgggggggatatgggggccccagccctgtcccaaagctccctgctcggctgcccctcgcccgcctttatataaattctctgaatcacctttgcatagaaaataaaagtgtttgctttgtaaga

SEQ ID NO: 359889 - DNA, 2161 bp, Homo sapiens
gcttacctctgcagagcgaatggtgtaatcagcgccggtggcatgggataaacataacactctaggtcaaacaacagcgcagacaggtggaacccagtgcactcaactagacctctcgtcgtccctcgctcccctcttctctctcggcagcgcctgtctggcttccccagcagccactgccctttgccttccaggatagaaatcccattcaaattccacatgctgcattcagggctggtccacggcctggctttctggtttgacgttgctttcatcggctccataatgaccgtgtggctgtccacagccccgacagagcccctgacccactggtaccaggtgcggtgcctgttccagtcaccactgttcgccaaggcaggggacacgctctcagggacatgtctgcttattgccaacaaaagacagagctacgacatcagtattgtggcccaggtggaccagaccggctccaagtccagtaacctcctggatctgaaaaaccccttctttagatacacgggcacaacgccctcacccccacccggctcccactacacatctccctcggaaaacatgtggaacacgggcagcacctacaacctcagcagcgggatggccgtggcagggatgccgaccgcctatgacttgagcagtgttattgccagtggctccagcgtgggccacaacaacctgattcctttagggtcctccggcgcccagggcagtggtggtggcagcacgagtgcccactatgcagtcaacagccagttcaccatgggcggccccgccatctccatggcgtcgcccatgtccatcccgaccaacaccatgcactacgggagctaggggcccgccccgcggactgacagcaccaggaaaccaaatgatgtccctgcccgccgcccccgccgggcggctttcccccttgtactggagaagctcgaacacccggtcacagctctctttgctatgggaactgggacacttttttacacgatgttgccgccgtccccaccctaacccccacctcccggccctgagcgtgtgtcgctgccatattttacacaaaatcatgttgtgggagccctcgtcccccctcctgcccgctctaccctgacctgggcttgtcatctgctggaacaggcgccatggggcctgccagccctgcctgccaggtcccttagcacctgtccccctgcctgtctccagtgggaaggtagcctggccaggcggggcctccccttcgacgaccaggcctcggtcacaacggacgtgacatgctgctttttttaattttatttttttatgaaaagaaccagtgtcaatccgcagaccctctgtgaagccaggccggccgggccgagccagcagcccctctccctagactcagaggcgccgcggggaggggtggccccgccgaggcttcaggggccccctccccaccaaagggttcacctcacacttgaatgtacaacccaccccactgtcgggaaggcctccgtcctcggcccctgcctcttgctgctgtcctgtccccgagcccctgcaggtccccccccgcccccccactcaagagttagagcaggtggctgcaggccttgggcccggagggaaggccactgccggccacttggggcagacacagacacctcaaggatctgtcacggaaggcgtcctttttccttgtagctaacgttaggcctgagtagctcccctccatccttgtagacgctccagtccctactactgtgacggcatttccatccctcccctgcccgggaagggaccttgcagggacctctccctccaaaaaaagaaaaaaagaaaaagaaagaaaaaataaatgaggaaacgtgttgcagcacaggcagttttcttctccttctgctcccctgtttctcatacccccaaactcagatgctggagctcaggcccgccgtgtgtgcacccaggcaggagcgggcgctgtccaggctgggccgcccccttggctctccctcctgttccaggggagccataggagggaaagcaggtggcccgggggggatatgggggccccagccctgtcccaaagctccctgctcggctgcccctcgcccgcctttatataaattctctgaatcacctttgcatagaaaataaaagtgtttgctttgtaaga

SEQ ID NO: 359890 - DNA, 2112 bp, Homo sapiens
  misc_feature (7)..(7): n is a, c, g, or t
aaactanggctaggtacgaggctgggtgtaatcggccgagggacttcttagaagtcaaagaaggagatttgcacaggatagaaatcccattcaaattccacatgctgcattcagggctggtccacggcctggctttctggtttgacgttgctttcatcggctccataatgaccgtgtggctgtccacagccccgacagagcccctgacccactggtaccaggtgcggtgcctgttccagtcaccactgttcgccaaggcaggggacacgctctcagggacatgtctgcttattgccaacaaaagacagagctacgacatcagtattgtggcccaggtggaccagaccggctccaagtccagtaacctcctggatctgaaaaaccccttctttagatacacgggcacaacgccctcacccccacccggctcccactacacatctccctcggaaaacatgtggaacacgggcagcacctacaacctcagcagcgggatggccgtggcagggatgccgaccgcctatgacttgagcagtgttattgccagtggctccagcgtgggccacaacaacctgattcctttagccaacacggggattgtcaatcacacccactcccggatgggctccataatgagcacggggattgtccaagggtcctccggcgcccagggcagtggtggtggcagcacgagtgcccactatgcagtcaacagccagttcaccatgggcggccccgccatctccatggcgtcgcccatgtccatcccgaccaacaccatgcactacgggagctaggggcccgccccgcggactgacagcaccaggaaaccaaatgatgtccctgcccgccgcccccgccgggcggctttcccccttgtactggagaagctcgaacacccggtcacagctctctttgctatgggaactgggacacttttttacacgatgttgccgccgtccccaccctaacccccacctcccggccctgagcgtgtgtcgctgccatattttacacaaaatcatgttgtgggagccctcgtcccccctcctgcccgctctaccctgacctgggcttgtcatctgctggaacaggcgccatggggcctgccagccctgcctgccaggtcccttagcacctgtccccctgcctgtctccagtgggaaggtagcctggccaggcggggcctccccttcgacgaccaggcctcggtcacaacggacgtgacatgctgctttttttaattttatttttttatgaaaagaaccagtgtcaatccgcagaccctctgtgaagccaggccggccgggccgagccagcagcccctctccctagactcagaggcgccgcggggaggggtggccccgccgaggcttcaggggccccctccccaccaaagggttcacctcacacttgaatgtacaacccaccccactgtcgggaaggcctccgtcctcggcccctgcctcttgctgctgtcctgtccccgagcccctgcaggtccccccccgcccccccactcaagagttagagcaggtggctgcaggccttgggcccggagggaaggccactgccggccacttggggcagacacagacacctcaaggatctgtcacggaaggcgtcctttttccttgtagctaacgttaggcctgagtagctcccctccatccttgtagacgctccagtccctactactgtgacggcatttccatccctcccctgcccgggaagggaccttgcagggacctctccctccaaaaaaagaaaaaaagaaaaagaaagaaaaaataaatgaggaaacgtgttgcagcacaggcagttttcttctccttctgctcccctgtttctcatacccccaaactcagatgctggagctcaggcccgccgtgtgtgcacccaggcaggagcgggcgctgtccaggctgggccgcccccttggctctccctcctgttccaggggagccataggagggaaagcaggtggcccgggggggatatgggggccccagccctgtcccaaagctccctgctcggctgcccctcgcccgcctttatataaattctctgaatcacctttgcatagaaaataaaagtgtttgctttgtaaga

SEQ ID NO: 359891 - DNA, 2047 bp, Homo sapiens
ggcctcggcctgcacggcggctgcggcggcggtagcggcagcggcggcggcggcggcggcggcggcggcggcggcggcggcggcggcggcagcggcggcggcctgggcccgggcgcacggcggcggcggcggggcctggagccggatctaagatggcagcggcggcggcggcggtggggccgggcgcgggcggcgcggggtcggcggtcccgggcggcgcggggccctgcgctaccgtgtcggtgttccccggcgcccgcctcctcaccatcggcgacgcgaacggcgagatccagcggcacgcggagcagcaggcgctgcgcctcgaggtgcgcgccggcccggactcggcgggcatcgccctctacagccatgaagatgtgtgtgtctttaagtgctcagtgtcccgagagacagagtgcagccgtgtgggcaagcagtccttcatcatcaccctgggctgcaacagcgtcctcatccagttcgccacacccaacgatttctgttccttctacaacatcctgaaaacctgccggggccacaccctggagcggtctgtgttcagcgagcggacggaggagtcttctgccgtgcagtacttccagttttatggctacctgtcccagcagcagaacatgatgcaggactacgtgcggacaggcacctaccagcgcgccatcctgcaaaaccacaccgacttcaaggacaagatcgttcttgatgttggctgtggctctgggatcctgtcgttttttgccgcccaagctggagcacggaaaatctacgcggtggaggccagcaccatggcccagcacgctgaggtcttggtgaagagtaacaacctgacggaccgcatcgtggtcatcccgggcaaggtggaggaggtgtcactccccgagcaggtggacatcatcatctcggagcccatgggctacatgctcttcaacgagcgcatgctggagagctacctccacgccaagaagtacctgaagcccagcggaaacatgtttcctaccattggtgacgtccaccttgcacccttcacggatgaacagctctacatggagcagttcaccaaggccaacttctggtaccagccatctttccatggagtggacctgtcggccctccgaggtgccgcggtggatgagtatttccggcagcctgtggtggacacatttgacatccggatcctgatggccaagtctgtcaagtacacggtgaacttcttagaagccaaagaaggagatttgcacaggatagaaatcccattcaaattccacatgctgcattcagggctggtccacggcctggctttctggtttgacgttgctttcatcggctccataatgaccgtgtggctgtccacagccccgacagagcccctgacccactggtaccaggtgcggtgcctgttccagtcaccactgttcgccaaggcaggggacacgctctcagggacatgtctgcttattgccaacaaaagacagagctacgacatcagtattgtggcccaggtggaccagaccggctccaagtccagtaacctcctggatctgaaaaaccccttctttagatacacgggcacaacgccctcacccccacccggctcccactacacattccctactactgtgacggcatttccatccctcccctgcccgggaagggaccttgcagggacctctccctccaaaaaaagaaaaaaagaaaaagaaagaaaaaataaatgaggaaacgtgttgcagcacaggcagttttcttctccttctgctcccctgtttctcatacccccaaactcagatgctggagctcaggcccgccgtgtgtgcacccaggcaggagcgggcgctgtccaggctgggccgcccccttggctctccctcctgttccaggggagccataggagggaaagcaggtggcccgggggggatatgggggccccagccctgtcccaaagctccctgctcggctgcccctcgcccgcctttatataaattctctgaatcacctttgcatagaaaataaaagtgtttgctttgtaaga

SEQ ID NO: 359892 - DNA, 1145 bp, Homo sapiens
gcccagggagggcagggggctcactgagggtcaaacagcaggcgagttgatgcctaggtttggcactcctgcccgacaccctggtggcttgcggaggtcagcctgggaacaccctggggtggtgtgtgggtgggggctgggtcctcaacccaggcctgcctcttgctcccggcctcactgccgtctccccctccccacctgtctttattctctttgcagcagaagaccccctgctgcgcccagccggcccaccattatccgcccagccgagccatccctgctcgactaggcctcgaggggggcgtgctctcgggggggcctcacgcacccgcggcgcaggagcttcagtggtctggggccctccgccgcccctatgctgggaccaggctcccagtgggcagccctggcctcttccttaacgctggccccggtccagggccggcccctgtgcctggctggacaccgcactgcgcaaaggggccctggagctccaggcagggggcgctggggtgttgcactttgggggatggagtctcagggtggcagaggggggaccagaacccttgacaccatcctgaatgaggggtccagcctgggggggactctaccaaggtcttcttgggctgggaaagcccatgtagggcaggccttctataagtgcgggcaccaagggcgcctacatccccaggccttgctggggtgcaggggtatatcaacttcccattagcaggagctccccagcggcaagcctggcccagtgggctcggtagtgcccagctggcaggcctgaggtgtacatagtccttcccggccatattaaccacacagcctgagcctggcccagcctcggctgccagaggtgcctttgctaggcccggagccgttggcccgggccggccttgccctattcctctcctcctcctcctcctgggtcccccagggtggctgggcttgggctatgtgggtggtggtggcggggggtcttgggggcctctcagctcccgcccatgcctccctgatgggtgggcccagggcggcctctctctgaggagacctcacccactcctcgctcagtttgaccactgtaagtgcctgcactctgtattctattaataaactaaaataaagggaagacgctgctggtg

SEQ ID NO: 359893 - DNA, 2280 bp, Homo sapiens
tgtcgcctgagaaccggatgaggcggcgaccgtgaggccgagccgggagcgggcgtcttgccgaggcccgggcgggcggggagcaacggctacagacgccgcggggccaggtcgttgagggtcggcggcgggcgaggagcgcagggcgctcgggccgggggccgccggcgccatgggcaaccgcgggatggaagagctgatcccgctggtcaacaaactgcaggacgccttcagctccatcggccagagctgccacctggacctgccgcagatcgctgtagtgggcggccagagcgccggcaagagctcggtgctggagaacttcgtgggccgggacttccttccccgcggttcaggaatcgtcacccggcggcctctcattctgcagctcatcttctcaaaaacagaacatgccgagtttttgcactgcaagtccaaaaagtttacagactttgatgaagtccggcaggagattgaagcagagaccgacagggtcacggggaccaacaaaggcatctccccagtgcccatcaaccttcgagtctactcgccacacgtgttgaacttgaccctcatcgacctcccgggtatcaccaaggtgcctgtgggcgaccagcctccagacatcgagtaccagatcaaggacatgatcctgcagttcatcagccgggagagcagcctcattctggctgtcacgcccgccaacatggacctggccaactccgacgccctcaagctggccaaggaagtcgatccccaaggcctacggaccatcggtgtcatcaccaagcttgacctgatggacgagggcaccgacgccagggacgtcttggagaacaagttgctcccgttgagaagaggctacattggcgtggtgaaccgcagccagaaggatattgagggcaagaaggacatccgtgcagcactggcagctgagaggaagttcttcctctcccacccggcctaccggcacatggccgaccgcatgggcacgccacatctgcagaagacgctgaatcagcaactgaccaaccacatccgggagtcgctgccggccctacgtagcaaactacagagccagctgctgtccctggagaaggaggtggaggagtacaagaactttcggcccgacgaccccacccgcaaaaccaaagccctgctgcagatggtccagcagtttggggtggattttgagaagaggatcgagggctcaggagatcaggtggacactctggagctctccgggggcgcccgaatcaatcgcatcttccacgagcggttcccatttgagctggtgaagatggagtttgacgagaaggacttacgacgggagatcagctatgccattaagaacatccatggagtcaggacggggctcttcacccccgacatggcctttgaagccattgtgaaaaaacagattgtaaaactcaaagagccgagtttgaagtgtgttgatctcgtggtctcagagctggccacggtcataaaaaagtgtgccgagaaggtaacaggttttgttctcatctccgcatttgtccccgtcctccccctccatgtgttagtctcaacccgagcatctggaaaattcagcctcggcaggaacccccttccgcctaccagttgtcacttagagatgtcgccaccttgcattggcagatggaatggggggagtggcatcacacgtgggttgtggctgcccgtgggggcggtcagcctttgttgttgccaaacgcattgcatttactaagcagtgccctttcctggaacccctagagaaaggggtttcccagccagcaccaaaacagcaaaacacaggaaacacatcatctgtatagccctgcatgttctcacagtctaggccacctgagagtaaccattccattttccccgactcgtggacttgacccacactgcagaagatgggactcccctgtgcatgaggtctggttaagttggtgctgcagatgaagcctggggaggtgggggcatttggcgagtgtgtgccacagatacagtgatcaggagtggttctctgcaaggagttcctatcgaggctgatggcccagatacccgccttaccattctagaacagacgctactcactcacgctggcgaggcccttcagggttcctgctctcacccagtgctgggcaagaggggggtgccctgaagccctgcatggcaaacatgcccctgcttttctgctttcatgttgcctcctgcctcctgccccccggtcactggctggaaaagcagctctgctctcctgctgtctcc

SEQ ID NO: 359894 - DNA, 1390 bp, Homo sapiens
tgtcgcctgagaaccggatgaggcggcgaccgtgaggccgagccgggagcgggcgtcttgccgaggcccgggcgggcggggagcaacggctacagacgccgcggggccaggtcgttgagggtcggcggcgggcgaggagcgcagggcgctcgggccgggggccgccggcgccatgggcaaccgcgggatggaagagctgatcccgctggtcaacaaactgcaggacgccttcagctccatcggccagagctgccacctggacctgccgcagatcgctgtagtgggcggccagagcgccggcaagagctcggtgctggagaacttcgtgggccgggacttccttccccgcggttcaggaatcgtcacccggcggcctctcattctgcagctcatcttctcaaaaacagaacatgccgagtttttgcactgcaagtccaaaaagtttacagactttgatgaagtccggcaggagattgaagcagagaccgacagggtcacggggaccaacaaaggcatctccccagtgcccatcaaccttcgagtctactcgccacacgtgttgaacttgaccctcatcgacctcccgggtatcaccaaggtgcctgtgggcgaccagcctccagacatcgagtaccagatcaaggacatgatcctgcagttcatcagccgggagagcagcctcattctggctgtcacgcccgccaacatggacctggccaactccgacgccctcaagctggccaaggaagtcgatccccaaggcctacggaccatcggtgtcatcaccaagcttgacctgatggacgagggcaccgacgccagggacgtcttggagaacaagttgctcccgttgagaagaggctacattggcgtggtgaaccgcagccagaaggatattgagggcaagaaggacatccgtgcagcactggcagctgagaggaagttcttcctctcccacccggcctaccggcacatggccgaccgcatgggcacgccacatctgcagaagacgctgaatcagcaactgaccaaccacatccgggagtcgctgccggccctacgtagcaaactacagagccagctgctgtccctggagaaggaggtggaggagtacaagaactttcggcccgacgaccccacccgcaaaaccaaagccctgctgcatcctcctcctgggtcccccagggtggctgggcttgggctatgtgggtggtggtggcggggggtcttgggggcctctcagctcccgcccatgcctccctgatgggtgggcccagggcggcctctctctgaggagacctcacccactcctcgctcagtttgaccactgtaagtgcctgcactctgtattctattaataaactaaaataaagggaagacgctgctggtg

SEQ ID NO: 359895 - DNA, 1473 bp, Homo sapiens
ggcctcggcctgcacggcggctgcggcggcggtagcggcagcggcggcggcggcggcggcggcggcggcggcggcggcggcggcggcggcagcggcggcggcctgggcccgggcgcacggcggcggcggcggggcctggagccggatctaagatggcagcggcggcggcggcggtggggccgggcgcgggcggcgcggggtcggcggtcccgggcggcgcggggccctgcgctaccgtgtcggtgttccccggcgcccgcctcctcaccatcggcgacgcgaacggcgagatccagcggcacgcggagcagcaggcgctgcgcctcgaggtgcgcgccggcccggactcggcgggcatcgccctctacagccatgaagatgtgtgtgtctttaagtgctcagtgtcccgagagacagagtgcagccgtgtgggcaagcagtccttcatcatcaccctgggctgcaacagcgtcctcatccagttcgccacacccaacgatttctgttccttctacaacatcctgaaaacctgccggggccacaccctggagcggtctgtgttcagcgagcggacggaggagtcttctgccgtgcagtacttccagttttatggctacctgtcccagcagcagaacatgatgcaggactacgtgcggacaggcacctaccagcgcgccatcctgcaaaaccacaccgacttcaaggacaagatcgttcttgatgttggctgtggctctgggatcctgtcgttttttgccgcccaagctggagcacggaaaatctacgcggtggaggccagcaccatggcccagcacgctgaggtcttggtgaagagtaacaacctgacggaccgcatcgtggtcatcccgggcaaggtggaggaggtgtcactccccgagcaggtggacatcatcatctcggagcccatgggctacatgctcttcaacgagcgcatgctggagagctacctccacgccaagaagtacctgaagcccagcggaaacatgtttcctaccattggtgacgtccaccttgcacccttcacggatgaacagctctacatggagcagttcaccaaggccaacttctggtaccagccatctttccatggagtggacctgtcggccctccgaggtgccgcggtggatgagtatttccggcagcctgtggtggtgagtagggcctccagggtactgctgcagtgatcacttgccattgctgtgcagctgtgcagccctcaggaagctacagcccctctctgagccctctcctctgccctgcacagcgctctcacagagatttgggccaaaagtgtcaatgcatgtagacacttagcacacagcacacatgcaatacatgtggaacattattaggtgaggctaaggcagagggggcatttaggctcaggagttcaagatcagcctgggcaacacagagacgccatcgctatttttaaaattaaaataaataaat

SEQ ID NO: 359896 - DNA, 620 bp, Homo sapiens
ctggggaagagggatgggggggcccaccgaccccactcttctgctcttagctcccagctggactcactgggggccaggagcaaggtgtgggctcggtgggccccctcatatctcattccccacccccctccgcattttctacctgtgtggttcatgttgcttcccgtgccacgaggaccccgccaatgcgaccactctgcttgttcccccagctcagttcctacccccggttgcgagaggagacagagcgaatcgtcaccacttacatccgggaacgggaggggagaacgaaggaccagattcttctgctgatcgacattgagcagtcctacatcaacacgaaccatgaggacttcatcgggtttgccaaagtaggtacttttagagactggctggtcgggcggcaccaatcctcactctcagatccaaggaggtgactgagttgggattctctgagagggcaggtgtcagacagtctctgtcgggggtcctggggtgaaggcagagccaactgagaatatctggaagctctcctgggctgatagtggtccactgtccccaaccaacacgccttctgtgaggcatccccatggttagtttagggagagggcagtgctatg

SEQ ID NO: 359897 - DNA, 4994 bp, Homo sapiens
aacagcacgaaaatctcctgcccccaccccacccccaggtgattcccttcaccaagtctgggtctagacttggcccccgcgagttcacgtccctgcctaatgcgcctggagtccgggtgatggccctggatccgctcccggccccaagctccacacagccgggaaggaagctcgcgtttgttttgctggcgccagggatacggtccaggccccgccccgccccgcgctgatcccagggtagtgggaaagtgcgctccccaagaatttgcggtgcaggggccgcggccaccgccttctgtccgcaggtgctgcgagccgtaagcgccccccacccgcgctatgggctcggacgcctgggtgggcctttggcggccacaccggccccgcggccccatcgcggcgcactacggaggccccgggcccaaatacaagctgccgcccaacaccggtagaaggggcaggccccgggattgaggggtgggacggcgcctgggggagggaaggggaagagaccagggaggcctgcgctcggggctgaaccgtgcctgctagaggggagagggggtctgtgccgggggagggtccgtgttgcagatggggcttggggctgggcccggccagacgctaactcggatgctcccaggctacgccctgcatgacccgtcgcggccgcgcgcccccgccttcaccttcggcgcgcgcttccccacgcagcagacgacgtgcggccccgggccaggccacctggtgcccgctcgcatgaccgtgcgcggcaccgacggcgcccccgcctactccatctacggccgcccacgccgctcagcgcccttcctcactccgggacctggtcaggacccccgggcccctggccaccccaacgccgaactgcctccagggaggcccacctgggaacccccgacctgaaccccgagtccccctcggataccctaacaccgcatattcggtacccccatatccggatctcaaatcccaaaccccgaaccccacggggctttgataaatcgtggctcagactccccactagtcccaggaccccatctcgggtacccaccaggctcccacgcagttctagccccccacacccttgatccgccccgcaggcaggtacttcccggagcgagcggggaacgcgacgtaccccagtgcgcctcggcacaccattgctccccgaaactggggtgtccaggcggaacagcagagcccaggtcccgcggcctatacggtgccctcgctcttgggtccgcgcgtcatcggcaaagtctccgccccaacttgctccatctacggccgcagagcggctggcagtttcttcgaggacctcagcaaggtgggggaggggccggggcggacgcagggggtccctggtccgcggcagtggaggcggcagccagcaccctctgccctctcgcagaccccgggcccctgcgcctatcaggtcgtgagtccaggggtctacaagtcccgggccccccagttcacgattctggcgcggacttcgctcccccaagacaacactcggaagccagggcccgcggcctacaacgtggatcaggtggcctggagcccagggtcaagggtcagagtcaggagagtggggagggcctgaggtcggagtgatgggatcagagtccccgggggtccaggggtcccggcgcggagaggatgccggccccgcgaggtcagcggtgtctccgggcccgcagcaccggaagccccgcggctggagtttcgggatccggcactcggactacctggccccgctggtgaccgacgcggacaactgacccgccaggcgggagcggccccacacgtgtttgcttaaagtctgcgagtccgcatcgtgtccgcctctctctctctctctctgcgcgtcctggcgcaaggcctggggtggagccacggctggggccgtgtcccaactccgaacccagcggggcggggcccgagcgtcgggcgaggccgggaccccagcgctgcgccgcgtccgaacgtcgagaccccaccgagggcgggagggggactctcgggagccacagacgcccgagacccacgccgggcgggaccggccagggatcacccccgccgacggccccgggccccgacggcccggaagttccgcgtgtccgggggcaccgggggattggccggggcgcggcgtgcaaggcttcccgggggcggcgactgccgagctccgccctccaggcggccccacccgcctgccgtcctggggcgccgccgccccgccgccggcagtggaccgctgtgcgcgaaccctgaaccctacggtcccgacccgcgggcgaggccgggtacctgggctgggatccggagcaagcgggcgagggcagcgccctaagcaggcccggagcgatggcagccttgatgaccccgggaaccggggccccacccgcgcctggtgacttctccggggaagggagccaggacttcccgacccttcgccagagcccaagcagctcccggagctgatccgcatgaagcgagacggaggccgcctgagcgaagcggacatcaggggcttcgtggccgctgtggtgaatgggagcgcgcagggcgcacagatcggggccatgctgatggccatccgacttcggggcatggatctggaggagacctcggtgctgacccaggccctggctcagtcgggacagcagctggagtggccagaggcctggcgccagcagcttgtggacaagcattccacagggggtgtgggtgacaaggtcagcctggtcctcgcacctgccctggcggcatgtggctgcaaggtgccaatgatcagcggacgtggtctggggcacacaggaggcaccttggataagctggagtctattcctggattcaatgtcatccagagcccagagcagatgcaagtgctgctggaccaggcgggctgctgtatcgtgggtcagagtgagcagctggttcctgcggacggaatcctatatgcagccagagatgtgacagccaccgtggacagcctgccactcatcacagcctccattctcagtaagaaactcgtggaggggctgtccgctctggtggtggacgttaagttcggaggggccgccgtcttccccaaccaggagcaggcccgggagctggcaaagacgctggttggcgtgggagccagcctagggcttcgggtcgcggcagcgctgaccgccatggacaagcccctgggtcgctgcgtgggccacgccctggaggtggaggaggcgctgctctgcatggacggcgcaggcccgccagacttaagggacctggtcaccacgctcgggggcgccctgctctggctcagcggacacgcggggactcaggctcagggcgctgcccgggtggccgcggcgctggacgacggctcggcccttggccgcttcgagcggatgctggcggcgcagggcgtggatcccggtctggcccgagccctgtgctcgggaagtcccgcagaacgccggcagctgctgcctcgcgcccgggagcaggaggagctgctggcgcccgcagatggcaccgtggagctggtccgggcgctgccgctggcgctggtgctgcacgagctcggggccgggcgcagccgcgctggggagccgctccgcctgggggtgggcgcagagctgctggtcgacgtgggtcagaggctgcgccgtgggaccccctggctccgcgtgcaccgggacggccccgcgctcagcggcccgcagagccgcgccctgcaggaggcgctcgtactctccgaccgcgcgccattcgccgccccctcgcccttcgcagagctcgttctgccgccgcagcaataaagctcctttgccgcgaaaccttgtcagtgcttgggcgggagcggaaggatccagggctgcggaggcgggggccgtctcgatgaacacgtgacccccggcgggctccgccttccgcgcacgcgctgagagcctgtcagcggctgcgcccgtgtgcgcatgcgcagctccggggacgcctgcgccctgcctgtgagcgtgtggcgcccgctttccctgagccggcggggcagagcccagggagctggaggtcggcgcttcctctcgtgcttggtccactgacgcgcggccccgccgcgaggagcatcagatccatgctgctgctgactcggagccccacagcttggcacaggctctctcagctcaagcctccggtcctccctgggaccctgggaggccaggccctgcatctgaggtcctggcttttgtcaaggcagggccctgcagagacaggtgggcagggccagccccagggccctgggcttcgaacccggctgctgatcacaggcctgttcggggctggactcggtggggcctggctggccctgagggctgagaaggagaggctgcagcagcaaaagcgaacagaagccctgcgccaggcagctgtgggccagggcgacttccacctgctggatcacagaggccgggctcgctgcaaggctgacttccggggccagtgggtgctgatgtactttggcttcactcactgccctgacatctgcccagacgagctggagaagctggtgcaggtggtgcggcagctggaagcagagcctggtttgcctccagtgcagcctgtcttcatcactgtggaccccgagcgggacgacgttgaagccatggcccgctacgtccaggacttccacccaagactgttgggtctgaccggctccaccaaacaggttgcccaggctagtcacagttaccgcgtgtactacaatgccggccccaaggatgaggaccaggactacatcgtggaccactccattgccatctacctgctcaaccctgacggcctcttcacggattactacggccggagcagatcggctgagcagatctcagacagtgtgcggcggcacatggcggctttccgcagtgtcctgtcttgagccactgcagtctgggccccatcattaaacgggctgcgtttaa

SEQ ID NO: 359898 - DNA, 4919 bp, Homo sapiens
aacagcacgaaaatctcctgcccccaccccacccccaggtgattcccttcaccaagtctgggtctagacttggcccccgcgagttcacgtccctgcctaatgcgcctggagtccgggtgatggccctggatccgctcccggccccaagctccacacagccgggaaggaagctcgcgtttgttttgctggcgccagggatacggtccaggccccgccccgccccgcgctgatcccagggtagtgggaaagtgcgctccccaagaatttgcggtgcaggggccgcggccaccgccttctgtccgcaggtgctgcgagccgtaagcgccccccacccgcgctatgggctcggacgcctgggtgggcctttggcggccacaccggccccgcggccccatcgcggcgcactacggaggccccgggcccaaatacaagctgccgcccaacaccggtagaaggggcaggccccgggattgaggggtgggacggcgcctgggggagggaaggggaagagaccagggaggcctgcgctcggggctgaaccgtgcctgctagaggggagagggggtctgtgccgggggagggtccgtgttgcagatggggcttggggctgggcccggccagacgctaactcggatgctcccaggctacgccctgcatgacccgtcgcggccgcgcgcccccgccttcaccttcggcgcgcgcttccccacgcagcagacgacgtgcggccccgggccaggccacctggtgcccgctcgcatgaccgtgcgcggcaccgacggcgcccccgcctactccatctacggccgcccacgccgctcagcgcccttcctcactccgggacctggtcaggacccccgggcccctggccaccccaacgccgaactgcctccagggaggcccacctgggaacccccgacctgaaccccgagtccccctcggataccctaacaccgcatattcggtacccccatatccggatctcaaatcccaaaccccgaaccccacggggctttgataaatcgtggctcagactccccactagtcccaggaccccatctcgggtacccaccaggctcccacgcagttctagccccccacacccttgatccgccccgcaggcaggtacttcccggagcgagcggggaacgcgacgtaccccagtgcgcctcggcacaccattgctccccgaaactggggtgtccaggcggaacagcagagcccaggtcccgcggcctatacggtgccctcgctcttgggtccgcgcgtcatcggcaaagtctccgccccaacttgctccatctacggccgcagagcggctggcagtttcttcgaggacctcagcaaggtcgtgagtccaggggtctacaagtcccgggccccccagttcacgattctggcgcggacttcgctcccccaagacaacactcggaagccagggcccgcggcctacaacgtggatcagcaccggaagccccgcggctggagtttcgggatccggcactcggactacctggccccgctggtgaccgacgcggacaactgacccgccaggcgggagcggccccacacgtgtttgcttaaagtctgcgagtccgcatcgtgtccgcctctctctctctctctctgcgcgtcctggcgcaaggcctggggtggagccacggctggggccgtgtcccaactccgaacccagcggggcggggcccgagcgtcgggcgaggccgggaccccagcgctgcgccgcgtccgaacgtcgagaccccaccgagggcgggagggggactctcgggagccacagacgcccgagacccacgccgggcgggaccggccagggatcacccccgccgacggccccgggccccgacggcccggaagttccgcgtgtccgggggcaccgggggattggccggggcgcggcgtgcaaggcttcccgggggcggcgactgccgagctccgccctccaggcggccccacccgcctgccgtcctggggcgccgccgccccgccgccggcagtggaccgctgtgcgcgaaccctgaaccctacggtcccgacccgcgggcgaggccgggtacctgggctgggatccggagcaagcgggcgagggcagcgccctaagcaggtacgggcggggctcaagtcgcgaggcggggaagcgggaggcagacacggacgagggcgacacagacacgggaccgaggggcggacaccggagagacacgggaaaggggtcgggacaggagcacgtggctcagacaccgacgccgggaggccgcagaccccggacgtgtcaggcatccccgcaggcccggagcgatggcagccttgatgaccccgggaaccggggccccacccgcgcctggtgacttctccggggaagggagccaggacttcccgacccttcgccagagcccaagcagctcccggagctgatccgcatgaagcgagacggaggccgcctgagcgaagcggacatcaggggcttcgtggccgctgtggtgaatgggagcgcgcagggcgcacagatcggggccatgctgatggccatccgacttcggggcatggatctggaggagacctcggtgctgacccaggccctggctcagtcgggacagcagctggagtggccagaggcctggcgccagcagcttgtggacaagcattccacagggggtgtgggtgacaaggtcagcctggtcctcgcacctgccctggcggcatgtggctgcaaggtgccaatgatcagcggacgtggtctggggcacacaggaggcaccttggataagctggagtctattcctggattcaatgtcatccagagcccagagcagatgcaagtgctgctggaccaggcgggctgctgtatcgtgggtcagagtgagcagctggttcctgcggacggaatcctatatgcagccagagatgtgacagccaccgtggacagcctgccactcatcacagcctccattctcagtaagaaactcgtggaggggctgtccgctctggtggtggacgttaagttcggaggggccgccgtcttccccaaccaggagcaggcccgggagctggcaaagacgctggttggcgtgggagccagcctagggcttcgggtcgcggcagcgctgaccgccatggacaagcccctgggtcgctgcgtgggccacgccctggaggtggaggaggcgctgctctgcatggacggcgcaggcccgccagacttaagggacctggtcaccacgctcgggggcgccctgctctggctcagcggacacgcggggactcaggctcagggcgctgcccgggtggccgcggcgctggacgacggctcggcccttggccgcttcgagcggatgctggcggcgcagggcgtggatcccggtctggcccgagccctgtgctcgggaagtcccgcagaacgccggcagctgctgcctcgcgcccgggagcaggaggagctgctggcgcccgcagatggcaccgtggagctggtccgggcgctgccgctggcgctggtgctgcacgagctcggggccgggcgcagccgcgctggggagccgctccgcctgggggtgggcgcagagctgctggtcgacgtgggtcagaggctgcgccgtgggaccccctggctccgcgtgcaccgggacggccccgcgctcagcggcccgcagagccgcgccctgcaggaggcgctcgtactctccgaccgcgcgccattcgccgccccctcgcccttcgcagagctcgttctgccgccgcagcaataaagctcctttgccgcgaaaccttgtcagtgcttgggcgggagcggaaggatccagggctgcggaggcgggggccgtctcgatgaacacgtgacccccggcgggctccgccttccgcgcacgcgctgagagcctgtcagcggctgcgcccgtgtgcgcatgcgcagctccggggacgcctgcgccctgcctgtgagcgtgtggcgcccgctttccctgagccggcggggcagagcccagggagctggaggtcggcgcttcctctcgtgcttggtccactgacgcgcggccccgccgcgaggagcatcagatccatgctgctgctgactcggagccccacagcttggcacaggctctctcagctcaagcctccggtcctccctgggaccctgggaggccaggccctgcatctgaggtcctggcttttgtcaaggcagggccctgcagagacaggtgggcagggccagccccagggccctgggcttcgaacccggctgctgatcacaggcctgttcggggctggactcggtggggcctggctggccctgagggctgagaaggagaggctgcagcagcaaaagcgaacagaagccctgcgccaggcagctgtgggccagggcgacttccacctgctggatcacagaggccgggctcgctgcaaggctgacttccggggccagtgggtgctgatgtactttggcttcactcactgccctgacatctgcccagacgagctggagaagctggtgcaggtggtgcggcagctggaagcagagcctggtttgcctccagtgcagcctgtcttcatcactgtggaccccgagcgggacgacgttgaagccatggcccgctacgtccaggacttccacccaagactgttgggtctgaccggctccaccaaacaggttgcccaggctagtcacagttaccgcgtgtactacaatgccggccccaaggatgaggaccaggactacatcgtggaccactccattgccatctacctgctcaaccctgacggcctcttcacggattactacggccggagcagatcggctgagcagatctcagacagtgtgcggcggcacatggcggctttccgcagtgtcctgtcttgagccactgcagtctgggccccatcattaaacgggctgcgtttaa

SEQ ID NO: 359899 - DNA, 4863 bp, Homo sapiens
aacagcacgaaaatctcctgcccccaccccacccccaggtgattcccttcaccaagtctgggtctagacttggcccccgcgagttcacgtccctgcctaatgcgcctggagtccgggtgatggccctggatccgctcccggccccaagctccacacagccgggaaggaagctcgcgtttgttttgctggcgccagggatacggtccaggccccgccccgccccgcgctgatcccagggtagtgggaaagtgcgctccccaagaatttgcggtgcaggggccgcggccaccgccttctgtccgcaggtgctgcgagccgtaagcgccccccacccgcgctatgggctcggacgcctgggtgggcctttggcggccacaccggccccgcggccccatcgcggcgcactacggaggccccgggcccaaatacaagctgccgcccaacaccggtagaaggggcaggccccgggattgaggggtgggacggcgcctgggggagggaaggggaagagaccagggaggcctgcgctcggggctgaaccgtgcctgctagaggggagagggggtctgtgccgggggagggtccgtgttgcagatggggcttggggctgggcccggccagacgctaactcggatgctcccaggctacgccctgcatgacccgtcgcggccgcgcgcccccgccttcaccttcggcgcgcgcttccccacgcagcagacgacgtgcggccccgggccaggccacctggtgcccgctcgcatgaccgtgcgcggcaccgacggcgcccccgcctactccatctacggccgcccacgccgctcagcgcccttcctcactccgggacctggtcaggacccccgggcccctggccaccccaacgccgaactgcctccagggaggcccacctgggaacccccgacctgaaccccgagtccccctcggataccctaacaccgcatattcggtacccccatatccggatctcaaatcccaaaccccgaaccccacggggctttgataaatcgtggctcagactccccactagtcccaggaccccatctcgggtacccaccaggctcccacgcagttctagccccccacacccttgatccgccccgcaggcaggtacttcccggagcgagcggggaacgcgacgtaccccagtgcgcctcggcacaccattgctccccgaaactggggtgtccaggcggaacagcagagcccaggtcccgcggcctatacggtgccctcgctcttgggtccgcgcgtcatcggcaaagtctccgccccaacttgctccatctacggccgcagagcggctggcagtttcttcgaggacctcagcaagaccccgggcccctgcgcctatcaggtcgtgagtccaggggtctacaagtcccgggccccccagttcacgattctggcgcggacttcgctcccccaagacaacactcggaagccagggcccgcggcctacaacgtggatcagcaccggaagccccgcggctggagtttcgggatccggcactcggactacctggccccgctggtgaccgacgcggacaactgacccgccaggcgggagcggccccacacgtgtttgcttaaagtctgcgagtccgcatcgtgtccgcctctctctctctctctctgcgcgtcctggcgcaaggcctggggtggagccacggctggggccgtgtcccaactccgaacccagcggggcggggcccgagcgtcgggcgaggccgggaccccagcgctgcgccgcgtccgaacgtcgagaccccaccgagggcgggagggggactctcgggagccacagacgcccgagacccacgccgggcgggaccggccagggatcacccccgccgacggccccgggccccgacggcccggaagttccgcgtgtccgggggcaccgggggattggccggggcgcggcgtgcaaggcttcccgggggcggcgactgccgagctccgccctccaggcggccccacccgcctgccgtcctggggcgccgccgccccgccgccggcagtggaccgctgtgcgcgaaccctgaaccctacggtcccgacccgcgggcgaggccgggtacctgggctgggatccggagcaagcgggcgagggcagcgccctaagcaggcccggagcgatggcagccttgatgaccccgggaaccggggccccacccgcgcctggtgacttctccggggaagggagccaggacttcccgacccttcgccagagcccaagcagctcccggagctgatccgcatgaagcgagacggaggccgcctgagcgaagcggacatcaggggcttcgtggccgctgtggtgaatgggagcgcgcagggcgcacagatcggggccatgctgatggccatccgacttcggggcatggatctggaggagacctcggtgctgacccaggccctggctcagtcgggacagcagctggagtggccagaggcctggcgccagcagcttgtggacaagcattccacagggggtgtgggtgacaaggtcagcctggtcctcgcacctgccctggcggcatgtggctgcaaggtgccaatgatcagcggacgtggtctggggcacacaggaggcaccttggataagctggagtctattcctggattcaatgtcatccagagcccagagcagatgcaagtgctgctggaccaggcgggctgctgtatcgtgggtcagagtgagcagctggttcctgcggacggaatcctatatgcagccagagatgtgacagccaccgtggacagcctgccactcatcacagcctccattctcagtaagaaactcgtggaggggctgtccgctctggtggtggacgttaagttcggaggggccgccgtcttccccaaccaggagcaggcccgggagctggcaaagacgctggttggcgtgggagccagcctagggcttcgggtcgcggcagcgctgaccgccatggacaagcccctgggtcgctgcgtgggccacgccctggaggtggaggaggcgctgctctgcatggacggcgcaggcccgccagacttaagggacctggtcaccacgctcgggggcgccctgctctggctcagcggacacgcggggactcaggctcagggcgctgcccgggtggccgcggcgctggacgacggctcggcccttggccgcttcgagcggatgctggcggcgcagggcgtggatcccggtctggcccgagccctgtgctcgggaagtcccgcagaacgccggcagctgctgcctcgcgcccgggagcaggaggagctgctggcgcccgcagatggtgagcgtcgggggagtccccgtccttccgcctccgccatccccttcccttcccgaggccccgccccttcccgagcccgcgcctttcagcccctctccccgcaggcaccgtggagctggtccgggcgctgccgctggcgctggtgctgcacgagctcggggccgggcgcagccgcgctggggagccgctccgcctgggggtgggcgcagagctgctggtcgacgtgggtcagaggctgcgccgtgggaccccctggctccgcgtgcaccgggacggccccgcgctcagcggcccgcagagccgcgccctgcaggaggcgctcgtactctccgaccgcgcgccattcgccgccccctcgcccttcgcagagctcgttctgccgccgcagcaataaagctcctttgccgcgaaaccttgtcagtgcttgggcgggagcggaaggatccagggctgcggaggcgggggccgtctcgatgaacacgtgacccccggcgggctccgccttccgcgcacgcgctgagagcctgtcagcggctgcgcccgtgtgcgcatgcgcagctccggggacgcctgcgccctgcctgtgagcgtgtggcgcccgctttccctgagccggcggggcagagcccagggagctggaggtcggcgcttcctctcgtgcttggtccactgacgcgcggccccgccgcgaggagcatcagatccatgctgctgctgactcggagccccacagcttggcacaggctctctcagctcaagcctccggtcctccctgggaccctgggaggccaggccctgcatctgaggtcctggcttttgtcaaggcagggccctgcagagacaggtgggcagggccagccccagggccctgggcttcgaacccggctgctgatcacaggcctgttcggggctggactcggtggggcctggctggccctgagggctgagaaggagaggctgcagcagcaaaagcgaacagaagccctgcgccaggcagctgtgggccagggcgacttccacctgctggatcacagaggccgggctcgctgcaaggctgacttccggggccagtgggtgctgatgtactttggcttcactcactgccctgacatctgcccagacgagctggagaagctggtgcaggtggtgcggcagctggaagcagagcctggtttgcctccagtgcagcctgtcttcatcactgtggaccccgagcgggacgacgttgaagccatggcccgctacgtccaggacttccacccaagactgttgggtctgaccggctccaccaaacaggttgcccaggctagtcacagttaccgcgtgtactacaatgccggccccaaggatgaggaccaggactacatcgtggaccactccattgccatctacctgctcaaccctgacggcctcttcacggattactacggccggagcagatcggctgagcagatctcagacagtgtgcggcggcacatggcggctttccgcagtgtcctgtcttgagccactgcagtctgggccccatcattaaacgggctgcgtttaa

SEQ ID NO: 359900 - DNA, 5076 bp, Homo sapiens
aacagcacgaaaatctcctgcccccaccccacccccaggtgattcccttcaccaagtctgggtctagacttggcccccgcgagttcacgtccctgcctaatgcgcctggagtccgggtgatggccctggatccgctcccggccccaagctccacacagccgggaaggaagctcgcgtttgttttgctggcgccagggatacggtccaggccccgccccgccccgcgctgatcccagggtagtgggaaagtgcgctccccaagaatttgcggtgcaggggccgcggccaccgccttctgtccgcaggtgctgcgagccgtaagcgccccccacccgcgctatgggctcggacgcctgggtgggcctttggcggccacaccggccccgcggccccatcgcggcgcactacggaggccccgggcccaaatacaagctgccgcccaacaccggtagaaggggcaggccccgggattgaggggtgggacggcgcctgggggagggaaggggaagagaccagggaggcctgcgctcggggctgaaccgtgcctgctagaggggagagggggtctgtgccgggggagggtccgtgttgcagatggggcttggggctgggcccggccagacgctaactcggatgctcccaggctacgccctgcatgacccgtcgcggccgcgcgcccccgccttcaccttcggcgcgcgcttccccacgcagcagacgacgtgcggccccgggccaggccacctggtgcccgctcgcatgaccgtgcgcggcaccgacggcgcccccgcctactccatctacggccgcccacgccgctcagcgcccttcctcactccgggacctggtcaggacccccgggcccctggccaccccaacgccgaactgcctccagggaggcccacctgggaacccccgacctgaaccccgagtccccctcggataccctaacaccgcatattcggtacccccatatccggatctcaaatcccaaaccccgaaccccacggggctttgataaatcgtggctcagactccccactagtcccaggaccccatctcgggtacccaccaggctcccacgcagttctagccccccacacccttgatccgccccgcaggcaggtacttcccggagcgagcggggaacgcgacgtaccccagtgcgcctcggcacaccattgctccccgaaactggggtgtccaggcggaacagcagagcccaggtcccgcggcctatacggtgccctcgctcttgggtccgcgcgtcatcggcaaagtctccgccccaacttgctccatctacggccgcagagcggctggcagtttcttcgaggacctcagcaaggtcgtgagtccaggggtctacaagtcccgggccccccagttcacgattctggcgcggacttcgctcccccaagacaacactcggaagccagggcccgcggcctacaacgtggatcagcaccggaagccccgcggctggagtttcgggatccggcactcggactacctggccccgctggtgaccgacgcggacaactgacccgccaggcgggagcggccccacacgtgtttgcttaaagtctgcgagtccgcatcgtgtccgcctctctctctctctctctgcgcgtcctggcgcaaggcctggggtggagccacggctggggccgtgtcccaactccgaacccagcggggcggggcccgagcgtcgggcgaggccgggaccccagcgctgcgccgcgtccgaacgtcgagaccccaccgagggcgggagggggactctcgggagccacagacgcccgagacccacgccgggcgggaccggccagggatcacccccgccgacggccccgggccccgacggcccggaagttccgcgtgtccgggggcaccgggggattggccggggcgcggcgtgcaaggcttcccgggggcggcgactgccgagctccgccctccaggcggccccacccgcctgccgtcctggggcgccgccgccccgccgccggcagtggaccgctgtgcgcgaaccctgaaccctacggtcccgacccgcgggcgaggccgggtacctgggctgggatccggagcaagcgggcgagggcagcgccctaagcaggtacgggcggggctcaagtcgcgaggcggggaagcgggaggcagacacggacgagggcgacacagacacgggaccgaggggcggacaccggagagacacgggaaaggggtcgggacaggagcacgtggctcagacaccgacgccgggaggccgcagaccccggacgtgtcaggcatccccgcaggcccggagcgatggcagccttgatgaccccgggaaccggggccccacccgcgcctggtgacttctccggggaagggagccaggacttcccgacccttcgccagagcccaagcagctcccggagctgatccgcatgaagcgagacggaggccgcctgagcgaagcggacatcaggggcttcgtggccgctgtggtgaatgggagcgcgcagggcgcacagatcggtgcgtggggagggttgggcgttcctgaccccgactgggaggtcagcccgagagactttgggtccctgggggtgcgacggtgccccactaccagcaccggccccagggtgccccaccgctgtgggctgccaccctcacgcgtacccccacataccaggggccatgctgatggccatccgacttcggggcatggatctggaggagacctcggtgctgacccaggccctggctcagtcgggacagcagctggagtggccagaggcctggcgccagcagcttgtggacaagcattccacagggggtgtgggtgacaaggtcagcctggtcctcgcacctgccctggcggcatgtggctgcaaggtgccaatgatcagcggacgtggtctggggcacacaggaggcaccttggataagctggagtctattcctggattcaatgtcatccagagcccagagcagatgcaagtgctgctggaccaggcgggctgctgtatcgtgggtcagagtgagcagctggttcctgcggacggaatcctatatgcagccagagatgtgacagccaccgtggacagcctgccactcatcacagcctccattctcagtaagaaactcgtggaggggctgtccgctctggtggtggacgttaagttcggaggggccgccgtcttccccaaccaggagcaggcccgggagctggcaaagacgctggttggcgtgggagccagcctagggcttcgggtcgcggcagcgctgaccgccatggacaagcccctgggtcgctgcgtgggccacgccctggaggtggaggaggcgctgctctgcatggacggcgcaggcccgccagacttaagggacctggtcaccacgctcgggggcgccctgctctggctcagcggacacgcggggactcaggctcagggcgctgcccgggtggccgcggcgctggacgacggctcggcccttggccgcttcgagcggatgctggcggcgcagggcgtggatcccggtctggcccgagccctgtgctcgggaagtcccgcagaacgccggcagctgctgcctcgcgcccgggagcaggaggagctgctggcgcccgcagatggcaccgtggagctggtccgggcgctgccgctggcgctggtgctgcacgagctcggggccgggcgcagccgcgctggggagccgctccgcctgggggtgggcgcagagctgctggtcgacgtgggtcagaggctgcgccgtgggaccccctggctccgcgtgcaccgggacggccccgcgctcagcggcccgcagagccgcgccctgcaggaggcgctcgtactctccgaccgcgcgccattcgccgccccctcgcccttcgcagagctcgttctgccgccgcagcaataaagctcctttgccgcgaaaccttgtcagtgcttgggcgggagcggaaggatccagggctgcggaggcgggggccgtctcgatgaacacgtgacccccggcgggctccgccttccgcgcacgcgctgagagcctgtcagcggctgcgcccgtgtgcgcatgcgcagctccggggacgcctgcgccctgcctgtgagcgtgtggcgcccgctttccctgagccggcggggcagagcccagggagctggaggtcggcgcttcctctcgtgcttggtccactgacgcgcggccccgccgcgaggagcatcagatccatgctgctgctgactcggagccccacagcttggcacaggctctctcagctcaagcctccggtcctccctgggaccctgggaggccaggccctgcatctgaggtcctggcttttgtcaaggcagggccctgcagagacaggtgggcagggccagccccagggccctgggcttcgaacccggctgctgatcacaggcctgttcggggctggactcggtggggcctggctggccctgagggctgagaaggagaggctgcagcagcaaaagcgaacagaagccctgcgccaggcagctgtgggccagggcgacttccacctgctggatcacagaggccgggctcgctgcaaggctgacttccggggccagtgggtgctgatgtactttggcttcactcactgccctgacatctgcccagacgagctggagaagctggtgcaggtggtgcggcagctggaagcagagcctggtttgcctccagtgcagcctgtcttcatcactgtggaccccgagcgggacgacgttgaagccatggcccgctacgtccaggacttccacccaagactgttgggtctgaccggctccaccaaacaggttgcccaggctagtcacagttaccgcgtgtactacaatgccggccccaaggatgaggaccaggactacatcgtggaccactccattgccatctacctgctcaaccctgacggcctcttcacggattactacggccggagcagatcggctgagcagatctcagacagtgtgcggcggcacatggcggctttccgcagtgtcctgtcttgagccactgcagtctgggccccatcattaaacgggctgcgtttaa

SEQ ID NO: 359901 - DNA, 5713 bp, Homo sapiens
aacagcacgaaaatctcctgcccccaccccacccccaggtgattcccttcaccaagtctgggtctagacttggcccccgcgagttcacgtccctgcctaatgcgcctggagtccgggtgatggccctggatccgctcccggccccaagctccacacagccgggaaggaagctcgcgtttgttttgctggcgccagggatacggtccaggccccgccccgccccgcgctgatcccagggtagtgggaaagtgcgctccccaagaatttgcggtgcaggggccgcggccaccgccttctgtccgcaggtgctgcgagccgtaagcgccccccacccgcgctatgggctcggacgcctgggtgggcctttggcggccacaccggccccgcggccccatcgcggcgcactacggaggccccgggcccaaatacaagctgccgcccaacaccggtagaaggggcaggccccgggattgaggggtgggacggcgcctgggggagggaaggggaagagaccagggaggcctgcgctcggggctgaaccgtgcctgctagaggggagagggggtctgtgccgggggagggtccgtgttgcagatggggcttggggctgggcccggccagacgctaactcggatgctcccaggctacgccctgcatgacccgtcgcggccgcgcgcccccgccttcaccttcggcgcgcgcttccccacgcagcagacgacgtgcggccccgggccaggccacctggtgcccgctcgcatgaccgtgcgcggcaccgacggcgcccccgcctactccatctacggccgcccacgccgctcagcgcccttcctcactccgggacctggtcaggacccccgggcccctggccaccccaacgccgaactgcctccagggaggcccacctgggaacccccgacctgaaccccgagtccccctcggataccctaacaccgcatattcggtacccccatatccggatctcaaatcccaaaccccgaaccccacggggctttgataaatcgtggctcagactccccactagtcccaggaccccatctcgggtacccaccaggctcccacgcagttctagccccccacacccttgatccgccccgcaggcaggtacttcccggagcgagcggggaacgcgacgtaccccagtgcgcctcggcacaccattgctccccgaaactggggtgtccaggcggaacagcagagcccaggtcccgcggcctatacggtgccctcgctcttgggtccgcgcgtcatcggcaaagtctccgccccaacttgctccatctacggccgcagagcggctggcagtttcttcgaggacctcagcaaggtcgtgagtccaggggtctacaagtcccgggccccccagttcacgattctggcgcggacttcgctcccccaagacaacactcggaagccagggcccgcggcctacaacgtggatcagcaccggaagccccgcggctggagtttcgggatccggcactcggactacctggccccgctggtgaccgacgcggacaactgacccgccaggcgggagcggccccacacgtgtttgcttaaagtctgcgagtccgcatcgtgtccgcctctctctctctctctctgcgcgtcctggcgcaaggcctggggtggagccacggctggggccgtgtcccaactccgaacccagcggggcggggcccgagcgtcgggcgaggccgggaccccagcgctgcgccgcgtccgaacgtcgagaccccaccgagggcgggagggggactctcgggagccacagacgcccgagacccacgccgggcgggaccggccagggatcacccccgccgacggccccgggccccgacggcccggaagttccgcgtgtccgggggcaccgggggattggccggggcgcggcgtgcaaggcttcccgggggcggcgactgccgagctccgccctccaggcggccccacccgcctgccgtcctggggcgccgccgccccgccgccggcagtggaccgctgtgcgcgaaccctgaaccctacggtcccgacccgcgggcgaggccgggtacctgggctgggatccggagcaagcgggcgagggcagcgccctaagcaggtacgggcggggctcaagtcgcgaggcggggaagcgggaggcagacacggacgagggcgacacagacacgggaccgaggggcggacaccggagagacacgggaaaggggtcgggacaggagcacgtggctcagacaccgacgccgggaggccgcagaccccggacgtgtcaggcatccccgcaggcccggagcgatggcagccttgatgaccccgggaaccggggccccacccgcgcctggtgacttctccggggaagggagccaggacttcccgacccttcgccagagcccaagcagctcccggagctgatccgcatgaagcgagacggaggccgcctgagcgaagcggacatcaggggcttcgtggccgctgtggtgaatgggagcgcgcagggcgcacagatcggggccatgctgatggccatccgacttcggggcatggatctggaggagacctcggtgctgacccaggccctggctcagtcgggacagcagctggagtggccagaggcctggcgccagcagcttgtggacaagcattccacagggggtgtgggtgacaaggtcagcctggtcctcgcacctgccctggcggcatgtggctgcaaggtgccaatgatcagcggacgtggtctggggcacacaggaggcaccttggataagctggagtctattcctggattcaatgtcatccagagcccagagcaggtacggggcgccacggatcagtcattgatccaggttgatgatggagaccctggccagaatcactaaaagatcactggtggatcattagggtcactaatgagaacactggtcaaggttactcatgagtcactgggcctgggccgaaatcatcagtggaactttgattaggatcataaaatgggaagttggtcaaaatcacagatggctggcggggcacggtggctcacacctgtagtcctagcacttggggaggccgaagagggcagatcccttgaacccaggagttcaaaaccagcctggataacaaggcaaaaccccatctctacaaaatagttcgctgcgtgtggtggtgcacgcatgtggttccagctactcaggaggctgaggcaggaggatcacttgagcctgggaggtctaggctgcagtgagccgggacgatgccactgcactccagcctgggcaacagagtgagaccctgtcccagcactctgggaggcagaggagcccagttggagatcagcctgggtaatatagtgaaacttgatctctacaaaaaaaagaagaaaaaaaaaagccgcgtgtggtggtgcgcacctgtagtcccagctactgggaagctgaggtgggaggatcacttaagcccaggaggcagaggtcacaatgagccgaaattgtgccaactgcactccagcctgggcaacagaggaagactcttcacagaaaaaaaaaaaaaaaaaaaaaaagctgctaagtcatttaccataagtcactgagaacaggggatgtctgaccagatgcaagtgctgctggaccaggcgggctgctgtatcgtgggtcagagtgagcagctggttcctgcggacggaatcctatatgcagccagagatgtgacagccaccgtggacagcctgccactcatcacagcctccattctcagtaagaaactcgtggaggggctgtccgctctggtggtggacgttaagttcggaggggccgccgtcttccccaaccaggagcaggcccgggagctggcaaagacgctggttggcgtgggagccagcctagggcttcgggtcgcggcagcgctgaccgccatggacaagcccctgggtcgctgcgtgggccacgccctggaggtggaggaggcgctgctctgcatggacggcgcaggcccgccagacttaagggacctggtcaccacgctcgggggcgccctgctctggctcagcggacacgcggggactcaggctcagggcgctgcccgggtggccgcggcgctggacgacggctcggcccttggccgcttcgagcggatgctggcggcgcagggcgtggatcccggtctggcccgagccctgtgctcgggaagtcccgcagaacgccggcagctgctgcctcgcgcccgggagcaggaggagctgctggcgcccgcagatggcaccgtggagctggtccgggcgctgccgctggcgctggtgctgcacgagctcggggccgggcgcagccgcgctggggagccgctccgcctgggggtgggcgcagagctgctggtcgacgtgggtcagaggctgcgccgtgggaccccctggctccgcgtgcaccgggacggccccgcgctcagcggcccgcagagccgcgccctgcaggaggcgctcgtactctccgaccgcgcgccattcgccgccccctcgcccttcgcagagctcgttctgccgccgcagcaataaagctcctttgccgcgaaaccttgtcagtgcttgggcgggagcggaaggatccagggctgcggaggcgggggccgtctcgatgaacacgtgacccccggcgggctccgccttccgcgcacgcgctgagagcctgtcagcggctgcgcccgtgtgcgcatgcgcagctccggggacgcctgcgccctgcctgtgagcgtgtggcgcccgctttccctgagccggcggggcagagcccagggagctggaggtcggcgcttcctctcgtgcttggtccactgacgcgcggccccgccgcgaggagcatcagatccatgctgctgctgactcggagccccacagcttggcacaggctctctcagctcaagcctccggtcctccctgggaccctgggaggccaggccctgcatctgaggtcctggcttttgtcaaggcagggccctgcagagacaggtgggcagggccagccccagggccctgggcttcgaacccggctgctgatcacaggcctgttcggggctggactcggtggggcctggctggccctgagggctgagaaggagaggctgcagcagcaaaagcgaacagaagccctgcgccaggcagctgtgggccagggcgacttccacctgctggatcacagaggccgggctcgctgcaaggctgacttccggggccagtgggtgctgatgtactttggcttcactcactgccctgacatctgcccagacgagctggagaagctggtgcaggtggtgcggcagctggaagcagagcctggtttgcctccagtgcagcctgtcttcatcactgtggaccccgagcgggacgacgttgaagccatggcccgctacgtccaggacttccacccaagactgttgggtctgaccggctccaccaaacaggttgcccaggctagtcacagttaccgcgtgtactacaatgccggccccaaggatgaggaccaggactacatcgtggaccactccattgccatctacctgctcaaccctgacggcctcttcacggattactacggccggagcagatcggctgagcagatctcagacagtgtgcggcggcacatggcggctttccgcagtgtcctgtcttgagccactgcagtctgggccccatcattaaacgggctgcgtttaa

SEQ ID NO: 359902 - DNA, 6016 bp, Homo sapiens
aacagcacgaaaatctcctgcccccaccccacccccaggtgattcccttcaccaagtctgggtctagacttggcccccgcgagttcacgtccctgcctaatgcgcctggagtccgggtgatggccctggatccgctcccggccccaagctccacacagccgggaaggaagctcgcgtttgttttgctggcgccagggatacggtccaggccccgccccgccccgcgctgatcccagggtagtgggaaagtgcgctccccaagaatttgcggtgcaggggccgcggccaccgccttctgtccgcaggtgctgcgagccgtaagcgccccccacccgcgctatgggctcggacgcctgggtgggcctttggcggccacaccggccccgcggccccatcgcggcgcactacggaggccccgggcccaaatacaagctgccgcccaacaccggtagaaggggcaggccccgggattgaggggtgggacggcgcctgggggagggaaggggaagagaccagggaggcctgcgctcggggctgaaccgtgcctgctagaggggagagggggtctgtgccgggggagggtccgtgttgcagatggggcttggggctgggcccggccagacgctaactcggatgctcccaggctacgccctgcatgacccgtcgcggccgcgcgcccccgccttcaccttcggcgcgcgcttccccacgcagcagacgacgtgcggccccgggccaggccacctggtgcccgctcgcatgaccgtgcgcggcaccgacggcgcccccgcctactccatctacggccgcccacgccgctcagcgcccttcctcactccgggacctggtcaggacccccgggcccctggccaccccaacgccgaactgcctccagggaggcccacctgggaacccccgacctgaaccccgagtccccctcggataccctaacaccgcatattcggtacccccatatccggatctcaaatcccaaaccccgaaccccacggggctttgataaatcgtggctcagactccccactagtcccaggaccccatctcgggtacccaccaggctcccacgcagttctagccccccacacccttgatccgccccgcaggcaggtacttcccggagcgagcggggaacgcgacgtaccccagtgcgcctcggcacaccattgctccccgaaactggggtgtccaggcggaacagcagagcccaggtcccgcggcctatacggtgccctcgctcttgggtccgcgcgtcatcggcaaagtctccgccccaacttgctccatctacggccgcagagcggctggcagtttcttcgaggacctcagcaaggtcgtgagtccaggggtctacaagtcccgggccccccagttcacgattctggcgcggacttcgctcccccaagacaacactcggaagccagggcccgcggcctacaacgtggatcagcaccggaagccccgcggctggagtttcgggatccggcactcggactacctggccccgctggtgaccgacgcggacaactgacccgccaggcgggagcggccccacacgtgtttgcttaaagtctgcgagtccgcatcgtgtccgcctctctctctctctctctgcgcgtcctggcgcaaggcctggggtggagccacggctggggccgtgtcccaactccgaacccagcggggcggggcccgagcgtcgggcgaggccgggaccccagcgctgcgccgcgtccgaacgtcgagaccccaccgagggcgggagggggactctcgggagccacagacgcccgagacccacgccgggcgggaccggccagggatcacccccgccgacggccccgggccccgacggcccggaagttccgcgtgtccgggggcaccgggggattggccggggcgcggcgtgcaaggcttcccgggggcggcgactgccgagctccgccctccaggcggccccacccgcctgccgtcctggggcgccgccgccccgccgccggcagtggaccgctgtgcgcgaaccctgaaccctacggtcccgacccgcgggcgaggccgggtacctgggctgggatccggagcaagcgggcgagggcagcgccctaagcaggtacgggcggggctcaagtcgcgaggcggggaagcgggaggcagacacggacgagggcgacacagacacgggaccgaggggcggacaccggagagacacgggaaaggggtcgggacaggagcacgtggctcagacaccgacgccgggaggccgcagaccccggacgtgtcaggcatccccgcaggcccggagcgatggcagccttgatgaccccgggaaccggggccccacccgcgcctggtgacttctccggggaagggagccaggacttcccgacccttcgccagagcccaagcagctcccggagctgatccgcatgaagcgagacggaggccgcctgagcgaagcggacatcaggggcttcgtggccgctgtggtgaatgggagcgcgcagggcgcacagatcggggccatgctgatggccatccgacttcggggcatggatctggaggagacctcggtgctgacccaggccctggctcagtcgggacagcagctggagtggccagaggcctggcgccagcagcttgtggacaagcattccacagggggtgtgggtgacaaggtcagcctggtcctcgcacctgccctggcggcatgtggctgcaaggtgccaatgatcagcggacgtggtctggggcacacaggaggcaccttggataagctggagtctattcctggattcaatgtcatccagagcccagagcaggtacggggcgccacggatcagtcattgatccaggttgatgatggagaccctggccagaatcactaaaagatcactggtggatcattagggtcactaatgagaacactggtcaaggttactcatgagtcactgggcctgggccgaaatcatcagtggaactttgattaggatcataaaatgggaagttggtcaaaatcacagatggctggcggggcacggtggctcacacctgtagtcctagcacttggggaggccgaagagggcagatcccttgaacccaggagttcaaaaccagcctggataacaaggcaaaaccccatctctacaaaatagttcgctgcgtgtggtggtgcacgcatgtggttccagctactcaggaggctgaggcaggaggatcacttgagcctgggaggtctaggctgcagtgagccgggacgatgccactgcactccagcctgggcaacagagtgagaccctgtcccagcactctgggaggcagaggagcccagttggagatcagcctgggtaatatagtgaaacttgatctctacaaaaaaaagaagaaaaaaaaaagccgcgtgtggtggtgcgcacctgtagtcccagctactgggaagctgaggtgggaggatcacttaagcccaggaggcagaggtcacaatgagccgaaattgtgccaactgcactccagcctgggcaacagaggaagactcttcacagaaaaaaaaaaaaaaaaaaaaaaagctgctaagtcatttaccataagtcactgagaacaggggatgtctgaccagatgcaagtgctgctggaccaggcgggctgctgtatcgtgggtcagagtgagcagctggttcctgcggacggaatcctatatgcagccagagatgtgacagccaccgtggacagcctgccactcatcacaggtgacctgactccatggcctgcttctgcatgttcacaggctcctgacctccaaactcaagtcaagggcctctcgttaggagttacccgtcacctgaccgtgtgcccccctacccccatcacaagatgcctgaccaccaccatgtggggtggcctgatactcaacccaccaggtgctgccacccccataataagggacttgaccctcaatgctcagggcccctgaccccaaagtcggcatccccgaactctcccaagaagctccaggttctccattgtctccaacctcctctgcctcccccaagcctccattctcagtaagaaactcgtggaggggctgtccgctctggtggtggacgttaagttcggaggggccgccgtcttccccaaccaggagcaggcccgggagctggcaaagacgctggttggcgtgggagccagcctagggcttcgggtcgcggcagcgctgaccgccatggacaagcccctgggtcgctgcgtgggccacgccctggaggtggaggaggcgctgctctgcatggacggcgcaggcccgccagacttaagggacctggtcaccacgctcgggggcgccctgctctggctcagcggacacgcggggactcaggctcagggcgctgcccgggtggccgcggcgctggacgacggctcggcccttggccgcttcgagcggatgctggcggcgcagggcgtggatcccggtctggcccgagccctgtgctcgggaagtcccgcagaacgccggcagctgctgcctcgcgcccgggagcaggaggagctgctggcgcccgcagatggcaccgtggagctggtccgggcgctgccgctggcgctggtgctgcacgagctcggggccgggcgcagccgcgctggggagccgctccgcctgggggtgggcgcagagctgctggtcgacgtgggtcagaggctgcgccgtgggaccccctggctccgcgtgcaccgggacggccccgcgctcagcggcccgcagagccgcgccctgcaggaggcgctcgtactctccgaccgcgcgccattcgccgccccctcgcccttcgcagagctcgttctgccgccgcagcaataaagctcctttgccgcgaaaccttgtcagtgcttgggcgggagcggaaggatccagggctgcggaggcgggggccgtctcgatgaacacgtgacccccggcgggctccgccttccgcgcacgcgctgagagcctgtcagcggctgcgcccgtgtgcgcatgcgcagctccggggacgcctgcgccctgcctgtgagcgtgtggcgcccgctttccctgagccggcggggcagagcccagggagctggaggtcggcgcttcctctcgtgcttggtccactgacgcgcggccccgccgcgaggagcatcagatccatgctgctgctgactcggagccccacagcttggcacaggctctctcagctcaagcctccggtcctccctgggaccctgggaggccaggccctgcatctgaggtcctggcttttgtcaaggcagggccctgcagagacaggtgggcagggccagccccagggccctgggcttcgaacccggctgctgatcacaggcctgttcggggctggactcggtggggcctggctggccctgagggctgagaaggagaggctgcagcagcaaaagcgaacagaagccctgcgccaggcagctgtgggccagggcgacttccacctgctggatcacagaggccgggctcgctgcaaggctgacttccggggccagtgggtgctgatgtactttggcttcactcactgccctgacatctgcccagacgagctggagaagctggtgcaggtggtgcggcagctggaagcagagcctggtttgcctccagtgcagcctgtcttcatcactgtggaccccgagcgggacgacgttgaagccatggcccgctacgtccaggacttccacccaagactgttgggtctgaccggctccaccaaacaggttgcccaggctagtcacagttaccgcgtgtactacaatgccggccccaaggatgaggaccaggactacatcgtggaccactccattgccatctacctgctcaaccctgacggcctcttcacggattactacggccggagcagatcggctgagcagatctcagacagtgtgcggcggcacatggcggctttccgcagtgtcctgtcttgagccactgcagtctgggccccatcattaaacgggctgcgtttaa

SEQ ID NO: 359903 - DNA, 5179 bp, Homo sapiens
aacagcacgaaaatctcctgcccccaccccacccccaggtgattcccttcaccaagtctgggtctagacttggcccccgcgagttcacgtccctgcctaatgcgcctggagtccgggtgatggccctggatccgctcccggccccaagctccacacagccgggaaggaagctcgcgtttgttttgctggcgccagggatacggtccaggccccgccccgccccgcgctgatcccagggtagtgggaaagtgcgctccccaagaatttgcggtgcaggggccgcggccaccgccttctgtccgcaggtgctgcgagccgtaagcgccccccacccgcgctatgggctcggacgcctgggtgggcctttggcggccacaccggccccgcggccccatcgcggcgcactacggaggccccgggcccaaatacaagctgccgcccaacaccggtagaaggggcaggccccgggattgaggggtgggacggcgcctgggggagggaaggggaagagaccagggaggcctgcgctcggggctgaaccgtgcctgctagaggggagagggggtctgtgccgggggagggtccgtgttgcagatggggcttggggctgggcccggccagacgctaactcggatgctcccaggctacgccctgcatgacccgtcgcggccgcgcgcccccgccttcaccttcggcgcgcgcttccccacgcagcagacgacgtgcggccccgggccaggccacctggtgcccgctcgcatgaccgtgcgcggcaccgacggcgcccccgcctactccatctacggccgcccacgccgctcagcgcccttcctcactccgggacctggtcaggacccccgggcccctggccaccccaacgccgaactgcctccagggaggcccacctgggaacccccgacctgaaccccgagtccccctcggataccctaacaccgcatattcggtacccccatatccggatctcaaatcccaaaccccgaaccccacggggctttgataaatcgtggctcagactccccactagtcccaggaccccatctcgggtacccaccaggctcccacgcagttctagccccccacacccttgatccgccccgcaggcaggtacttcccggagcgagcggggaacgcgacgtaccccagtgcgcctcggcacaccattgctccccgaaactggggtgtccaggcggaacagcagagcccaggtcccgcggcctatacggtgccctcgctcttgggtccgcgcgtcatcggcaaagtctccgccccaacttgctccatctacggccgcagagcggctggcagtttcttcgaggacctcagcaagaccccgggcccctgcgcctatcaggtcgtgagtccaggggtctacaagtcccgggccccccagttcacgattctggcgcggacttcgctcccccaagacaacactcggaagccagggcccgcggcctacaacgtggatcagcaccggaagccccgcggctggagtttcgggatccggcactcggactacctggccccgctggtgaccgacgcggacaactgacccgccaggcgggagcggccccacacgtgtttgcttaaagtctgcgagtccgcatcgtgtccgcctctctctctctctctctgcgcgtcctggcgcaaggcctggggtggagccacggctggggccgtgtcccaactccgaacccagcggggcggggcccgagcgtcgggcgaggccgggaccccagcgctgcgccgcgtccgaacgtcgagaccccaccgagggcgggagggggactctcgggagccacagacgcccgagacccacgccgggcgggaccggccagggatcacccccgccgacggccccgggccccgacggcccggaagttccgcgtgtccgggggcaccgggggattggccggggcgcggcgtgcaaggcttcccgggggcggcgactgccgagctccgccctccaggcggccccacccgcctgccgtcctggggcgccgccgccccgccgccggcagtggaccgctgtgcgcgaaccctgaaccctacggtcccgacccgcgggcgaggccgggtacctgggctgggatccggagcaagcgggcgagggcagcgccctaagcaggcccggagcgatggcagccttgatgaccccgggaaccggggccccacccgcgcctggtgacttctccggggaagggagccaggacttcccgacccttcgccagagcccaagcagctcccggagctgatccgcatgaagcgagacggaggccgcctgagcgaagcggacatcaggggcttcgtggccgctgtggtgaatgggagcgcgcagggcgcacagatcggggccatgctgatggccatccgacttcggggcatggatctggaggagacctcggtgctgacccaggccctggctcagtcgggacagcagctggagtggccagaggcctggcgccagcagcttgtggacaagcattccacagggggtgtgggtgacaaggtcagcctggtcctcgcacctgccctggcggcatgtggctgcaaggtgccaatgatcagcggacgtggtctggggcacacaggaggcaccttggataagctggagtctattcctggattcaatgtcatccagagcccagagcagatgcaagtgctgctggaccaggcgggctgctgtatcgtgggtcagagtgagcagctggttcctgcggacggaatcctatatgcagccagagatgtgacagccaccgtggacagcctgccactcatcacagcctccattctcagtaagaaactcgtggaggggctgtccgctctggtggtggacgttaagttcggaggggccgccgtcttccccaaccaggagcaggcccgggagctggcaaagacgctggttggcgtgggagccagcctagggcttcgggtcgcggcagcgctgaccgccatggacaagcccctgggtcgctgcgtgggccacgccctggaggtggaggaggcgctgctctgcatggacggcgcaggcccgccagacttaagggacctggtcaccacgctcgggggcgccctgctctggctcagcggacacgcggggactcaggctcagggcgctgcccgggtggccgcggcgctggacgacggctcggcccttggccgcttcgagcggatgctggcggcgcagggcgtggatcccggtctggcccgagccctgtgctcgggaagtcccgcagaacgccggcagctgctgcctcgcgcccgggagcaggaggagctgctggcgcccgcagatggcaccgtggagctggtccgggcgctgccgctggcgctggtgctgcacgagctcggggccgggcgcagccgcgctggggagccgctccgcctgggggtgggcgcagagctgctggtcgacgtgggtcagaggctgcgccgtgggaccccctggctccgcgtgcaccgggacggccccgcgctcagcggcccgcagagccgcgccctgcaggaggcgctcgtactctccgaccgcgcgccattcgccgccccctcgcccttcgcagagctcgttctgccgccgcagcaataaagctcctttgccgcgaaaccttgtcagtgcttgggcgggagcggaaggatccagggctgcggaggcgggggccgtctcgatgaacacgtgacccccggcgggctccgccttccgcgcacgcgctgagagcctgtcagcggctgcgcccgtgtgcgcatgcgcagctccggggacgcctgcgccctgcctgtgagcgtgtggcgcccgctttccctgagccggcggggcagagcccagggagctggaggtcggcgcttcctctcgtgcttggtccactgacgcgcggccccgccgcgaggagcatcagatccatgctgctgctgactcggagccccacagcttggcacaggctctctcagctcaagcctccggtcctccctgggaccctgggaggccaggccctgcatctgaggtcctggcttttgtcaaggcagggccctgcagagacaggtgggcagggccagccccagggccctgggcttcgaacccggctgctgatcacaggcctgttcggggctggactcggtggggcctggctggccctgagggctgagaaggagaggctgcagcagcaaaagcgaacagaagccctgcgccaggcagctgtgggccagggcgacttccacctgctggatcacagaggccgggctcgctgcaaggctgacttccggggccagtgggtgctgatgtactttggcttcactcactgccctgacatctgcccagacgagctggagaagctggtgcaggtggtgcggcagctggaagcagagcctggtttgcctccagtgcagcctgtcttcatcactgtggaccccgagcgggacgacgttgaagccatggcccgctacgtccaggacttccacccaagactgttgggtctgaccggctccaccaaacaggttgcccaggctagtcacagttaccgcgtgtactacaatgccggccccaaggatgaggaccaggactacatcgtggaccactccattgccatctacctgctcaaccctgacggcctcttcacggattactacggccggagcagatcggctgagcagatctcagacagtgtgcggcggcacatggcggctttccgcagtgtcctgtcttgagccactgcagtctgggccccatcattaaacgggctgcgtttaaaaaaaaataaaaaaagaaaaaaaaagagggcgggcaggcaagaaaatttcccgtggaggggcccaaagcgaaagccgtacccgggttttctggatcaaaaggggccctatttcgggggagggtcgcagataatagagttcagtgccttggggcccatcatcttgcaggacttgcgtagtcggagccaaggtgctcacgttggccgtgctcttgcgaaggaaacgctgattccccggggggcgtccccgtctttggcgcacccatctaaccctagcaggagattaggagcctcccaggtgtgaaatttaggattccaaagtctgttctactcgtggtaaaaggcagccggctaatgcagtagcccgcttgaaaatttggctactacgggcatggttatgggaaggttttttttcccggggc

SEQ ID NO: 359904 - DNA, 4803 bp, Homo sapiens
aacagcacgaaaatctcctgcccccaccccacccccaggtgattcccttcaccaagtctgggtctagacttggcccccgcgagttcacgtccctgcctaatgcgcctggagtccgggtgatggccctggatccgctcccggccccaagctccacacagccgggaaggaagctcgcgtttgttttgctggcgccagggatacggtccaggccccgccccgccccgcgctgatcccagggtagtgggaaagtgcgctccccaagaatttgcggtgcaggggccgcggccaccgccttctgtccgcaggtgctgcgagccgtaagcgccccccacccgcgctatgggctcggacgcctgggtgggcctttggcggccacaccggccccgcggccccatcgcggcgcactacggaggccccgggcccaaatacaagctgccgcccaacaccggtagaaggggcaggccccgggattgaggggtgggacggcgcctgggggagggaaggggaagagaccagggaggcctgcgctcggggctgaaccgtgcctgctagaggggagagggggtctgtgccgggggagggtccgtgttgcagatggggcttggggctgggcccggccagacgctaactcggatgctcccaggctacgccctgcatgacccgtcgcggccgcgcgcccccgccttcaccttcggcgcgcgcttccccacgcagcagacgacgtgcggccccgggccaggccacctggtgcccgctcgcatgaccgtgcgcggcaccgacggcgcccccgcctactccatctacggccgcccacgccgctcagcgcccttcctcactccgggacctggtcaggacccccgggcccctggccaccccaacgccgaactgcctccagggaggcccacctgggaacccccgacctgaaccccgagtccccctcggataccctaacaccgcatattcggtacccccatatccggatctcaaatcccaaaccccgaaccccacggggctttgataaatcgtggctcagactccccactagtcccaggaccccatctcgggtacccaccaggctcccacgcagttctagccccccacacccttgatccgccccgcaggcaggtacttcccggagcgagcggggaacgcgacgtaccccagtgcgcctcggcacaccattgctccccgaaactggggtgtccaggcggaacagcagagcccaggtcccgcggcctatacggtgccctcgctcttgggtccgcgcgtcatcggcaaagtctccgccccaacttgctccatctacggccgcagagcggctggcagtttcttcgaggacctcagcaagaccccgggcccctgcgcctatcaggtcgtgagtccaggggtctacaagtcccgggccccccagttcacgattctggcgcggacttcgctcccccaagacaacactcggaagccagggcccgcggcctacaacgtggatcagcaccggaagccccgcggctggagtttcgggatccggcactcggactacctggccccgctggtgaccgacgcggacaactgacccgccaggcgggagcggccccacacgtgtttgcttaaagtctgcgagtccgcatcgtgtccgcctctctctctctctctctgcgcgtcctggcgcaaggcctggggtggagccacggctggggccgtgtcccaactccgaacccagcggggcggggcccgagcgtcgggcgaggccgggaccccagcgctgcgccgcgtccgaacgtcgagaccccaccgagggcgggagggggactctcgggagccacagacgcccgagacccacgccgggcgggaccggccagggatcacccccgccgacggccccgggccccgacggcccggaagttccgcgtgtccgggggcaccgggggattggccggggcgcggcgtgcaaggcttcccgggggcggcgactgccgagctccgccctccaggcggccccacccgcctgccgtcctggggcgccgccgccccgccgccggcagtggaccgctgtgcgcgaaccctgaaccctacggtcccgacccgcgggcgaggccgggtacctgggctgggatccggagcaagcgggcgagggcagcgccctaagcaggcccggagcgatggcagccttgatgaccccgggaaccggggccccacccgcgcctggtgacttctccggggaagggagccaggacttcccgacccttcgccagagcccaagcagctcccggagctgatccgcatgaagcgagacggaggccgcctgagcgaagcggacatcaggggcttcgtggccgctgtggtgaatgggagcgcgcagggcgcacagatcggggccatgctgatggccatccgacttcggggcatggatctggaggagacctcggtgctgacccaggccctggctcagtcgggacagcagctggagtggccagaggcctggcgccagcagcttgtggacaagcattccacagggggtgtgggtgacaaggtcagcctggtcctcgcacctgccctggcggcatgtggctgcaaggtgccaatgatcagcggacgtggtctggggcacacaggaggcaccttggataagctggagtctattcctggattcaatgtcatccagagcccagagcagatgcaagtgctgctggaccaggcgggctgctgtatcgtgggtcagagtgagcagctggttcctgcggacggaatcctatatgcagccagagatgtgacagccaccgtggacagcctgccactcatcacagctccaggttctccattgtctccaacctcctctgcctcccccaagcctccattctcagtaagaaactcgtggaggggctgtccgctctggtggtggacgttaagttcggaggggccgccgtcttccccaaccaggagcaggcccgggagctggcaaagacgctggttggcgtgggagccagcctagggcttcgggtcgcggcagcgctgaccgccatggacaagcccctgggtcgctgcgtgggccacgccctggaggtggaggaggcgctgctctgcatggacggcgcaggcccgccagacttaagggacctggtcaccacgctcgggggcgccctgctctggctcagcggacacgcggggactcaggctcagggcgctgcccgggtggccgcggcgctggacgacggctcggcccttggccgcttcgagcggatgctggcggcgcagggcgtggatcccggtctggcccgagccctgtgctcgggaagtcccgcagaacgccggcagctgctgcctcgcgcccgggagcaggaggagctgctggcgcccgcagatggcaccgtggagctggtccgggcgctgccgctggcgctggtgctgcacgagctcggggccgggcgcagccgcgctggggagccgctccgcctgggggtgggcgcagagctgctggtcgacgtgggtcagaggctgcgccgtgggaccccctggctccgcgtgcaccgggacggccccgcgctcagcggcccgcagagccgcgccctgcaggaggcgctcgtactctccgaccgcgcgccattcgccgccccctcgcccttcgcagagctcgttctgccgccgcagcaataaagctcctttgccgcgaaaccttgtcagtgcttgggcgggagcggaaggatccagggctgcggaggcgggggccgtctcgatgaacacgtgacccccggcgggctccgccttccgcgcacgcgctgagagcctgtcagcggctgcgcccgtgtgcgcatgcgcagctccggggacgcctgcgccctgcctgtgagcgtgtggcgcccgctttccctgagccggcggggcagagcccagggagctggaggtcggcgcttcctctcgtgcttggtccactgacgcgcggccccgccgcgaggagcatcagatccatgctgctgctgactcggagccccacagcttggcacaggctctctcagctcaagcctccggtcctccctgggaccctgggaggccaggccctgcatctgaggtcctggcttttgtcaaggcagggccctgcagagacaggtgggcagggccagccccagggccctgggcttcgaacccggctgctgatcacaggcctgttcggggctggactcggtggggcctggctggccctgagggctgagaaggagaggctgcagcagcaaaagcgaacagaagccctgcgccaggcagctgtgggccagggcgacttccacctgctggatcacagaggccgggctcgctgcaaggctgacttccggggccagtgggtgctgatgtactttggcttcactcactgccctgacatctgcccagacgagctggagaagctggtgcaggtggtgcggcagctggaagcagagcctggtttgcctccagtgcagcctgtcttcatcactgtggaccccgagcgggacgacgttgaagccatggcccgctacgtccaggacttccacccaagactgttgggtctgaccggctccaccaaacaggttgcccaggctagtcacagttaccgcgtgtactacaatgccggccccaaggatgaggaccaggactacatcgtggaccactccattgccatctacctgctcaaccctgacggcctcttcacggattactacggccggagcagatcggctgagcagatctcagacagtgtgcggcggcacatggcggctttccgcagtgtcctgtcttgagccactgcagtctgggccccatcattaaacgggctgcgtttaa

SEQ ID NO: 359905 - DNA, 4639 bp, Homo sapiens
aacagcacgaaaatctcctgcccccaccccacccccaggtgattcccttcaccaagtctgggtctagacttggcccccgcgagttcacgtccctgcctaatgcgcctggagtccgggtgatggccctggatccgctcccggccccaagctccacacagccgggaaggaagctcgcgtttgttttgctggcgccagggatacggtccaggccccgccccgccccgcgctgatcccagggtagtgggaaagtgcgctccccaagaatttgcggtgcaggggccgcggccaccgccttctgtccgcaggtgctgcgagccgtaagcgccccccacccgcgctatgggctcggacgcctgggtgggcctttggcggccacaccggccccgcggccccatcgcggcgcactacggaggccccgggcccaaatacaagctgccgcccaacaccggtagaaggggcaggccccgggattgaggggtgggacggcgcctgggggagggaaggggaagagaccagggaggcctgcgctcggggctgaaccgtgcctgctagaggggagagggggtctgtgccgggggagggtccgtgttgcagatggggcttggggctgggcccggccagacgctaactcggatgctcccaggctacgccctgcatgacccgtcgcggccgcgcgcccccgccttcaccttcggcgcgcgcttccccacgcagcagacgacgtgcggccccgggccaggccacctggtgcccgctcgcatgaccgtgcgcggcaccgacggcgcccccgcctactccatctacggccgcccacgccgctcagcgcccttcctcactccgggacctggtcaggacccccgggcccctggccaccccaacgccgaactgcctccagggaggcccacctgggaacccccgacctgaaccccgagtccccctcggataccctaacaccgcatattcggtacccccatatccggatctcaaatcccaaaccccgaaccccacggggctttgataaatcgtggctcagactccccactagtcccaggaccccatctcgggtacccaccaggctcccacgcagttctagccccccacacccttgatccgccccgcaggcaggtacttcccggagcgagcggggaacgcgacgtaccccagtgcgcctcggcacaccattgctccccgaaactggggtgtccaggcggaacagcagagcccaggtcccgcggcctatacggtgccctcgctcttgggtccgcgcgtcatcggcaaagtctccgccccaacttgctccatctacggccgcagagcggctggcagtttcttcgaggacctcagcaagaccccgggcccctgcgcctatcaggtcgtgagtccaggggtctacaagtcccgggccccccagttcacgattctggcgcggacttcgctcccccaagacaacactcggaagccagggcccgcggcctacaacgtggatcagcaccggaagccccgcggctggagtttcgggatccggcactcggactacctggccccgctggtgaccgacgcggacaactgacccgccaggcgggagcggccccacacgtgtttgcttaaagtctgcgagtccgcatcgtgtccgcctctctctctctctctctgcgcgtcctggcgcaaggcctggggtggagccacggctggggccgtgtcccaactccgaacccagcggggcggggcccgagcgtcgggcgaggccgggaccccagcgctgcgccgcgtccgaacgtcgagaccccaccgagggcgggagggggactctcgggagccacagacgcccgagacccacgccgggcgggaccggccagggatcacccccgccgacggccccgggccccgacggcccggaagttccgcgtgtccgggggcaccgggggattggccggggcgcggcgtgcaaggcttcccgggggcggcgactgccgagctccgccctccaggcggccccacccgcctgccgtcctggggcgccgccgccccgccgccggcagtggaccgctgtgcgcgaaccctgaaccctacggtcccgacccgcgggcgaggccgggtacctgggctgggatccggagcaagcgggcgagggcagcgccctaagcaggcccggagcgatggcagccttgatgaccccgggaaccggggccccacccgcgcctggtgacttctccggggaagggagccaggacttcccgacccttcgccagagcccaagcagctcccggagctgatccgcatgaagcgagacggaggccgcctgagcgaagcggacatcaggggcttcgtggccgctgtggtgaatgggagcgcgcagggcgcacagatcggggccatgctgatggccatccgacttcggggcatggatctggaggagacctcggtgctgacccaggccctggctcagtcgggacagcagctggagtggccagaggcctggcgccagcagcttgtggacaagcattccacagggggtgtgggtgacaaggtcagcctggtcctcgcacctgccctggcggcatgtggctgcaaggtgccaatgatcagcggacgtggtctggggcacacaggaggcaccttggataagctggagtctattcctggattcaatgtcatccagagcccagagcagatgcaagtgctgctggaccaggcgggctgctgtatcgtgggtcagagtgagcagctggttcctgcggacggaatcctatatgcagccagagatgtgacagccaccgtggacagcctgccactcatcacggttggcgtgggagccagcctagggcttcgggtcgcggcagcgctgaccgccatggacaagcccctgggtcgctgcgtgggccacgccctggaggtggaggaggcgctgctctgcatggacggcgcaggcccgccagacttaagggacctggtcaccacgctcgggggcgccctgctctggctcagcggacacgcggggactcaggctcagggcgctgcccgggtggccgcggcgctggacgacggctcggcccttggccgcttcgagcggatgctggcggcgcagggcgtggatcccggtctggcccgagccctgtgctcgggaagtcccgcagaacgccggcagctgctgcctcgcgcccgggagcaggaggagctgctggcgcccgcagatggcaccgtggagctggtccgggcgctgccgctggcgctggtgctgcacgagctcggggccgggcgcagccgcgctggggagccgctccgcctgggggtgggcgcagagctgctggtcgacgtgggtcagaggctgcgccgtgggaccccctggctccgcgtgcaccgggacggccccgcgctcagcggcccgcagagccgcgccctgcaggaggcgctcgtactctccgaccgcgcgccattcgccgccccctcgcccttcgcagagctcgttctgccgccgcagcaataaagctcctttgccgcgaaaccttgtcagtgcttgggcgggagcggaaggatccagggctgcggaggcgggggccgtctcgatgaacacgtgacccccggcgggctccgccttccgcgcacgcgctgagagcctgtcagcggctgcgcccgtgtgcgcatgcgcagctccggggacgcctgcgccctgcctgtgagcgtgtggcgcccgctttccctgagccggcggggcagagcccagggagctggaggtcggcgcttcctctcgtgcttggtccactgacgcgcggccccgccgcgaggagcatcagatccatgctgctgctgactcggagccccacagcttggcacaggctctctcagctcaagcctccggtcctccctgggaccctgggaggccaggccctgcatctgaggtcctggcttttgtcaaggcagggccctgcagagacaggtgggcagggccagccccagggccctgggcttcgaacccggctgctgatcacaggcctgttcggggctggactcggtggggcctggctggccctgagggctgagaaggagaggctgcagcagcaaaagcgaacagaagccctgcgccaggcagctgtgggccagggcgacttccacctgctggatcacagaggccgggctcgctgcaaggctgacttccggggccagtgggtgctgatgtactttggcttcactcactgccctgacatctgcccagacgagctggagaagctggtgcaggtggtgcggcagctggaagcagagcctggtttgcctccagtgcagcctgtcttcatcactgtggaccccgagcgggacgacgttgaagccatggcccgctacgtccaggacttccacccaagactgttgggtctgaccggctccaccaaacaggttgcccaggctagtcacagttaccgcgtgtactacaatgccggccccaaggatgaggaccaggactacatcgtggaccactccattgccatctacctgctcaaccctgacggcctcttcacggattactacggccggagcagatcggctgagcagatctcagacagtgtgcggcggcacatggcggctttccgcagtgtcctgtcttgagccactgcagtctgggccccatcattaaacgggctgcgtttaa

SEQ ID NO: 359906 - DNA, 3367 bp, Homo sapiens
cacagttctccccaccccgttccccagcacagcgcttggggcccctctggctccagaccaggccccttggagcaggaaaaagatccactgatggaattcagacccctttccccttgggtccccagacagctcccccaagggaggagctgaggacttccctccctctgccccaagccttgtttccccaaggacaggtaccaacctcctcccctactgacacttctcaaccaagaaaacttcctttccattccctcaccagctgggcacccctatagctgcttaaatactttccaaatccagctgcactcctagccagggaaggtgaagggatgcacagaggtgggggaggggtactgtgcagggtactcagcatccctgaccaccaggtgccaatgatcagcggacgtggtctggggcacacaggaggcaccttggataagctggagtctattcctggattcaatgtcatccagagcccagagcaggtacggggcgccacggatcagtcattgatccaggttgatgatggagaccctggccagaatcactaaaagatcactggtggatcattagggtcactaatgagaacactggtcaaggttactcatgagtcactgggcctgggccgaaatcatcagtggaactttgattaggatcataaaatgggaagttggtcaaaatcacagatggctggcggggcacggtggctcacacctgtagtcctagcacttggggaggccgaagagggcagatcccttgaacccaggagttcaaaaccagcctggataacaaggcaaaaccccatctctacaaaatagttcgctgcgtgtggtggtgcacgcatgtggttccagctactcaggaggctgaggcaggaggatcacttgagcctgggaggtctaggctgcagtgagccgggacgatgccactgcactccagcctgggcaacagagtgagaccctgtcccagcactctgggaggcagaggagcccagttggagatcagcctgggtaatatagtgaaacttgatctctacaaaaaaaagaagaaaaaaaaaagccgcgtgtggtggtgcgcacctgtagtcccagctactgggaagctgaggtgggaggatcacttaagcccaggaggcagaggtcacaatgagccgaaattgtgccaactgcactccagcctgggcaacagaggaagactcttcacagaaaaaaaaaaaaaaaaaaaaaaagctgctaagtcatttaccataagtcactgagaacaggggatgtctgaccagatgcaagtgctgctggaccaggcgggctgctgtatcgtgggtcagagtgagcagctggttcctgcggacggaatcctatatgcagccagagatgtgacagccaccgtggacagcctgccactcatcacagcctccattctcagtaagaaactcgtggaggggctgtccgctctggtggtggacgttaagttcggaggggccgccgtcttccccaaccaggagcaggcccgggagctggcaaagacgctggttggcgtgggagccagcctagggcttcgggtcgcggcagcgctgaccgccatggacaagcccctgggtcgctgcgtgggccacgccctggaggtggaggaggcgctgctctgcatggacggcgcaggcccgccagacttaagggacctggtcaccacgctcgggggcgccctgctctggctcagcggacacgcggggactcaggctcagggcgctgcccgggtggccgcggcgctggacgacggctcggcccttggccgcttcgagcggatgctggcggcgcagggcgtggatcccggtctggcccgagccctgtgctcgggaagtcccgcagaacgccggcagctgctgcctcgcgcccgggagcaggaggagctgctggcgcccgcagatggcaccgtggagctggtccgggcgctgccgctggcgctggtgctgcacgagctcggggccgggcgcagccgcgctggggagccgctccgcctgggggtgggcgcagagctgctggtcgacgtgggtcagaggctgcgccgtgggaccccctggctccgcgtgcaccgggacggccccgcgctcagcggcccgcagagccgcgccctgcaggaggcgctcgtactctccgaccgcgcgccattcgccgccccctcgcccttcgcagagctcgttctgccgccgcagcaataaagctcctttgccgcgaaaccttgtcagtgcttgggcgggagcggaaggatccagggctgcggaggcgggggccgtctcgatgaacacgtgacccccggcgggctccgccttccgcgcacgcgctgagagcctgtcagcggctgcgcccgtgtgcgcatgcgcagctccggggacgcctgcgccctgcctgtgagcgtgtggcgcccgctttccctgagccggcggggcagagcccagggagctggaggtcggcgcttcctctcgtgcttggtccactgacgcgcggccccgccgcgaggagcatcagatccatgctgctgctgactcggagccccacagcttggcacaggctctctcagctcaagcctccggtcctccctgggaccctgggaggccaggccctgcatctgaggtcctggcttttgtcaaggcagggccctgcagagacaggtgggcagggccagccccagggccctgggcttcgaacccggctgctgatcacaggcctgttcggggctggactcggtggggcctggctggccctgagggctgagaaggagaggctgcagcagcaaaagcgaacagaagccctgcgccaggcagctgtgggccagggcgacttccacctgctggatcacagaggccgggctcgctgcaaggctgacttccggggccagtgggtgctgatgtactttggcttcactcactgccctgacatctgcccagacgagctggagaagctggtgcaggtggtgcggcagctggaagcagagcctggtttgcctccagtgcagcctgtcttcatcactgtggaccccgagcgggacgacgttgaagccatggcccgctacgtccaggacttccacccaagactgttgggtctgaccggctccaccaaacaggttgcccaggctagtcacagttaccgcgtgtactacaatgccggccccaaggatgaggaccaggactacatcgtggaccactccattgccatctacctgctcaaccctgacggcctcttcacggattactacggccggagcagatcggctgagcagatctcagacagtgtgcggcggcacatggcggctttccgcagtgtcctgtcttgagccactgcagtctgggccccatcattaaacgggctgcgtttaa

SEQ ID NO: 359907 - DNA, 4311 bp, Homo sapiens
aacagcacgaaaatctcctgcccccaccccacccccaggtgattcccttcaccaagtctgggtctagacttggcccccgcgagttcacgtccctgcctaatgcgcctggagtccgggtgatggccctggatccgctcccggccccaagctccacacagccgggaaggaagctcgcgtttgttttgctggcgccagggatacggtccaggccccgccccgccccgcgctgatcccagggtagtgggaaagtgcgctccccaagaatttgcggtgcaggggccgcggccaccgccttctgtccgcaggtgctgcgagccgtaagcgccccccacccgcgctatgggctcggacgcctgggtgggcctttggcggccacaccggccccgcggccccatcgcggcgcactacggaggccccgggcccaaatacaagctgccgcccaacaccggtagaaggggcaggccccgggattgaggggtgggacggcgcctgggggagggaaggggaagagaccagggaggcctgcgctcggggctgaaccgtgcctgctagaggggagagggggtctgtgccgggggagggtccgtgttgcagatggggcttggggctgggcccggccagacgctaactcggatgctcccaggctacgccctgcatgacccgtcgcggccgcgcgcccccgccttcaccttcggcgcgcgcttccccacgcagcagacgacgtgcggccccgggccaggccacctggtgcccgctcgcatgaccgtgcgcggcaccgacggcgcccccgcctactccatctacggccgcccacgccgctcagcgcccttcctcactccgggacctggtcaggacccccgggcccctggccaccccaacgccgaactgcctccagggaggcccacctgggaacccccgacctgaaccccgagtccccctcggataccctaacaccgcatattcggtacccccatatccggatctcaaatcccaaaccccgaaccccacggggctttgataaatcgtggctcagactccccactagtcccaggaccccatctcgggtacccaccaggctcccacgcagttctagccccccacacccttgatccgccccgcaggcaggtacttcccggagcgagcggggaacgcgacgtaccccagtgcgcctcggcacaccattgctccccgaaactggggtgtccaggcggaacagcagagcccaggtcccgcggcctatacggtgccctcgctcttgggtccgcgcgtcatcggcaaagtctccgccccaacttgctccatctacggccgcagagcggctggcagtttcttcgaggacctcagcaagaccccgggcccctgcgcctatcaggtcgtgagtccaggggtctacaagtcccgggccccccagttcacgattctggcgcggacttcgctcccccaagacaacactcggaagccagggcccgcggcctacaacgtggatcagcaccggaagccccgcggctggagtttcgggatccggcactcggactacctggccccgctggtgaccgacgcggacaactgacccgccaggcgggagcggccccacacgtgtttgcttaaagtctgcgagtccgcatcgtgtccgcctctctctctctctctctgcgcgtcctggcgcaaggcctggggtggagccacggctggggccgtgtcccaactccgaacccagcggggcggggcccgagcgtcgggcgaggccgggaccccagcgctgcgccgcgtccgaacgtcgagaccccaccgagggcgggagggggactctcgggagccacagacgcccgagacccacgccgggcgggaccggccagggatcacccccgccgacggccccgggccccgacggcccggaagttccgcgtgtccgggggcaccgggggattggccggggcgcggcgtgcaaggcttcccgggggcggcgactgccgagctccgccctccaggcggccccacccgcctgccgtcctggggcgccgccgccccgccgccggcagtggaccgctgtgcgcgaaccctgaaccctacggtcccgacccgcgggcgaggccgggtacctgggctgggatccggagcaagcgggcgagggcagcgccctaagcaggcccggagcgatggcagccttgatgaccccgggaaccggggccccacccgcgcctggtgacttctccggggaagggagccaggacttcccgacccttcgccagagcccaagcagctcccggagctgatccgcatgaagcgagacggaggccgcctgagcgaagcggacatcaggggcttcgtggccgctgtggtgaatgggagcgcgcagggcgcacagatcggggccatgctgatggccatccgacttcggggcatggatctggaggagacctcggtgctgacccaggccctggctcagtcgggacagcagctggagtggccagaggcctggcgccagcagcttgtggacaagcattccacagggggtgtgggtgacaaggtcagcctggtcctcgcacctgccctggcggcatgtggctgcaaggtgccaatgatcagcggacgtggtctggggcacacaggaggcaccttggataagctggagtctattcctggattcaatgtcatccagagcccagagcagatgcaagtgctgctggaccaggcgggctgctgtatcgtgggtcagagtgagcagctggttcctgcggacggaatcctatatgcagccagagatgtgacagccaccgtggacagcctgccactcatcacagcctccattctcagtaagaaactcgtggaggggctgtccgctctggtggtggacgttaagttcggaggggccgccgtcttccccaaccaggagcaggcccgggagctggcaaagacgctggttggcgtgggagccagcctagggcttcgggtcgcggcagcgctgaccgccatggacaagcccctgggtcgctgcgtgggccacgccctggaggtggaggaggcgctgctctgcatggacggcgcaggcccgccagacttaagggacctggtcaccacgctcgggggcgccctgctctggctcagcggacacgcggggactcaggctcagggcgctgcccgggtggccgcggcgctggacgacggctcggcccttggccgcttcgagcggatgctggcggcgcagggcgtggatcccggtctggcccgagccctgtgctcgggaagtcccgcagaacgccggcagctgctgcctcgcgcccgggagcaggaggagctgctggcgcccgcagatggcaccgtggagctggtccgggcgctgccgctggcgctggtgctgcacgagctcggggccgggcgcagccgcgctggggagccgctccgcctgggggtgggcgcagagctgctggtcgacgtgggtcagaggctgcgccgtgagcatcagatccatgctgctgctgactcggagccccacagcttggcacaggctctctcagctcaagcctccggtcctccctgggaccctgggaggccaggccctgcatctgaggtcctggcttttgtcaaggcagggccctgcagagacaggtgggcagggccagccccagggccctgggcttcgaacccggctgctgatcacaggcctgttcggggctggactcggtggggcctggctggccctgagggctgagaaggagaggctgcagcagcaaaagcgaacagaagccctgcgccaggcagctgtgggccagggcgacttccacctgctggatcacagaggccgggctcgctgcaaggctgacttccggggccagtgggtgctgatgtactttggcttcactcactgccctgacatctgcccagacgagctggagaagctggtgcaggtggtgcggcagctggaagcagagcctggtttgcctccagtgcagcctgtcttcatcactgtggaccccgagcgggacgacgttgaagccatggcccgctacgtccaggacttccacccaagactgttgggtctgaccggctccaccaaacaggttgcccaggctagtcacagttaccgcgtgtactacaatgccggccccaaggatgaggaccaggactacatcgtggaccactccattgccatctacctgctcaaccctgacggcctcttcacggattactacggccggagcagatcggctgagcagatctcagacagtgtgcggcggcacatggcggctttccgcagtgtcctgtcttgagccactgcagtctgggccccatcattaaacgggctgcgtttaa

SEQ ID NO: 359908 - DNA, 3974 bp, Homo sapiens
aacagcacgaaaatctcctgcccccaccccacccccaggtgattcccttcaccaagtctgggtctagacttggcccccgcgagttcacgtccctgcctaatgcgcctggagtccgggtgatggccctggatccgctcccggccccaagctccacacagccgggaaggaagctcgcgtttgttttgctggcgccagggatacggtccaggccccgccccgccccgcgctgatcccagggtagtgggaaagtgcgctccccaagaatttgcggtgcaggggccgcggccaccgccttctgtccgcaggtgctgcgagccgtaagcgccccccacccgcgctatgggctcggacgcctgggtgggcctttggcggccacaccggccccgcggccccatcgcggcgcactacggaggccccgggcccaaatacaagctgccgcccaacaccggtagaaggggcaggccccgggattgaggggtgggacggcgcctgggggagggaaggggaagagaccagggaggcctgcgctcggggctgaaccgtgcctgctagaggggagagggggtctgtgccgggggagggtccgtgttgcagatggggcttggggctgggcccggccagacgctaactcggatgctcccaggctacgccctgcatgacccgtcgcggccgcgcgcccccgccttcaccttcggcgcgcgcttccccacgcagcagacgacgtgcggccccgggccaggccacctggtgcccgctcgcatgaccgtgcgcggcaccgacggcgcccccgcctactccatctacggccgcccacgccgctcagcgcccttcctcactccgggacctggtcaggacccccgggcccctggccaccccaacgccgaactgcctccagggaggcccacctgggaacccccgacctgaaccccgagtccccctcggataccctaacaccgcatattcggtacccccatatccggatctcaaatcccaaaccccgaaccccacggggctttgataaatcgtggctcagactccccactagtcccaggaccccatctcgggtacccaccaggctcccacgcagttctagccccccacacccttgatccgccccgcaggcaggtacttcccggagcgagcggggaacgcgacgtaccccagtgcgcctcggcacaccattgctccccgaaactggggtgtccaggcggaacagcagagcccaggtcccgcggcctatacggtgccctcgctcttgggtccgcgcgtcatcggcaaagtctccgccccaacttgctccatctacggccgcagagcggctggcagtttcttcgaggacctcagcaagaccccgggcccctgcgcctatcaggtcgtgagtccaggggtctacaagtcccgggccccccagttcacgattctggcgcggacttcgctcccccaagacaacactcggaagccagggcccgcggcctacaacgtggatcagcaccggaagccccgcggctggagtttcgggatccggcactcggactacctggccccgctggtgaccgacgcggacaactgacccgccaggcgggagcggccccacacgtgtttgcttaaagtctgcgagtccgcatcgtgtccgcctctctctctctctctctgcgcgtcctggcgcaaggcctggggtggagccacggctggggccgtgtcccaactccgaacccagcggggcggggcccgagcgtcgggcgaggccgggaccccagcgctgcgccgcgtccgaacgtcgagaccccaccgagggcgggagggggactctcgggagccacagacgcccgagacccacgccgggcgggaccggccagggatcacccccgccgacggccccgggccccgacggcccggaagttccgcgtgtccgggggcaccgggggattggccggggcgcggcgtgcaaggcttcccgggggcggcgactgccgagctccgccctccaggcggccccacccgcctgccgtcctggggcgccgccgccccgccgccggcagtggaccgctgtgcgcgaaccctgaaccctacggtcccgacccgcgggcgaggccgggtacctgggctgggatccggagcaagcgggcgagggcagcgccctaagcaggcccggagcgatggcagccttgatgaccccgggaaccggggccccacccgcgcctggtgacttctccggggaagggagccaggacttcccgacccttcgccagagcccaagcagctcccggagctgatccgcatgaagcgagacggaggccgcctgagcgaagcggacatcaggggcttcgtggccgctgtggtgaatgggagcgcgcagggcgcacagatcggggccatgctgatggccatccgacttcggggcatggatctggaggagacctcggtgctgacccaggccctggctcagtcgggacagcagctggagtggccagaggcctggcgccagcagcttgtggacaagcattccacagggggtgtgggtgacaaggtcagcctggtcctcgcacctgccctggcggcatgtggctgcaaggtgccaatgatcagcggacgtggtctggggcacacaggaggcaccttggataagctggagtctattcctggattcaatgtcatccagagcccagagcagatgcaagtgctgctggaccaggcgggctgctgtatcgtgggtcagagtgagcagctggttcctgcggacggaatcctatatgcagccagagatgtgacagccaccgtggacagcctgccactcatcacagcctccattctcagtaagaaactcgtggaggggctgtccgctctggtggtggacgttaagttcggaggggccgccgtcttccccaaccaggagcaggcccgggagctggcaaagacgctggttggcgtgggagccagcctagggcttcgggtcgcggcagcgctgaccgccatggacaagcccctgggtcgctgcgtgggccacgccctggaggtggaggaggcgctgctctgcatggacggcgcaggcccgccagacttaagggacctggtcaccacgctcgggggcgccctgctctggctcagcggacacgcggggactcaggctcagggcgctgcccgggtggccgcggcgctggacgacggctcggcccttggccgcttcgagcggatgctggcggcgcagggcgtggatcccggtctggcccgagccctgtgctcgggaagtcccgcagaacgccggcagctgctgcctcgcgcccgggagcaggaggagctgctggcgcccgcagatggcaccgtggagctggtccgggcgctgccgctggcgctggtgctgcacgagctcggggccgggcgcagccgcgctggggagccgctccgcctgggggtgggcgcagagctgctggtcgacgtgggtcagaggctgcgccgtgggaccccctggctccgcgtgcaccgggacggccccgcgctcagcggcccgcagagccgcgccctgcaggaggcgctcgtactctccgaccgcgcgccattcgccgccccctcgcccttcgcagagctcgttctgccgccgcagcaataaagctcctttgccgcgaaaaaaataaaaaaaaaaaaaaaaaaaaaacaaaaaaacaaaaaaaaaaaaaaaaatacaacaaaaagcaaaaaaaaaaaaaaacaaaacacaaaacaaaaaaaaaagggggcgcccccagctacacacacacagagggcgacaagacagcatccaacagcctatgtttcatgaaaacagagaggcgtcccacacttcgtagaagagagctgggattaacattctgtgtgcgtctagcctctagtcgtatgctcaacttaaccaaccacgcaccttgggtcacagaactatactcgtcccgacgtgtcgcccaccgcctcgagccgataccacatacatgtgtgcgcgtggctac

SEQ ID NO: 359909 - DNA, 2705 bp, Homo sapiens
ctagcatttaacctacggcccgatccgagctgaggcgaggtacttgggctggatccgagacgatcggggatcgtagcgctatccgtcggcccgaacgatgagaatttcattgatgccgtgtagacttgaggtccctgcctggcgcctggtgacttctccggggaagggagccaggacttcccgacccttcgccagagcccaagcagctcccggagctgatccgcatgaagcgagacggaggccgcctgagcgaagcggacatcaggggcttcgtggccgctgtggtgaatgggagcgcgcagggcgcacagatcggggccatgctgatggccatccgacttcggggcatggatctggaggagacctcggtgctgacccaggccctggctcagtcgggacagcagctggagtggccagaggcctggcgccagcagcttgtggacaagcattccacagggggtgtgggtgacaaggtcagcctggtcctcgcacctgccctggcggcatgtggctgcaaggtgccaatgatcagcggacgtggtctggggcacacaggaggcaccttggataagctggagtctattcctggattcaatgtcatccagagcccagagcagatgcaagtgctgctggaccaggcgggctgctgtatcgtgggtcagagtgagcagctggttcctgcggacggaatcctatatgcagccagagatgtgacagccaccgtggacagcctgccactcatcacagcctccattctcagtaagaaactcgtggaggggctgtccgctctggtggtggacgttaagttcggaggggccgccgtcttccccaaccaggagcaggcccgggagctggcaaagacgctggttggcgtgggagccagcctagggcttcgggtcgcggcagcgctgaccgccatggacaagcccctgggtcgctgcgtgggccacgccctggaggtggaggaggcgctgctctgcatggacggcgcaggcccgccagacttaagggacctggtcaccacgctcgggggcgccctgctctggctcagcggacacgcggggactcaggctcagggcgctgcccgggtggccgcggcgctggacgacggctcggcccttggccgcttcgagcggatgctggcggcgcagggcgtggatcccggtctggcccgagccctgtgctcgggaagtcccgcagaacgccggcagctgctgcctcgcgcccgggagcaggaggagctgctggcgcccgcagatggcaccgtggagctggtccgggcgctgccgctggcgctggtgctgcacgagctcggggccgggcgcagccgcgctggggagccgctccgcctgggggtgggcgcagagctgctggtcgacgtgggtcagaggctgcgccgtgggaccccctggctccgcgtgcaccgggacggccccgcgctcagcggcccgcagagccgcgccctgcaggaggcgctcgtactctccgaccgcgcgccattcgccgccccctcgcccttcgcagagctcgttctgccgccgcagcaataaagctcctttgccgcgaaaccttgtcagtgcttgggcgggagcggaaggatccagggctgcggaggcgggggccgtctcgatgaacacgtgacccccggcgggctccgccttccgcgcacgcgctgagagcctgtcagcggctgcgcccgtgtgcgcatgcgcagctccggggacgcctgcgccctgcctgtgagcgtgtggcgcccgctttccctgagccggcggggcagagcccagggagctggaggtcggcgcttcctctcgtgcttggtccactgacgcgcggccccgccgcgaggagcatcagatccatgctgctgctgactcggagccccacagcttggcacaggctctctcagctcaagcctccggtcctccctgggaccctgggaggccaggccctgcatctgaggtcctggcttttgtcaaggcagggccctgcagagacaggtgggcagggccagccccagggccctgggcttcgaacccggctgctgatcacaggcctgttcggggctggactcggtggggcctggctggccctgagggctgagaaggagaggctgcagcagcaaaagcgaacagaagccctgcgccaggcagctgtgggccagggcgacttccacctgctggatcacagaggccgggctcgctgcaaggctgacttccggggccagtgggtgctgatgtactttggcttcactcactgccctgacatctgcccagacgagctggagaagctggtgcaggtggtgcggcagctggaagcagagcctggtttgcctccagtgcagcctgtcttcatcactgtggaccccgagcgggacgacgttgaagccatggcccgctacgtccaggacttccacccaagactgttgggtctgaccggctccaccaaacaggttgcccaggctagtcacagttaccgcgtgtactacaatgccggccccaaggatgaggaccaggactacatcgtggaccactccattgccatctacctgctcaaccctgacggcctcttcacggattactacggccggagcagatcggctgagcagatctcagacagtgtgcggcggcacatggcggctttccgcagtgtcctgtcttgagccactgcagtctgggccccatcattaaacgggctgcgtttaa

SEQ ID NO: 359910 - DNA, 2564 bp, Homo sapiens
gttggaagactaccttaacccccgaagcccaagtctacccagagccccaattgttcccaccgcactcccccccgggccaccaagggaaactttttccccgaaaaaaaaaaaaaaaaaaaaaagctgctaagtcatttaccataagtcactgagaacaggggatgtctgaccagatgcaagtgctgctggaccaggcgggctgctgtatcgtgggtcagagtgagcagctggttcctgcggacggaatcctatatgcagccagagatgtgacagccaccgtggacagcctgccactcatcacaggtgacctgactccatggcctgcttctgcatgttcacaggctcctgacctccaaactcaagtcaagggcctctcgttaggagttacccgtcacctgaccgtgtgcccccctacccccatcacaagatgcctgaccaccaccatgtggggtggcctgatactcaacccaccaggtgctgccacccccataataagggacttgaccctcaatgctcagggcccctgaccccaaagtcggcatccccgaactctcccaagaagctccaggttctccattgtctccaacctcctctgcctcccccaagcctccattctcagtaagaaactcgtggaggggctgtccgctctggtggtggacgttaagttcggaggggccgccgtcttccccaaccaggagcaggcccgggagctggcaaagacgctggttggcgtgggagccagcctagggcttcgggtcgcggcagcgctgaccgccatggacaagcccctgggtcgctgcgtgggccacgccctggaggtggaggaggcgctgctctgcatggacggcgcaggcccgccagacttaagggacctggtcaccacgctcgggggcgccctgctctggctcagcggacacgcggggactcaggctcagggcgctgcccgggtggccgcggcgctggacgacggctcggcccttggccgcttcgagcggatgctggcggcgcagggcgtggatcccggtctggcccgagccctgtgctcgggaagtcccgcagaacgccggcagctgctgcctcgcgcccgggagcaggaggagctgctggcgcccgcagatggcaccgtggagctggtccgggcgctgccgctggcgctggtgctgcacgagctcggggccgggcgcagccgcgctggggagccgctccgcctgggggtgggcgcagagctgctggtcgacgtgggtcagaggctgcgccgtgggaccccctggctccgcgtgcaccgggacggccccgcgctcagcggcccgcagagccgcgccctgcaggaggcgctcgtactctccgaccgcgcgccattcgccgccccctcgcccttcgcagagctcgttctgccgccgcagcaataaagctcctttgccgcgaaaccttgtcagtgcttgggcgggagcggaaggatccagggctgcggaggcgggggccgtctcgatgaacacgtgacccccggcgggctccgccttccgcgcacgcgctgagagcctgtcagcggctgcgcccgtgtgcgcatgcgcagctccggggacgcctgcgccctgcctgtgagcgtgtggcgcccgctttccctgagccggcggggcagagcccagggagctggaggtcggcgcttcctctcgtgcttggtccactgacgcgcggccccgccgcgaggagcatcagatccatgctgctgctgactcggagccccacagcttggcacaggctctctcagctcaagcctccggtcctccctgggaccctgggaggccaggccctgcatctgaggtcctggcttttgtcaaggcagggccctgcagagacaggtgggcagggccagccccagggccctgggcttcgaacccggctgctgatcacaggcctgttcggggctggactcggtggggcctggctggccctgagggctgagaaggagaggctgcagcagcaaaagcgaacagaagccctgcgccaggcagctgtgggccagggcgacttccacctgctggatcacagaggccgggctcgctgcaaggctgacttccggggccagtgggtgctgatgtactttggcttcactcactgccctgacatctgcccagacgagctggagaagctggtgcaggtggtgcggcagctggaagcagagcctggtttgcctccagtgcagcctgtcttcatcactgtggaccccgagcgggacgacgttgaagccatggcccgctacgtccaggacttccacccaagactgttgggtctgaccggctccaccaaacaggttgcccaggctagtcacagttaccgcgtgtactacaatgccggccccaaggatgaggaccaggactacatcgtggaccactccattgccatctacctgctcaaccctgacggcctcttcacggattactacggccggagcagatcggctgagcagatctcagacagtgtgcggcggcacatggcggctttccgcagtgtcctgtcttgagccactgcagtctgggccccatcattaaacgggctgcgtttaa

SEQ ID NO: 359911 - DNA, 2679 bp, Homo sapiens
gaccagcctggccaacatagcgaaacccggtctctactaaaaatacaaaaactagctgggcgttgtggcatgtgcttgtaatcccagctactagggaggctgaggcaggagaatcacttgaacctgggaggcggaggttgcagtgagccgagatcgtgccactgcactccagcctgggcaacagagcaagactccgtctcaaaaaaaaaaaaaaaaaaaaaaaaaaaaaaaaaaaaagctgctaagtcatttaccataagtcactgagaacaggggatgtctgaccagatgcaagtgctgctggaccaggcgggctgctgtatcgtgggtcagagtgagcagctggttcctgcggacggaatcctatatgcagccagagatgtgacagccaccgtggacagcctgccactcatcacaggtgacctgactccatggcctgcttctgcatgttcacaggctcctgacctccaaactcaagtcaagggcctctcgttaggagttacccgtcacctgaccgtgtgcccccctacccccatcacaagatgcctgaccaccaccatgtggggtggcctgatactcaacccaccaggtgctgccacccccataataagggacttgaccctcaatgctcagggcccctgaccccaaagtcggcatccccgaactctcccaagaagctccaggttctccattgtctccaacctcctctgcctcccccaagcctccattctcagtaagaaactcgtggaggggctgtccgctctggtggtggacgttaagttcggaggggccgccgtcttccccaaccaggagcaggcccgggagctggcaaagacgctggttggcgtgggagccagcctagggcttcgggtcgcggcagcgctgaccgccatggacaagcccctgggtcgctgcgtgggccacgccctggaggtggaggaggcgctgctctgcatggacggcgcaggcccgccagacttaagggacctggtcaccacgctcgggggcgccctgctctggctcagcggacacgcggggactcaggctcagggcgctgcccgggtggccgcggcgctggacgacggctcggcccttggccgcttcgagcggatgctggcggcgcagggcgtggatcccggtctggcccgagccctgtgctcgggaagtcccgcagaacgccggcagctgctgcctcgcgcccgggagcaggaggagctgctggcgcccgcagatggcaccgtggagctggtccgggcgctgccgctggcgctggtgctgcacgagctcggggccgggcgcagccgcgctggggagccgctccgcctgggggtgggcgcagagctgctggtcgacgtgggtcagaggctgcgccgtgggaccccctggctccgcgtgcaccgggacggccccgcgctcagcggcccgcagagccgcgccctgcaggaggcgctcgtactctccgaccgcgcgccattcgccgccccctcgcccttcgcagagctcgttctgccgccgcagcaataaagctcctttgccgcgaaaccttgtcagtgcttgggcgggagcggaaggatccagggctgcggaggcgggggccgtctcgatgaacacgtgacccccggcgggctccgccttccgcgcacgcgctgagagcctgtcagcggctgcgcccgtgtgcgcatgcgcagctccggggacgcctgcgccctgcctgtgagcgtgtggcgcccgctttccctgagccggcggggcagagcccagggagctggaggtcggcgcttcctctcgtgcttggtccactgacgcgcggccccgccgcgaggagcatcagatccatgctgctgctgactcggagccccacagcttggcacaggctctctcagctcaagcctccggtcctccctgggaccctgggaggccaggccctgcatctgaggtcctggcttttgtcaaggcagggccctgcagagacaggtgggcagggccagccccagggccctgggcttcgaacccggctgctgatcacaggcctgttcggggctggactcggtggggcctggctggccctgagggctgagaaggagaggctgcagcagcaaaagcgaacagaagccctgcgccaggcagctgtgggccagggcgacttccacctgctggatcacagaggccgggctcgctgcaaggctgacttccggggccagtgggtgctgatgtactttggcttcactcactgccctgacatctgcccagacgagctggagaagctggtgcaggtggtgcggcagctggaagcagagcctggtttgcctccagtgcagcctgtcttcatcactgtggaccccgagcgggacgacgttgaagccatggcccgctacgtccaggacttccacccaagactgttgggtctgaccggctccaccaaacaggttgcccaggctagtcacagttaccgcgtgtactacaatgccggccccaaggatgaggaccaggactacatcgtggaccactccattgccatctacctgctcaaccctgacggcctcttcacggattactacggccggagcagatcggctgagcagatctcagacagtgtgcggcggcacatggcggctttccgcagtgtcctgtcttgagccactgcagtctgggccccatcattaaacgggctgcgtttaa

SEQ ID NO: 359912 - DNA, 3833 bp, Homo sapiens
aacagcacgaaaatctcctgcccccaccccacccccaggtgattcccttcaccaagtctgggtctagacttggcccccgcgagttcacgtccctgcctaatgcgcctggagtccgggtgatggccctggatccgctcccggccccaagctccacacagccgggaaggaagctcgcgtttgttttgctggcgccagggatacggtccaggccccgccccgccccgcgctgatcccagggtagtgggaaagtgcgctccccaagaatttgcggtgcaggggccgcggccaccgccttctgtccgcaggtgctgcgagccgtaagcgccccccacccgcgctatgggctcggacgcctgggtgggcctttggcggccacaccggccccgcggccccatcgcggcgcactacggaggccccgggcccaaatacaagctgccgcccaacaccggtagaaggggcaggccccgggattgaggggtgggacggcgcctgggggagggaaggggaagagaccagggaggcctgcgctcggggctgaaccgtgcctgctagaggggagagggggtctgtgccgggggagggtccgtgttgcagatggggcttggggctgggcccggccagacgctaactcggatgctcccaggctacgccctgcatgacccgtcgcggccgcgcgcccccgccttcaccttcggcgcgcgcttccccacgcagcagacgacgtgcggccccgggccaggccacctggtgcccgctcgcatgaccgtgcgcggcaccgacggcgcccccgcctactccatctacggccgcccacgccgctcagcgcccttcctcactccgggacctggtcaggacccccgggcccctggccaccccaacgccgaactgcctccagggaggcccacctgggaacccccgacctgaaccccgagtccccctcggataccctaacaccgcatattcggtacccccatatccggatctcaaatcccaaaccccgaaccccacggggctttgataaatcgtggctcagactccccactagtcccaggaccccatctcgggtacccaccaggctcccacgcagttctagccccccacacccttgatccgccccgcaggcaggtacttcccggagcgagcggggaacgcgacgtaccccagtgcgcctcggcacaccattgctccccgaaactggggtgtccaggcggaacagcagagcccaggtcccgcggcctatacggtgccctcgctcttgggtccgcgcgtcatcggcaaagtctccgccccaacttgctccatctacggccgcagagcggctggcagtttcttcgaggacctcagcaagaccccgggcccctgcgcctatcaggtcgtgagtccaggggtctacaagtcccgggccccccagttcacgattctggcgcggacttcgctcccccaagacaacactcggaagccagggcccgcggcctacaacgtggatcagcaccggaagccccgcggctggagtttcgggatccggcactcggactacctggccccgctggtgaccgacgcggacaactgacccgccaggcgggagcggccccacacgtgtttgcttaaagtctgcgagtccgcatcgtgtccgcctctctctctctctctctgcgcgtcctggcgcaaggcctggggtggagccacggctggggccgtgtcccaactccgaacccagcggggcggggcccgagcgtcgggcgaggccgggaccccagcgctgcgccgcgtccgaacgtcgagaccccaccgagggcgggagggggactctcgggagccacagacgcccgagacccacgccgggcgggaccggccagggatcacccccgccgacggccccgggccccgacggcccggaagttccgcgtgtccgggggcaccgggggattggccggggcgcggcgtgcaaggcttcccgggggcggcgactgccgagctccgccctccaggcggccccacccgcctgccgtcctggggcgccgccgccccgccgccggcagtggaccgctgtgcgcgaaccctgaaccctacggtcccgacccgcgggcgaggccgggtacctgggctgggatccggagcaagcgggcgagggcagcgccctaagcaggcccggagcgatggcagccttgatgaccccgggaaccggggccccacccgcgcctggtgacttctccggggaagggagccaggacttcccgacccttcgccagagcccaagcagctcccggagctgatccgcatgaagcgagacggaggccgcctgagcgaagcggacatcaggggcttcgtggccgctgtggtgaatgggagcgcgcagggcgcacagatcggggccatgctgatggccatccgacttcggggcatggatctggaggagacctcggtgctgacccaggccctggctcagtcgggacagcagctggagtggccagaggcctggcgccagcagcttgtggacaagcattccacagggggtgtgggtgacaaggtcagcctggtcctcgcacctgccctggcggcatgtggctgcaaggtgccaatgatcagcggacgtggtctggggcacacaggaggcaccttggataagctggagtctattcctggattcaatgtcatccagagcccagagcagatgcaagtgctgctggaccaggcgggctgctgtatcgtgggtcagagtgagcagctggttcctgcggacggaatcctatatgcagccagagatgtgacagccaccgtggacagcctgccactcatcacagcctccattctcagtaagaaactcgtggaggggctgtccgctctggtggtggacgttaagttcggaggggccgccgtcttccccaaccaggagcaggcccgggagctggcaaagacgctggttggcgtgggagccagcctagggcttcgggtcgcggcagcgctgaccgccatggacaagcccctgggtcgctgcgtgggccacgccctggaggtggaggaggcgctgctctgcatggacggcgcaggcccgccagacttaagggacctggtcaccacgctcgggggcgccctgctctggctcagcggacacgcggggactcaggctcagggcgctgcccgggtggccgcggcgctggacgacggctcggcccttggccgcttcgagcggatgctggcggcgcagggcgtggatcccggtctggcccgagccctgtgctcgggaagtcccgcagaacgccggcagctgctgcctcgcgcccgggagcaggaggagctgctggcgcccgcagatgggaccccctggctccgcgtgcaccgggacggccccgcgctcagcggcccgcagagccgcgccctgcaggaggcgctcgtactctccgaccgcgcgccattcgccgccccctcgcccttcgcagagctcgttctgccgccgcagcaataaagctcctttgccgcgaaaaaaataaaaaaaaaaaaaaaaaaaaaacaaaaaaacaaaaaaaaaaaaaaaaatacaacaaaaagcaaaaaaaaaaaaaaacaaaacacaaaacaaaaaaaaaagggggcgcccccagctacacacacacagagggcgacaagacagcatccaacagcctatgtttcatgaaaacagagaggcgtcccacacttcgtagaagagagctgggattaacattctgtgtgcgtctagcctctagtcgtatgctcaacttaaccaaccacgcaccttgggtcacagaactatactcgtcccgacgtgtcgcccaccgcctcgagccgataccacatacatgtgtgcgcgtggctac

SEQ ID NO: 359913 - DNA, 4095 bp, Homo sapiens
aacagcacgaaaatctcctgcccccaccccacccccaggtgattcccttcaccaagtctgggtctagacttggcccccgcgagttcacgtccctgcctaatgcgcctggagtccgggtgatggccctggatccgctcccggccccaagctccacacagccgggaaggaagctcgcgtttgttttgctggcgccagggatacggtccaggccccgccccgccccgcgctgatcccagggtagtgggaaagtgcgctccccaagaatttgcggtgcaggggccgcggccaccgccttctgtccgcaggtgctgcgagccgtaagcgccccccacccgcgctatgggctcggacgcctgggtgggcctttggcggccacaccggccccgcggccccatcgcggcgcactacggaggccccgggcccaaatacaagctgccgcccaacaccggtagaaggggcaggccccgggattgaggggtgggacggcgcctgggggagggaaggggaagagaccagggaggcctgcgctcggggctgaaccgtgcctgctagaggggagagggggtctgtgccgggggagggtccgtgttgcagatggggcttggggctgggcccggccagacgctaactcggatgctcccaggctacgccctgcatgacccgtcgcggccgcgcgcccccgccttcaccttcggcgcgcgcttccccacgcagcagacgacgtgcggccccgggccaggccacctggtgcccgctcgcatgaccgtgcgcggcaccgacggcgcccccgcctactccatctacggccgcccacgccgctcagcgcccttcctcactccgggacctggtcaggacccccgggcccctggccaccccaacgccgaactgcctccagggaggcccacctgggaacccccgacctgaaccccgagtccccctcggataccctaacaccgcatattcggtacccccatatccggatctcaaatcccaaaccccgaaccccacggggctttgataaatcgtggctcagactccccactagtcccaggaccccatctcgggtacccaccaggctcccacgcagttctagccccccacacccttgatccgccccgcaggcaggtacttcccggagcgagcggggaacgcgacgtaccccagtgcgcctcggcacaccattgctccccgaaactggggtgtccaggcggaacagcagagcccaggtcccgcggcctatacggtgccctcgctcttgggtccgcgcgtcatcggcaaagtctccgccccaacttgctccatctacggccgcagagcggctggcagtttcttcgaggacctcagcaaggtcgtgagtccaggggtctacaagtcccgggccccccagttcacgattctggcgcggacttcgctcccccaagacaacactcggaagccagggcccgcggcctacaacgtggatcagcaccggaagccccgcggctggagtttcgggatccggcactcggactacctggccccgctggtgaccgacgcggacaactgacccgccaggcgggagcggccccacacgtgtttgcttaaagtctgcgagtccgcatcgtgtccgcctctctctctctctctctgcgcgtcctggcgcaaggcctggggtggagccacggctggggccgtgtcccaactccgaacccagcggggcggggcccgagcgtcgggcgaggccgggaccccagcgctgcgccgcgtccgaacgtcgagaccccaccgagggcgggagggggactctcgggagccacagacgcccgagacccacgccgggcgggaccggccagggatcacccccgccgacggccccgggccccgacggcccggaagttccgcgtgtccgggggcaccgggggattggccggggcgcggcgtgcaaggcttcccgggggcggcgactgccgagctccgccctccaggcggccccacccgcctgccgtcctggggcgccgccgccccgccgccggcagtggaccgctgtgcgcgaaccctgaaccctacggtcccgacccgcgggcgaggccgggtacctgggctgggatccggagcaagcgggcgagggcagcgccctaagcaggtacgggcggggctcaagtcgcgaggcggggaagcgggaggcagacacggacgagggcgacacagacacgggaccgaggggcggacaccggagagacacgggaaaggggtcgggacaggagcacgtggctcagacaccgacgccgggaggccgcagaccccggacgtgtcaggcatccccgcaggcccggagcgatggcagccttgatgaccccgggaaccggggccccacccgcgcctggtgacttctccggggaagggagccaggacttcccgacccttcgccagagcccaagcagctcccggagctgatccgcatgaagcgagacggaggccgcctgagcgaagcggacatcaggggcttcgtggccgctgtggtgaatgggagcgcgcagggcgcacagatcggggccatgctgatggccatccgacttcggggcatggatctggaggagacctcggtgctgacccaggccctggctcagtcgggacagcagctggagtggccagaggcctggcgccagcagcttgtggacaagcattccacagggggtgtgggtgacaaggtcagcctggtcctcgcacctgccctggcggcatgtggctgcaaggtgccaatgatcagcggacgtggtctggggcacacaggaggcaccttggataagctggagtctattcctggattcaatgtcatccagagcccagagcaggtacggggcgccacggatcagtcattgatccaggttgatgatggagaccctggccagaatcactaaaagatcactggtggatcattagggtcactaatgagaacactggtcaaggttactcatgagtcactgggcctgggccgaaatcatcagtggaactttgattaggatcataaaatgggaagttggtcaaaatcacagatggctggcggggcacggtggctcacacctgtagtcctagcacttggggaggccgaagagggcagatcccttgaacccaggagttcaaaaccagcctggataacaaggcaaaaccccatctctacaaaatagttcgctgcgtgtggtggtgcacgcatgtggttccagctactcaggaggctgaggcaggaggatcacttgagcctgggaggtctaggctgcagtgagccgggacgatgccactgcactccagcctgggcaacagagtgagaccctgtcccagcactctgggaggcagaggagcccagttggagatcagcctgggtaatatagtgaaacttgatctctacaaaaaaaagaagaaaaaaaaaagccgcgtgtggtggtgcgcacctgtagtcccagctactgggaagctgaggtgggaggatcacttaagcccaggaggcagaggtcacaatgagccgaaattgtgccaactgcactccagcctgggcaacagaggaagactcttcacagaaaaaaaaaaaaaaaaaaaaaaagctgctaagtcatttaccataagtcactgagaacaggggatgtctgaccagatgcaagtgctgctggaccaggcgggctgctgtatcgtgggtcagagtgagcagctggttcctgcggacggaatcctatatgcagccagagatgtgacagccaccgtggacagcctgccactcatcacggttggcgtgggagccagcctagggcttcgggtcgcggcagcgctgaccgccatggacaagcccctgggtcgctgcgtgggccacgccctggaggtggaggaggcgctgctctgcatggacggcgcaggcccgccagacttaagggacctggtcaccacgctcgggggcgccctgctctggctcagcggacacgcggggactcaggctcagggcgctgcccgggtggccgcggcgccctgcaggaggcgctcgtactctccgaccgcgcgccattcgccgccccctcgcccttcgcagagctcgttctgccgccgcagcaataaagctcctttgccgcgaaa

SEQ ID NO: 359914 - DNA, 3434 bp, Homo sapiens
  misc_feature (3095)..(3096): n is a, c, g, or t
  misc_feature (3149)..(3149): n is a, c, g, or t
  misc_feature (3158)..(3158): n is a, c, g, or t
  misc_feature (3200)..(3200): n is a, c, g, or t
  misc_feature (3203)..(3203): n is a, c, g, or t
  misc_feature (3246)..(3246): n is a, c, g, or t
  misc_feature (3277)..(3277): n is a, c, g, or t
  misc_feature (3325)..(3325): n is a, c, g, or t
  misc_feature (3426)..(3426): n is a, c, g, or t
aacagcacgaaaatctcctgcccccaccccacccccaggtgattcccttcaccaagtctgggtctagacttggcccccgcgagttcacgtccctgcctaatgcgcctggagtccgggtgatggccctggatccgctcccggccccaagctccacacagccgggaaggaagctcgcgtttgttttgctggcgccagggatacggtccaggccccgccccgccccgcgctgatcccagggtagtgggaaagtgcgctccccaagaatttgcggtgcaggggccgcggccaccgccttctgtccgcaggtgctgcgagccgtaagcgccccccacccgcgctatgggctcggacgcctgggtgggcctttggcggccacaccggccccgcggccccatcgcggcgcactacggaggccccgggcccaaatacaagctgccgcccaacaccggtagaaggggcaggccccgggattgaggggtgggacggcgcctgggggagggaaggggaagagaccagggaggcctgcgctcggggctgaaccgtgcctgctagaggggagagggggtctgtgccgggggagggtccgtgttgcagatggggcttggggctgggcccggccagacgctaactcggatgctcccaggctacgccctgcatgacccgtcgcggccgcgcgcccccgccttcaccttcggcgcgcgcttccccacgcagcagacgacgtgcggccccgggccaggccacctggtgcccgctcgcatgaccgtgcgcggcaccgacggcgcccccgcctactccatctacggccgcccacgccgctcagcgcccttcctcactccgggacctggtcaggacccccgggcccctggccaccccaacgccgaactgcctccagggaggcccacctgggaacccccgacctgaaccccgagtccccctcggataccctaacaccgcatattcggtacccccatatccggatctcaaatcccaaaccccgaaccccacggggctttgataaatcgtggctcagactccccactagtcccaggaccccatctcgggtacccaccaggctcccacgcagttctagccccccacacccttgatccgccccgcaggcaggtacttcccggagcgagcggggaacgcgacgtaccccagtgcgcctcggcacaccattgctccccgaaactggggtgtccaggcggaacagcagagcccaggtcccgcggcctatacggtgccctcgctcttgggtccgcgcgtcatcggcaaagtctccgccccaacttgctccatctacggccgcagagcggctggcagtttcttcgaggacctcagcaaggtgggggaggggccggggcggacgcagggggtccctggtccgcggcagtggaggcggcagccagcaccctctgccctctcgcagaccccgggcccctgcgcctatcaggtcgtgagtccaggggtctacaagtcccgggccccccagttcacgattctggcgcggacttcgctcccccaagacaacactcggaagccagggcccgcggcctacaacgtggatcaggtggcctggagcccagggtcaagggtcagagtcaggagagtggggagggcctgaggtcggagtgatgggatcagagtccccgggggtccaggggtcccggcgcggagaggatgccggccccgcgaggtcagcggtgtctccgggcccgcagcaccggaagccccgcggctggagtttcgggatccggcactcggactacctggccccgctggtgaccgacgcggacaactgacccgccaggcgggagcggccccacacgtgtttgcttaaagtctgcgagtccgcatcgtgtccgcctctctctctctctctctgcgcgtcctggcgcaaggcctggggtggagccacggctggggccgtgtcccaactccgaacccagcggggcggggcccgagcgtcgggcgaggccgggaccccagcgctgcgccgcgtccgaacgtcgagaccccaccgagggcgggagggggactctcgggagccacagacgcccgagacccacgccgggcgggaccggccagggatcacccccgccgacggccccgggccccgacggcccggaagttccgcgtgtccgggggcaccgggggattggccggggcgcggcgtgcaaggcttcccgggggcggcgactgccgagctccgccctccaggcggccccacccgcctgccgtcctggggcgccgccgccccgccgccggcagtggaccgctgtgcgcgaaccctgaaccctacggtcccgacccgcgggcgaggccgggtacctgggctgggatccggagcaagcgggcgagggcagcgccctaaggaggccgcagaccccggacgtgtcaggcatccccgcaggcccggagcgatggcagccttgatgaccccgggaaccggggccccacccgcgccatggtgacattctccgcgaggtaaggagagtcctacgtggcacttccgcgagcccgttcggccgagagaccacaaagcgagacgtccactggatgtcatgattccgtcgatgatagtcagagactgtgaggtccggcatgaatgcggaaggcggtacgatcacgtggtgctttcagtgggaccagtccgtgttgagtcgaattgggcgagctgtcgcgagggtcgtcgatcaacgatcgtgtgcgccattgctttgaatgtgctcactcgctgagctatactgggaggtccattggaatcctggcatgcgaggacacctcgggtttgcgatgatctccaatgtgctccgcttgggcgtctaggttctggggtacatagccagtcataggtacgttggcccagaaggcgcttgggacagccacagacagacattggtggaacaaaggccaattccaacaagggtgggctgttggtggttgaacaacgtgtccacgccatgggttcacctctgcaacccttgcaccttgtgctggtgcattgttgtgcttggcaaaggggtgccccaaatcgatacacgcgcgcacgggtgtgtcctgtgtgtgcaccatcatgggatgtgcaaccnnttgcgaattacaggccttgtgaagctcataactctcccgtgcgcagtttccanagttgctcnatctccccatgaagtccgccacgaaaggtaacggagttgctnaangttggcatggccgtgtgaaccacaatcgtcgggtgtcgtggcntggataatcagatgagcgttccacgaagctngaacgcaagccttgtgctctcacttgcggcgcaccgcgacatcccttnattattgccacgccaatggagcattgttggaccatgccacaccggttgggcacaaagccctggccaacctccagtcaacaggcctccagattcctccaagntacagaaa

SEQ ID NO: 359915 - DNA, 1582 bp, Homo sapiens
aacagcacgaaaatctcctgcccccaccccacccccaggtgattcccttcaccaagtctgggtctagacttggcccccgcgagttcacgtccctgcctaatgcgcctggagtccgggtgatggccctggatccgctcccggccccaagctccacacagccgggaaggaagctcgcgtttgttttgctggcgccagggatacggtccaggccccgccccgccccgcgctgatcccagggtagtgggaaagtgcgctccccaagaatttgcggtgcaggggccgcggccaccgccttctgtccgcaggtgctgcgagccgtaagcgccccccacccgcgctatgggctcggacgcctgggtgggcctttggcggccacaccggccccgcggccccatcgcggcgcactacggaggccccgggcccaaatacaagctgccgcccaacaccggtagaaggggcaggccccgggattgaggggtgggacggcgcctgggggagggaaggggaagagaccagggaggcctgcgctcggggctgaaccgtgcctgctagaggggagagggggtctgtgccgggggagggtccgtgttgcagatggggcttggggctgggcccggccagacgctaactcggatgctcccaggctacgccctgcatgacccgtcgcggccgcgcgcccccgccttcaccttcggcgcgcgcttccccacgcagcagacgacgtgcggccccgggccaggccacctggtgcccgctcgcatgaccgtgcgcggcaccgacggcgcccccgcctactccatctacggccgcccacgccgctcagcgcccttcctcactccgggacctggtcaggacccccgggcccctggccaccccaacgccgaactgcctccagggaggcccacctgggaacccccgacctgaaccccgagtccccctcggataccctaacaccgcatattcggtacccccatatccggatctcaaatcccaaaccccgaaccccacggggctttgataaatcgtggctcagactccccactagtcccaggaccccatctcgggtacccaccaggctcccacgcagttctagccccccacacccttgatccgccccgcaggcaggtacttcccggagcgagcggggaacgcgacgtaccccagtgcgcctcggcacaccattgctccccgaaactggggtgtccaggcggaacagcagagcccaggtcccgcggcctatacggtgccctcgctcttgggtccgcgcgtcatcggcaaagtctccgccccaacttgctccatctacggccgcagagcggctggcagtttcttcgaggacctcagcaaggtcgtgagtccaggggtctacaagtcccgggccccccagttcacgattctggcgcggacttcgctcccccaagacaacactcggaagccagggcccgcggcctacaacgtggatgtcttcgaagcagaaatgccacgcgctctgcgttcgtagatgcagcaatttgagtaggtgactctgctgatgacccgcgcagccaagagagacggcacggctgtatggtccgcgagcctg

SEQ ID NO: 359916 - DNA, 426 bp, Homo sapiens
acctgaccgtgtgcccccctacccccatcacaagatgcctgaccaccaccatgtggggtggcctgatactcaacccaccaggtgctgccacccccataataagggacttgaccctcaatgctcagggcccctgaccccaaagtcggcatccccgaactctcccaagaagctccaggttctccattgtctccaacctcctctgcctcccccaagcctccattctcagtaagaaactcgtggaggggctgtccgctctggtggtggacgttaagttcggaggggccgccgtcttccccaaccaggagcaggcccgggagctggcaaagacgctggtgagcggtgtggcctttccctgggcaagcgtcttgatgcgggcccagcctacccttcacccctcccgtccccactgcctccctccactcagca

SEQ ID NO: 359917 - DNA, 4759 bp, Homo sapiens
aacagcacgaaaatctcctgcccccaccccacccccaggtgattcccttcaccaagtctgggtctagacttggcccccgcgagttcacgtccctgcctaatgcgcctggagtccgggtgatggccctggatccgctcccggccccaagctccacacagccgggaaggaagctcgcgtttgttttgctggcgccagggatacggtccaggccccgccccgccccgcgctgatcccagggtagtgggaaagtgcgctccccaagaatttgcggtgcaggggccgcggccaccgccttctgtccgcaggtgctgcgagccgtaagcgccccccacccgcgctatgggctcggacgcctgggtgggcctttggcggccacaccggccccgcggccccatcgcggcgcactacggaggccccgggcccaaatacaagctgccgcccaacaccggtagaaggggcaggccccgggattgaggggtgggacggcgcctgggggagggaaggggaagagaccagggaggcctgcgctcggggctgaaccgtgcctgctagaggggagagggggtctgtgccgggggagggtccgtgttgcagatggggcttggggctgggcccggccagacgctaactcggatgctcccaggctacgccctgcatgacccgtcgcggccgcgcgcccccgccttcaccttcggcgcgcgcttccccacgcagcagacgacgtgcggccccgggccaggccacctggtgcccgctcgcatgaccgtgcgcggcaccgacggcgcccccgcctactccatctacggccgcccacgccgctcagcgcccttcctcactccgggacctggtcaggacccccgggcccctggccaccccaacgccgaactgcctccagggaggcccacctgggaacccccgacctgaaccccgagtccccctcggataccctaacaccgcatattcggtacccccatatccggatctcaaatcccaaaccccgaaccccacggggctttgataaatcgtggctcagactccccactagtcccaggaccccatctcgggtacccaccaggctcccacgcagttctagccccccacacccttgatccgccccgcaggcaggtacttcccggagcgagcggggaacgcgacgtaccccagtgcgcctcggcacaccattgctccccgaaactggggtgtccaggcggaacagcagagcccaggtcccgcggcctatacggtgccctcgctcttgggtccgcgcgtcatcggcaaagtctccgccccaacttgctccatctacggccgcagagcggctggcagtttcttcgaggacctcagcaagaccccgggcccctgcgcctatcaggtcgtgagtccaggggtctacaagtcccgggccccccagttcacgattctggcgcggacttcgctcccccaagacaacactcggaagccagggcccgcggcctacaacgtggatcagcaccggaagccccgcggctggagtttcgggatccggcactcggactacctggccccgctggtgaccgacgcggacaactgacccgccaggcgggagcggccccacacgtgtttgcttaaagtctgcgagtccgcatcgtgtccgcctctctctctctctctctgcgcgtcctggcgcaaggcctggggtggagccacggctggggccgtgtcccaactccgaacccagcggggcggggcccgagcgtcgggcgaggccgggaccccagcgctgcgccgcgtccgaacgtcgagaccccaccgagggcgggagggggactctcgggagccacagacgcccgagacccacgccgggcgggaccggccagggatcacccccgccgacggccccgggccccgacggcccggaagttccgcgtgtccgggggcaccgggggattggccggggcgcggcgtgcaaggcttcccgggggcggcgactgccgagctccgccctccaggcggccccacccgcctgccgtcctggggcgccgccgccccgccgccggcagtggaccgctgtgcgcgaaccctgaaccctacggtcccgacccgcgggcgaggccgggtacctgggctgggatccggagcaagcgggcgagggcagcgccctaagcaggcccggagcgatggcagccttgatgaccccgggaaccggggccccacccgcgcctggtgacttctccggggaagggagccaggacttcccgacccttcgccagagcccaagcagctcccggagctgatccgcatgaagcgagacggaggccgcctgagcgaagcggacatcaggggcttcgtggccgctgtggtgaatgggagcgcgcagggcgcacagatcggggccatgctgatggccatccgacttcggggcatggatctggaggagacctcggtgctgacccaggccctggctcagtcgggacagcagctggagtggccagaggcctggcgccagcagcttgtggacaagcattccacagggggtgtgggtgacaaggtcagcctggtcctcgcacctgccctggcggcatgtggctgcaaggtgccaatgatcagcggacgtggtctggggcacacaggaggcaccttggataagctggagtctattcctggattcaatgtcatccagagcccagagcagatgcaagtgctgctggaccaggcgggctgctgtatcgtgggtcagagtgagcagctggttcctgcggacggaatcctatatgcagccagagatgtgacagccaccgtggacagcctgccactcatcacagcctccattctcagtaagaaactcgtggaggggctgtccgctctggtggtggacgttaagttcggaggggccgccgtcttccccaaccaggagcaggcccgggagctggcaaagacgctggttggcgtgggagccagcctagggcttcgggtcgcggcagcgctgaccgccatggacaagcccctgggtcgctgcgtgggccacgccctggaggtggaggaggcgctgctctgcatggacggcgcaggcccgccagacttaagggacctggtcaccacgctcgggggcgccctgctctggctcagcggacacgcggggactcaggctcagggcgctgcccgggtggccgcggcgctggacgacggctcggcccttggccgcttcgagcggatgctggcggcgcagggcgtggatcccggtctggcccgagccctgtgctcgggaagtcccgcagaacgccggcagctgctgcctcgcgcccgggagcaggaggagctgctggcgcccgcagatggcaccgtggagctggtccgggcgctgccgctggcgctggtgctgcacgagctcggggccgggcgcagccgcgctggggagccgctccgcctgggggtgggcgcagagctgctggtcgacgtgggtcagaggctgcgccgtgggaccccctggctccgcgtgcaccgggacggccccgcgctcagcggcccgcagagccgcgccctgcaggaggcgctcgtactctccgaccgcgcgccattcgccgccccctcgcccttcgcagagctcgttctgccgccgcagcaataaagctcctttgccgcgaaaccttgtcagtgcttgggcgggagcggaaggatccagggctgcggaggcgggggccgtctcgatgaacacgtgacccccggcgggctccgccttccgcgcacgcgctgagagcctgtcagcggctgcgcccgtgtgcgcatgcgcagctccggggacgcctgcgccctgcctgtgagcgtgtggcgcccgctttccctgagccggcggggcagagcccagggagctggaggtcggcgcttcctctcgtgcttggtccactgacgcgcggccccgccgcgaggagcatcagatccatgctgctgctgactcggagccccacagcttggcacaggctctctcagctcaagcctccggtcctccctgggaccctgggaggccaggccctgcatctgaggtcctggcttttgtcaaggcagggccctgcagagacaggtgggcagggccagccccagggccctgggcttcgaacccggctgctgatcacaggcctgttcggggctggactcggtggggcctggctggccctgagggctgagaaggagaggctgcagcagcaaaagcgaacagaagccctgcgccaggcagctgtgggccagggcgacttccacctgctggatcacagaggccgggctcgctgcaaggctgacttccggggccagtgggtgctgatgtactttggcttcactcactgccctgacatctgcccagacgagctggagaagctggtgcaggtggtgcggcagctggaagcagagcctggtttgcctccagtgcagcctgtcttcatcactgtggaccccgagcgggacgacgttgaagccatggcccgctacgtccaggacttccacccaagactgttgggtctgaccggctccaccaaacaggttgcccaggctagtcacagttaccgcgtgtactacaatgccggccccaaggatgaggaccaggactacatcgtggaccactccattgccatctacctgctcaaccctgacggcctcttcacggattactacggccggagcagatcggctgagcagatctcagacagtgtgcggcggcacatggcggctttccgcagtgtcctgtcttgagccactgcagtctgggccccatcattaaacgggctgcgtttaa

SEQ ID NO: 359918 - DNA, 3407 bp, Homo sapiens
agggttgggcagctctggccctgttttgagtgaggcctgtgcaccagcaacccgccctgggccgtccgcgttttcacagcaacccgccctgggcccgtctgcgtttggcttatgctggggtgtctccgggcccgcagcaccggaagccccgcggctggagtttcgggatccggcactcggactacctggccccgctggtgaccgacgcggacaactgacccgccaggcgggagcggccccacacgtgtttgcttaaagtctgcgagtccgcatcgtgtccgcctctctctctctctctctgcgcgtcctggcgcaaggcctggggtggagccacggctggggccgtgtcccaactccgaacccagcggggcggggcccgagcgtcgggcgaggccgggaccccagcgctgcgccgcgtccgaacgtcgagaccccaccgagggcgggagggggactctcgggagccacagacgcccgagacccacgccgggcgggaccggccagggatcacccccgccgacggccccgggccccgacggcccggaagttccgcgtgtccgggggcaccgggggattggccggggcgcggcgtgcaaggcttcccgggggcggcgactgccgagctccgccctccaggcggccccacccgcctgccgtcctggggcgccgccgccccgccgccggcagtggaccgctgtgcgcgaaccctgaaccctacggtcccgacccgcgggcgaggccgggtacctgggctgggatccggagcaagcgggcgagggcagcgccctaagcaggcccggagcgatggcagccttgatgaccccgggaaccggggccccacccgcgcctggtgacttctccggggaagggagccaggacttcccgacccttcgccagagcccaagcagctcccggagctgatccgcatgaagcgagacggaggccgcctgagcgaagcggacatcaggggcttcgtggccgctgtggtgaatgggagcgcgcagggcgcacagatcggggccatgctgatggccatccgacttcggggcatggatctggaggagacctcggtgctgacccaggccctggctcagtcgggacagcagctggagtggccagaggcctggcgccagcagcttgtggacaagcattccacagggggtgtgggtgacaaggtcagcctggtcctcgcacctgccctggcggcatgtggctgcaaggtgccaatgatcagcggacgtggtctggggcacacaggaggcaccttggataagctggagtctattcctggattcaatgtcatccagagcccagagcagatgcaagtgctgctggaccaggcgggctgctgtatcgtgggtcagagtgagcagctggttcctgcggacggaatcctatatgcagccagagatgtgacagccaccgtggacagcctgccactcatcacagcctccattctcagtaagaaactcgtggaggggctgtccgctctggtggtggacgttaagttcggaggggccgccgtcttccccaaccaggagcaggcccgggagctggcaaagacgctggttggcgtgggagccagcctagggcttcgggtcgcggcagcgctgaccgccatggacaagcccctgggtcgctgcgtgggccacgccctggaggtggaggaggcgctgctctgcatggacggcgcaggcccgccagacttaagggacctggtcaccacgctcgggggcgccctgctctggctcagcggacacgcggggactcaggctcagggcgctgcccgggtggccgcggcgctggacgacggctcggcccttggccgcttcgagcggatgctggcggcgcagggcgtggatcccggtctggcccgagccctgtgctcgggaagtcccgcagaacgccggcagctgctgcctcgcgcccgggagcaggaggagctgctggcgcccgcagatggcaccgtggagctggtccgggcgctgccgctggcgctggtgctgcacgagctcggggccgggcgcagccgcgctggggagccgctccgcctgggggtgggcgcagagctgctggtcgacgtgggtcagaggctgcgccgtgggaccccctggctccgcgtgcaccgggacggccccgcgctcagcggcccgcagagccgcgccctgcaggaggcgctcgtactctccgaccgcgcgccattcgccgccccctcgcccttcgcagagctcgttctgccgccgcagcaataaagctcctttgccgcgaaaccttgtcagtgcttgggcgggagcggaaggatccagggctgcggaggcgggggccgtctcgatgaacacgtgacccccggcgggctccgccttccgcgcacgcgctgagagcctgtcagcggctgcgcccgtgtgcgcatgcgcagctccggggacgcctgcgccctgcctgtgagcgtgtggcgcccgctttccctgagccggcggggcagagcccagggagctggaggtcggcgcttcctctcgtgcttggtccactgacgcgcggccccgccgcgaggagcatcagatccatgctgctgctgactcggagccccacagcttggcacaggctctctcagctcaagcctccggtcctccctgggaccctgggaggccaggccctgcatctgaggtcctggcttttgtcaaggcagggccctgcagagacaggtgggcagggccagccccagggccctgggcttcgaacccggctgctgatcacaggcctgttcggggctggactcggtggggcctggctggccctgagggctgagaaggagaggctgcagcagcaaaagcgaacagaagccctgcgccaggcagctgtgggccagggcgacttccacctgctggatcacagaggccgggctcgctgcaaggctgacttccggggccagtgggtgctgatgtactttggcttcactcactgccctgacatctgcccagacgagctggagaagctggtgcaggtggtgcggcagctggaagcagagcctggtttgcctccagtgcagcctgtcttcatcactgtggaccccgagcgggacgacgttgaagccatggcccgctacgtccaggacttccacccaagactgttgggtctgaccggctccaccaaacaggttgcccaggctagtcacagttaccgcgtgtactacaatgccggccccaaggatgaggaccaggactacatcgtggaccactccattgccatctacctgctcaaccctgacggcctcttcacggattactacggccggagcagatcggctgagcagatctcagacagtgtgcggcggcacatggcggctttccgcagtgtcctgtcttgagccactgcagtctgggccccatcattaaacgggctgcgtttaa

SEQ ID NO: 359919 - DNA, 3622 bp, Homo sapiens
aacagcacgaaaatctcctgcccccaccccacccccaggtgattcccttcaccaagtctgggtctagacttggcccccgcgagttcacgtccctgcctaatgcgcctggagtccgggtgatggccctggatccgctcccggccccaagctccacacagccgggaaggaagctcgcgtttgttttgctggcgccagggatacggtccaggccccgccccgccccgcgctgatcccagggtagtgggaaagtgcgctccccaagaatttgcggtgcaggggccgcggccaccgccttctgtccgcaggtgctgcgagccgtaagcgccccccacccgcgctatgggctcggacgcctgggtgggcctttggcggccacaccggccccgcggccccatcgcggcgcactacggaggccccgggcccaaatacaagctgccgcccaacaccggtagaaggggcaggccccgggattgaggggtgggacggcgcctgggggagggaaggggaagagaccagggaggcctgcgctcggggctgaaccgtgcctgctagaggggagagggggtctgtgccgggggagggtccgtgttgcagatggggcttggggctgggcccggccagacgctaactcggatgctcccaggctacgccctgcatgacccgtcgcggccgcgcgcccccgccttcaccttcggcgcgcgcttccccacgcagcagacgacgtgcggccccgggccaggccacctggtgcccgctcgcatgaccgtgcgcggcaccgacggcgcccccgcctactccatctacggccgcccacgccgctcagcgcccttcctcactccgggacctggtcaggacccccgggcccctggccaccccaacgccgaactgcctccagggaggcccacctgggaacccccgacctgaaccccgagtccccctcggataccctaacaccgcatattcggtacccccatatccggatctcaaatcccaaaccccgaaccccacggggctttgataaatcgtggctcagactccccactagtcccaggaccccatctcgggtacccaccaggctcccacgcagttctagccccccacacccttgatccgccccgcaggcaggtacttcccggagcgagcggggaacgcgacgtaccccagtgcgcctcggcacaccattgctccccgaaactggggtgtccaggcggaacagcagagcccaggtcccgcggcctatacggtgccctcgctcttgggtccgcgcgtcatcggcaaagtctccgccccaacttgctccatctacggccgcagagcggctggcagtttcttcgaggacctcagcaagaccccgggcccctgcgcctatcaggtcgtgagtccaggggtctacaagtcccgggccccccagttcacgattctggcgcggacttcgctcccccaagacaacactcggaagccagggcccgcggcctacaacgtggatcagcaccggaagccccgcggctggagtttcgggatccggcactcggactacctggccccgctggtgaccgacgcggacaactgacccgccaggcgggagcggccccacacgtgtttgcttaaagtctgcgagtccgcatcgtgtccgcctctctctctctctctctgcgcgtcctggcgcaaggcctggggtggagccacggctggggccgtgtcccaactccgaacccagcggggcggggcccgagcgtcgggcgaggccgggaccccagcgctgcgccgcgtccgaacgtcgagaccccaccgagggcgggagggggactctcgggagccacagacgcccgagacccacgccgggcgggaccggccagggatcacccccgccgacggccccgggccccgacggcccggaagttccgcgtgtccgggggcaccgggggattggccggggcgcggcgtgcaaggcttcccgggggcggcgactgccgagctccgccctccaggcggccccacccgcctgccgtcctggggcgccgccgccccgccgccggcagtggaccgctgtgcgcgaaccctgaaccctacggtcccgacccgcgggcgaggccgggtacctgggctgggatccggagcaagcgggcgagggcagcgccctaagcaggcccggagcgatggcagccttgatgaccccgggaaccggggccccacccgcgcctggtgacttctccggggaagggagccaggacttcccgacccttcgccagagcccaagcagctcccggagctgatccgcatgaagcgagacggaggccgcctgagcgaagcggacatcaggggcttcgtggccgctgtggtgaatgggagcgcgcagggcgcacagatcggggccatgctgatggccatccgacttcggggcatggatctggaggagacctcggtgctgacccaggccctggctcagtcgggacagcagctggagtggccagaggcctggcgccagcagcttgtggacaagcattccacagggggtgtgggtgacaaggtcagcctggtcctcgcacctgccctggcggcatgtggctgcaaggtgccaatgatcagcggacgtggtctggggcacacaggaggcaccttggataagctggagtctattcctggattcaatgtcatccagagcccagagcagatgcaagtgctgctggaccaggcgggctgctgtatcgtgggtcagagtgagcagctggttcctgcggacggaatcctatatgcagccagagatgtgacagccaccgtggacagcctgccactcatcacagcctccattctcagtaagaaactcgtggaggggctgtccgctctggtggtggacgttaagttcggaggggccgccgtcttccccaaccaggagcaggcccgggagctggcaaagacgctggttggcgtgggagccagcctagggcttcgggtcgcggcagcgctgaccgccatggacaagcccctgggtcgctgcgtgggccacgccctggaggtggaggaggcgctgctctgcatggacggcgcaggcccgccagacttaagggacctggtcaccacgctcgggggcgccctgctctggctcagcggacacgcggggactcaggctcagggcgctgcccgggtggccgcggcgctggacgacggctcggcccttggccgcttcgagcggatgctggcggcgcagggcgtggatcccggtctggcccgagccctgtgctcgggaagtcccgcagaacgccggcagctgctgcctcgcgcccgggagcaggaggagctgctggcgcccgcagatggcaccgtggagctggtccgggcgctgccgctggcgctggtgctgcacgagctcggggccgggcgcagccgcgctggggagccgctccgcctgggggtgggcgcagagctgctggtcgacgtgggtcagaggctgcgccgtgggaccccctggctccgcgtgcaccgggacggccccgcgctcagcggcccgcagagccgcgccctgcaggaggcgctcgtactctccgaccgcgcgccattcgccgccccctcgcccttcgcagagctcgttctgccgccgcagcaataaagctcctttgccgcgaaa

SEQ ID NO: 359920 - DNA, 5226 bp, Homo sapiens
aacagcacgaaaatctcctgcccccaccccacccccaggtgattcccttcaccaagtctgggtctagacttggcccccgcgagttcacgtccctgcctaatgcgcctggagtccgggtgatggccctggatccgctcccggccccaagctccacacagccgggaaggaagctcgcgtttgttttgctggcgccagggatacggtccaggccccgccccgccccgcgctgatcccagggtagtgggaaagtgcgctccccaagaatttgcggtgcaggggccgcggccaccgccttctgtccgcaggtgctgcgagccgtaagcgccccccacccgcgctatgggctcggacgcctgggtgggcctttggcggccacaccggccccgcggccccatcgcggcgcactacggaggccccgggcccaaatacaagctgccgcccaacaccggtagaaggggcaggccccgggattgaggggtgggacggcgcctgggggagggaaggggaagagaccagggaggcctgcgctcggggctgaaccgtgcctgctagaggggagagggggtctgtgccgggggagggtccgtgttgcagatggggcttggggctgggcccggccagacgctaactcggatgctcccaggctacgccctgcatgacccgtcgcggccgcgcgcccccgccttcaccttcggcgcgcgcttccccacgcagcagacgacgtgcggccccgggccaggccacctggtgcccgctcgcatgaccgtgcgcggcaccgacggcgcccccgcctactccatctacggccgcccacgccgctcagcgcccttcctcactccgggacctggtcaggacccccgggcccctggccaccccaacgccgaactgcctccagggaggcccacctgggaacccccgacctgaaccccgagtccccctcggataccctaacaccgcatattcggtacccccatatccggatctcaaatcccaaaccccgaaccccacggggctttgataaatcgtggctcagactccccactagtcccaggaccccatctcgggtacccaccaggctcccacgcagttctagccccccacacccttgatccgccccgcaggcaggtacttcccggagcgagcggggaacgcgacgtaccccagtgcgcctcggcacaccattgctccccgaaactggggtgtccaggcggaacagcagagcccaggtcccgcggcctatacggtgccctcgctcttgggtccgcgcgtcatcggcaaagtctccgccccaacttgctccatctacggccgcagagcggctggcagtttcttcgaggacctcagcaagaccccgggcccctgcgcctatcaggtcgtgagtccaggggtctacaagtcccgggccccccagttcacgattctggcgcggacttcgctcccccaagacaacactcggaagccagggcccgcggcctacaacgtggatcagcaccggaagccccgcggctggagtttcgggatccggcactcggactacctggccccgctggtgaccgacgcggacaactgacccgccaggcgggagcggccccacacgtgtttgcttaaagtctgcgagtccgcatcgtgtccgcctctctctctctctctctgcgcgtcctggcgcaaggcctggggtggagccacggctggggccgtgtcccaactccgaacccagcggggcggggcccgagcgtcgggcgaggccgggaccccagcgctgcgccgcgtccgaacgtcgagaccccaccgagggcgggagggggactctcgggagccacagacgcccgagacccacgccgggcgggaccggccagggatcacccccgccgacggccccgggccccgacggcccggaagttccgcgtgtccgggggcaccgggggattggccggggcgcggcgtgcaaggcttcccgggggcggcgactgccgagctccgccctccaggcggccccacccgcctgccgtcctggggcgccgccgccccgccgccggcagtggaccgctgtgcgcgaaccctgaaccctacggtcccgacccgcgggcgaggccgggtacctgggctgggatccggagcaagcgggcgagggcagcgccctaagcaggcccggagcgatggcagccttgatgaccccgggaaccggggccccacccgcgcctggtgacttctccggggaagggagccaggacttcccgacccttcgccagagcccaagcagctcccggagctgatccgcatgaagcgagacggaggccgcctgagcgaagcggacatcaggggcttcgtggccgctgtggtgaatgggagcgcgcagggcgcacagatcggggccatgctgatggccatccgacttcggggcatggatctggaggagacctcggtgctgacccaggccctggctcagtcgggacagcagctggagtggccagaggcctggcgccagcagcttgtggacaagcattccacagggggtgtgggtgacaaggtcagcctggtcctcgcacctgccctggcggcatgtggctgcaaggtgccaatgatcagcggacgtggtctggggcacacaggaggcaccttggataagctggagtctattcctggattcaatgtcatccagagcccagagcagatgcaagtgctgctggaccaggcgggctgctgtatcgtgggtcagagtgagcagctggttcctgcggacggaatcctatatgcagccagagatgtgacagccaccgtggacagcctgccactcatcacagcctccattctcagtaagaaactcgtggaggggctgtccgctctggtggtggacgttaagttcggaggggccgccgtcttccccaaccaggagcaggcccgggagctggcaaagacgctggttggcgtgggagccagcctagggcttcgggtcgcggcagcgctgaccgccatggacaagcccctgggtcgctgcgtgggccacgccctggaggtggaggaggcgctgctctgcatggacggcgcaggcccgccagacttaagggacctggtcaccacgctcgggggcgccctgctctggctcagcggacacgcggggactcaggctcagggcgctgcccgggtggccgcggcgctggacgacggctcggcccttggccgcttcgagcggatgctggcggcgcagggcgtggatcccggtctggcccgagccctgtgctcgggaagtcccgcagaacgccggcagctgctgcctcgcgcccgggagcaggaggagctgctggcgcccgcagatggcaccgtggagctggtccgggcgctgccgctggcgctggtgctgcacgagctcggggccgggcgcagccgcgctggggagccgctccgcctgggggtgggcgcagagctgctggtcgacgtgggtcagaggctgcgccgtgggaccccctggctccgcgtgcaccgggacggccccgcgctcagcggcccgcagagccgcgccctgcaggaggcgctcgtactctccgaccgcgcgccattcgccgccccctcgcccttcgcagagctcgttctgccgccgcagcaataaagctcctttgccgcgaaaccttgtcagtgcttgggcgggagcggaaggatccagggctgcggaggcgggggccgtctcgatgaacacgtgacccccggcgggctccgccttccgcgcacgcgctgagagcctgtcagcggctgcgcccgtgtgcgcatgcgcagctccggggacgcctgcgccctgcctgtgagcgtgtggcgcccgctttccctgagccggcggggcagagcccagggagctggaggtcggcgcttcctctcgtgcttggtccactgacgcgcggccccgccgcgaggtgcggacgccggggctgggaggggaggaggtagccctgaggactcgctggactccggggtagtttcccagctccggctactgcgcggggctggcggggcacaccccagggcgcgctggaggccggagcgaggctggggcgcccgtgggaggctcccagcaggcaccggtgttctcgcggccaagcacagttataacgcgctcgcgcggcgcttcgagtggtcctggaacctttctggccacgagggcgctggccttgctggggagggcacaaacccagaaccgcccgggcgggggtgcagtgagtcctcgggagggtgccctcagcaggagggggcagtgaccgggagtcctgagacctccacctagcaaaccttctgcgggggcccgtgggaaaggctcaaaggtcaccaacgcaaaggcagggcgtcggctgtgagcccggaggagctgctgggaagcctggatgagcatcagatccatgctgctgctgactcggagccccacagcttggcacaggctctctcagctcaagcctccggtcctccctgggaccctgggaggccaggccctgcatctgaggtcctggcttttgtcaaggcagggccctgcagagacaggtgggcagggccagccccagggccctgggcttcgaacccggctgctgatcacaggcctgttcggggctggactcggtggggcctggctggccctgagggctgagaaggagaggctgcagcagcaaaagcgaacagaagccctgcgccaggcagctgtgggccagggcgacttccacctgctggatcacagaggccgggctcgctgcaaggctgacttccggggccagtgggtgctgatgtactttggcttcactcactgccctgacatctgcccagacgagctggagaagctggtgcaggtggtgcggcagctggaagcagagcctggtttgcctccagtgcagcctgtcttcatcactgtggaccccgagcgggacgacgttgaagccatggcccgctacgtccaggacttccacccaagactgttgggtctgaccggctccaccaaacaggttgcccaggctagtcacagttaccgcgtgtactacaatgccggccccaaggatgaggaccaggactacatcgtggaccactccattgccatctacctgctcaaccctgacggcctcttcacggattactacggccggagcagatcggctgagcagatctcagacagtgtgcggcggcacatggcggctttccgcagtgtcctgtcttgagccactgcagtctgggccccatcattaaacgggctgcgtttaa

SEQ ID NO: 359921 - DNA, 5757 bp, Homo sapiens
aacagcacgaaaatctcctgcccccaccccacccccaggtgattcccttcaccaagtctgggtctagacttggcccccgcgagttcacgtccctgcctaatgcgcctggagtccgggtgatggccctggatccgctcccggccccaagctccacacagccgggaaggaagctcgcgtttgttttgctggcgccagggatacggtccaggccccgccccgccccgcgctgatcccagggtagtgggaaagtgcgctccccaagaatttgcggtgcaggggccgcggccaccgccttctgtccgcaggtgctgcgagccgtaagcgccccccacccgcgctatgggctcggacgcctgggtgggcctttggcggccacaccggccccgcggccccatcgcggcgcactacggaggccccgggcccaaatacaagctgccgcccaacaccggtagaaggggcaggccccgggattgaggggtgggacggcgcctgggggagggaaggggaagagaccagggaggcctgcgctcggggctgaaccgtgcctgctagaggggagagggggtctgtgccgggggagggtccgtgttgcagatggggcttggggctgggcccggccagacgctaactcggatgctcccaggctacgccctgcatgacccgtcgcggccgcgcgcccccgccttcaccttcggcgcgcgcttccccacgcagcagacgacgtgcggccccgggccaggccacctggtgcccgctcgcatgaccgtgcgcggcaccgacggcgcccccgcctactccatctacggccgcccacgccgctcagcgcccttcctcactccgggacctggtcaggacccccgggcccctggccaccccaacgccgaactgcctccagggaggcccacctgggaacccccgacctgaaccccgagtccccctcggataccctaacaccgcatattcggtacccccatatccggatctcaaatcccaaaccccgaaccccacggggctttgataaatcgtggctcagactccccactagtcccaggaccccatctcgggtacccaccaggctcccacgcagttctagccccccacacccttgatccgccccgcaggcaggtacttcccggagcgagcggggaacgcgacgtaccccagtgcgcctcggcacaccattgctccccgaaactggggtgtccaggcggaacagcagagcccaggtcccgcggcctatacggtgccctcgctcttgggtccgcgcgtcatcggcaaagtctccgccccaacttgctccatctacggccgcagagcggctggcagtttcttcgaggacctcagcaaggtcgtgagtccaggggtctacaagtcccgggccccccagttcacgattctggcgcggacttcgctcccccaagacaacactcggaagccagggcccgcggcctacaacgtggatcagcaccggaagccccgcggctggagtttcgggatccggcactcggactacctggccccgctggtgaccgacgcggacaactgacccgccaggcgggagcggccccacacgtgtttgcttaaagtctgcgagtccgcatcgtgtccgcctctctctctctctctctgcgcgtcctggcgcaaggcctggggtggagccacggctggggccgtgtcccaactccgaacccagcggggcggggcccgagcgtcgggcgaggccgggaccccagcgctgcgccgcgtccgaacgtcgagaccccaccgagggcgggagggggactctcgggagccacagacgcccgagacccacgccgggcgggaccggccagggatcacccccgccgacggccccgggccccgacggcccggaagttccgcgtgtccgggggcaccgggggattggccggggcgcggcgtgcaaggcttcccgggggcggcgactgccgagctccgccctccaggcggccccacccgcctgccgtcctggggcgccgccgccccgccgccggcagtggaccgctgtgcgcgaaccctgaaccctacggtcccgacccgcgggcgaggccgggtacctgggctgggatccggagcaagcgggcgagggcagcgccctaagcaggtacgggcggggctcaagtcgcgaggcggggaagcgggaggcagacacggacgagggcgacacagacacgggaccgaggggcggacaccggagagacacgggaaaggggtcgggacaggagcacgtggctcagacaccgacgccgggaggccgcagaccccggacgtgtcaggcatccccgcaggcccggagcgatggcagccttgatgaccccgggaaccggggccccacccgcgcctggtgacttctccggggaagggagccaggacttcccgacccttcgccagagcccaagcagctcccggagctgatccgcatgaagcgagacggaggccgcctgagcgaagcggacatcaggggcttcgtggccgctgtggtgaatgggagcgcgcagggcgcacagatcggggccatgctgatggccatccgacttcggggcatggatctggaggagacctcggtgctgacccaggccctggctcagtcgggacagcagctggagtggccagaggcctggcgccagcagcttgtggacaagcattccacagggggtgtgggtgacaaggtcagcctggtcctcgcacctgccctggcggcatgtggctgcaaggtgccaatgatcagcggacgtggtctggggcacacaggaggcaccttggataagctggagtctattcctggattcaatgtcatccagagcccagagcaggtacggggcgccacggatcagtcattgatccaggttgatgatggagaccctggccagaatcactaaaagatcactggtggatcattagggtcactaatgagaacactggtcaaggttactcatgagtcactgggcctgggccgaaatcatcagtggaactttgattaggatcataaaatgggaagttggtcaaaatcacagatggctggcggggcacggtggctcacacctgtagtcctagcacttggggaggccgaagagggcagatcccttgaacccaggagttcaaaaccagcctggataacaaggcaaaaccccatctctacaaaatagttcgctgcgtgtggtggtgcacgcatgtggttccagctactcaggaggctgaggcaggaggatcacttgagcctgggaggtctaggctgcagtgagccgggacgatgccactgcactccagcctgggcaacagagtgagaccctgtcccagcactctgggaggcagaggagcccagttggagatcagcctgggtaatatagtgaaacttgatctctacaaaaaaaagaagaaaaaaaaaagccgcgtgtggtggtgcgcacctgtagtcccagctactgggaagctgaggtgggaggatcacttaagcccaggaggcagaggtcacaatgagccgaaattgtgccaactgcactccagcctgggcaacagaggaagactcttcacagaaaaaaaaaaaaaaaaaaaaaaagctgctaagtcatttaccataagtcactgagaacaggggatgtctgaccagatgcaagtgctgctggaccaggcgggctgctgtatcgtgggtcagagtgagcagctggttcctgcggacggaatcctatatgcagccagagatgtgacagccaccgtggacagcctgccactcatcacagctccaggttctccattgtctccaacctcctctgcctcccccaagcctccattctcagtaagaaactcgtggaggggctgtccgctctggtggtggacgttaagttcggaggggccgccgtcttccccaaccaggagcaggcccgggagctggcaaagacgctggttggcgtgggagccagcctagggcttcgggtcgcggcagcgctgaccgccatggacaagcccctgggtcgctgcgtgggccacgccctggaggtggaggaggcgctgctctgcatggacggcgcaggcccgccagacttaagggacctggtcaccacgctcgggggcgccctgctctggctcagcggacacgcggggactcaggctcagggcgctgcccgggtggccgcggcgctggacgacggctcggcccttggccgcttcgagcggatgctggcggcgcagggcgtggatcccggtctggcccgagccctgtgctcgggaagtcccgcagaacgccggcagctgctgcctcgcgcccgggagcaggaggagctgctggcgcccgcagatggcaccgtggagctggtccgggcgctgccgctggcgctggtgctgcacgagctcggggccgggcgcagccgcgctggggagccgctccgcctgggggtgggcgcagagctgctggtcgacgtgggtcagaggctgcgccgtgggaccccctggctccgcgtgcaccgggacggccccgcgctcagcggcccgcagagccgcgccctgcaggaggcgctcgtactctccgaccgcgcgccattcgccgccccctcgcccttcgcagagctcgttctgccgccgcagcaataaagctcctttgccgcgaaaccttgtcagtgcttgggcgggagcggaaggatccagggctgcggaggcgggggccgtctcgatgaacacgtgacccccggcgggctccgccttccgcgcacgcgctgagagcctgtcagcggctgcgcccgtgtgcgcatgcgcagctccggggacgcctgcgccctgcctgtgagcgtgtggcgcccgctttccctgagccggcggggcagagcccagggagctggaggtcggcgcttcctctcgtgcttggtccactgacgcgcggccccgccgcgaggagcatcagatccatgctgctgctgactcggagccccacagcttggcacaggctctctcagctcaagcctccggtcctccctgggaccctgggaggccaggccctgcatctgaggtcctggcttttgtcaaggcagggccctgcagagacaggtgggcagggccagccccagggccctgggcttcgaacccggctgctgatcacaggcctgttcggggctggactcggtggggcctggctggccctgagggctgagaaggagaggctgcagcagcaaaagcgaacagaagccctgcgccaggcagctgtgggccagggcgacttccacctgctggatcacagaggccgggctcgctgcaaggctgacttccggggccagtgggtgctgatgtactttggcttcactcactgccctgacatctgcccagacgagctggagaagctggtgcaggtggtgcggcagctggaagcagagcctggtttgcctccagtgcagcctgtcttcatcactgtggaccccgagcgggacgacgttgaagccatggcccgctacgtccaggacttccacccaagactgttgggtctgaccggctccaccaaacaggttgcccaggctagtcacagttaccgcgtgtactacaatgccggccccaaggatgaggaccaggactacatcgtggaccactccattgccatctacctgctcaaccctgacggcctcttcacggattactacggccggagcagatcggctgagcagatctcagacagtgtgcggcggcacatggcggctttccgcagtgtcctgtcttgagccactgcagtctgggccccatcattaaacgggctgcgtttaa

SEQ ID NO: 359922 - DNA, 3782 bp, Homo sapiens
aacagcacgaaaatctcctgcccccaccccacccccaggtgattcccttcaccaagtctgggtctagacttggcccccgcgagttcacgtccctgcctaatgcgcctggagtccgggtgatggccctggatccgctcccggccccaagctccacacagccgggaaggaagctcgcgtttgttttgctggcgccagggatacggtccaggccccgccccgccccgcgctgatcccagggtagtgggaaagtgcgctccccaagaatttgcggtgcaggggccgcggccaccgccttctgtccgcaggtgctgcgagccgtaagcgccccccacccgcgctatgggctcggacgcctgggtgggcctttggcggccacaccggccccgcggccccatcgcggcgcactacggaggccccgggcccaaatacaagctgccgcccaacaccggtagaaggggcaggccccgggattgaggggtgggacggcgcctgggggagggaaggggaagagaccagggaggcctgcgctcggggctgaaccgtgcctgctagaggggagagggggtctgtgccgggggagggtccgtgttgcagatggggcttggggctgggcccggccagacgctaactcggatgctcccaggctacgccctgcatgacccgtcgcggccgcgcgcccccgccttcaccttcggcgcgcgcttccccacgcagcagacgacgtgcggccccgggccaggccacctggtgcccgctcgcatgaccgtgcgcggcaccgacggcgcccccgcctactccatctacggccgcccacgccgctcagcgcccttcctcactccgggacctggtcaggacccccgggcccctggccaccccaacgccgaactgcctccagggaggcccacctgggaacccccgacctgaaccccgagtccccctcggataccctaacaccgcatattcggtacccccatatccggatctcaaatcccaaaccccgaaccccacggggctttgataaatcgtggctcagactccccactagtcccaggaccccatctcgggtacccaccaggctcccacgcagttctagccccccacacccttgatccgccccgcaggcaggtacttcccggagcgagcggggaacgcgacgtaccccagtgcgcctcggcacaccattgctccccgaaactggggtgtccaggcggaacagcagagcccaggtcccgcggcctatacggtgccctcgctcttgggtccgcgcgtcatcggcaaagtctccgccccaacttgctccatctacggccgcagagcggctggcagtttcttcgaggacctcagcaaggtcgtgagtccaggggtctacaagtcccgggccccccagttcacgattctggcgcggacttcgctcccccaagacaacactcggaagccagggcccgcggcctacaacgtggatcagcaccggaagccccgcggctggagtttcgggatccggcactcggactacctggccccgctggtgaccgacgcggacaactgacccgccaggcgggagcggccccacacgtgtttgcttaaagtctgcgagtccgcatcgtgtccgcctctctctctctctctctgcgcgtcctggcgcaaggcctggggtggagccacggctggggccgtgtcccaactccgaacccagcggggcggggcccgagcgtcgggcgaggccgggaccccagcgctgcgccgcgtccgaacgtcgagaccccaccgagggcgggagggggactctcgggagccacagacgcccgagacccacgccgggcgggaccggccagggatcacccccgccgacggccccgggccccgacggcccggaagttccgcgtgtccgggggcaccgggggattggccggggcgcggcgtgcaaggcttcccgggggcggcgactgccgagctccgccctccaggcggccccacccgcctgccgtcctggggcgccgccgccccgccgccggcagtggaccgctgtgcgcgaaccctgaaccctacggtcccgacccgcgggcgaggccgggtacctgggctgggatccggagcaagcgggcgagggcagcgccctaagcaggtacgggcggggctcaagtcgcgaggcggggaagcgggaggcagacacggacgagggcgacacagacacgggaccgaggggcggacaccggagagacacgggaaaggggtcgggacaggagcacgtggctcagacaccgacgccgggaggccgcagaccccggacgtgtcaggcatccccgcaggcccggagcgatggcagccttgatgaccccgggaaccggggccccacccgcgcctggtgacttctccggggaagggagccaggacttcccgacccttcgccagagcccaagcagctcccggagctgatccgcatgaagcgagacggaggccgcctgagcgaagcggacatcaggggcttcgtggccgctgtggtgaatgggagcgcgcagggcgcacagatcggggccatgctgatggccatccgacttcggggcatggatctggaggagacctcggtgctgacccaggccctggctcagtcgggacagcagctggagtggccagaggcctggcgccagcagcttgtggacaagcattccacagggggtgtgggtgacaaggtcagcctggtcctcgcacctgccctggcggcatgtggctgcaaggtgccaatgatcagcggacgtggtctggggcacacaggaggcaccttggataagctggagtctattcctggattcaatgtcatccagagcccagagcagatgcaagtgctgctggaccaggcgggctgctgtatcgtgggtcagagtgagcagctggttcctgcggacggaatcctatatgcagccagagatgtgacagccaccgtggacagcctgccactcatcacagcctccattctcagtaagaaactcgtggaggggctgtccgctctggtggtggacgttaagttcggaggggccgccgtcttccccaaccaggagcaggcccgggagctggcaaagacgctggttggcgtgggagccagcctagggcttcgggtcgcggcagcgctgaccgccatggacaagcccctgggtcgctgcgtgggccacgccctggaggtggaggaggcgctgctctgcatggacggcgcaggcccgccagacttaagggacctggtcaccacgctcgggggcgccctgctctggctcagcggacacgcggggactcaggctcagggcgctgcccgggtggccgcggcgctggacgacggctcggcccttggccgcttcgagcggatgctggcggcgcagggcgtggatcccggtctggcccgagccctgtgctcgggaagtcccgcagaacgccggcagctgctgcctcgcgcccgggagcaggaggagctgctggcgcccgcagatggcaccgtggagctggtccgggcgctgccgctggcgctggtgctgcacgagctcggggccgggcgcagccgcgctggggagccgctccgcctgggggtgggcgcagagctgctggtcgacgtgggtcagaggctgcgccgtgggaccccctggctccgcgtgcaccgggacggccccgcgctcagcggcccgcagagccgcgccctgcaggaggcgctcgtactctccgaccgcgcgccattcgccgccccctcgcccttcgcagagctcgttctgccgccgcagcaataaagctcctttgccgcgaaa

SEQ ID NO: 359923 - DNA, 4916 bp, Homo sapiens
aacagcacgaaaatctcctgcccccaccccacccccaggtgattcccttcaccaagtctgggtctagacttggcccccgcgagttcacgtccctgcctaatgcgcctggagtccgggtgatggccctggatccgctcccggccccaagctccacacagccgggaaggaagctcgcgtttgttttgctggcgccagggatacggtccaggccccgccccgccccgcgctgatcccagggtagtgggaaagtgcgctccccaagaatttgcggtgcaggggccgcggccaccgccttctgtccgcaggtgctgcgagccgtaagcgccccccacccgcgctatgggctcggacgcctgggtgggcctttggcggccacaccggccccgcggccccatcgcggcgcactacggaggccccgggcccaaatacaagctgccgcccaacaccggtagaaggggcaggccccgggattgaggggtgggacggcgcctgggggagggaaggggaagagaccagggaggcctgcgctcggggctgaaccgtgcctgctagaggggagagggggtctgtgccgggggagggtccgtgttgcagatggggcttggggctgggcccggccagacgctaactcggatgctcccaggctacgccctgcatgacccgtcgcggccgcgcgcccccgccttcaccttcggcgcgcgcttccccacgcagcagacgacgtgcggccccgggccaggccacctggtgcccgctcgcatgaccgtgcgcggcaccgacggcgcccccgcctactccatctacggccgcccacgccgctcagcgcccttcctcactccgggacctggtcaggacccccgggcccctggccaccccaacgccgaactgcctccagggaggcccacctgggaacccccgacctgaaccccgagtccccctcggataccctaacaccgcatattcggtacccccatatccggatctcaaatcccaaaccccgaaccccacggggctttgataaatcgtggctcagactccccactagtcccaggaccccatctcgggtacccaccaggctcccacgcagttctagccccccacacccttgatccgccccgcaggcaggtacttcccggagcgagcggggaacgcgacgtaccccagtgcgcctcggcacaccattgctccccgaaactggggtgtccaggcggaacagcagagcccaggtcccgcggcctatacggtgccctcgctcttgggtccgcgcgtcatcggcaaagtctccgccccaacttgctccatctacggccgcagagcggctggcagtttcttcgaggacctcagcaagaccccgggcccctgcgcctatcaggtcgtgagtccaggggtctacaagtcccgggccccccagttcacgattctggcgcggacttcgctcccccaagacaacactcggaagccagggcccgcggcctacaacgtggatcagcaccggaagccccgcggctggagtttcgggatccggcactcggactacctggccccgctggtgaccgacgcggacaactgacccgccaggcgggagcggccccacacgtgtttgcttaaagtctgcgagtccgcatcgtgtccgcctctctctctctctctctgcgcgtcctggcgcaaggcctggggtggagccacggctggggccgtgtcccaactccgaacccagcggggcggggcccgagcgtcgggcgaggccgggaccccagcgctgcgccgcgtccgaacgtcgagaccccaccgagggcgggagggggactctcgggagccacagacgcccgagacccacgccgggcgggaccggccagggatcacccccgccgacggccccgggccccgacggcccggaagttccgcgtgtccgggggcaccgggggattggccggggcgcggcgtgcaaggcttcccgggggcggcgactgccgagctccgccctccaggcggccccacccgcctgccgtcctggggcgccgccgccccgccgccggcagtggaccgctgtgcgcgaaccctgaaccctacggtcccgacccgcgggcgaggccgggtacctgggctgggatccggagcaagcgggcgagggcagcgccctaagcaggcccggagcgatggcagccttgatgaccccgggaaccggggccccacccgcgcctggtgacttctccggggaagggagccaggacttcccgacccttcgccagagcccaagcagctcccggagctgatccgcatgaagcgagacggaggccgcctgagcgaagcggacatcaggggcttcgtggccgctgtggtgaatgggagcgcgcagggcgcacagatcggtgcgtggggagggttgggcgttcctgaccccgactgggaggtcagcccgagagactttgggtccctgggggtgcgacggtgccccactaccagcaccggccccagggtgccccaccgctgtgggctgccaccctcacgcgtacccccacataccaggggccatgctgatggccatccgacttcggggcatggatctggaggagacctcggtgctgacccaggccctggctcagtcgggacagcagctggagtggccagaggcctggcgccagcagcttgtggacaagcattccacagggggtgtgggtgacaaggtcagcctggtcctcgcacctgccctggcggcatgtggctgcaaggtgccaatgatcagcggacgtggtctggggcacacaggaggcaccttggataagctggagtctattcctggattcaatgtcatccagagcccagagcagatgcaagtgctgctggaccaggcgggctgctgtatcgtgggtcagagtgagcagctggttcctgcggacggaatcctatatgcagccagagatgtgacagccaccgtggacagcctgccactcatcacagcctccattctcagtaagaaactcgtggaggggctgtccgctctggtggtggacgttaagttcggaggggccgccgtcttccccaaccaggagcaggcccgggagctggcaaagacgctggttggcgtgggagccagcctagggcttcgggtcgcggcagcgctgaccgccatggacaagcccctgggtcgctgcgtgggccacgccctggaggtggaggaggcgctgctctgcatggacggcgcaggcccgccagacttaagggacctggtcaccacgctcgggggcgccctgctctggctcagcggacacgcggggactcaggctcagggcgctgcccgggtggccgcggcgctggacgacggctcggcccttggccgcttcgagcggatgctggcggcgcagggcgtggatcccggtctggcccgagccctgtgctcgggaagtcccgcagaacgccggcagctgctgcctcgcgcccgggagcaggaggagctgctggcgcccgcagatggcaccgtggagctggtccgggcgctgccgctggcgctggtgctgcacgagctcggggccgggcgcagccgcgctggggagccgctccgcctgggggtgggcgcagagctgctggtcgacgtgggtcagaggctgcgccgtgggaccccctggctccgcgtgcaccgggacggccccgcgctcagcggcccgcagagccgcgccctgcaggaggcgctcgtactctccgaccgcgcgccattcgccgccccctcgcccttcgcagagctcgttctgccgccgcagcaataaagctcctttgccgcgaaaccttgtcagtgcttgggcgggagcggaaggatccagggctgcggaggcgggggccgtctcgatgaacacgtgacccccggcgggctccgccttccgcgcacgcgctgagagcctgtcagcggctgcgcccgtgtgcgcatgcgcagctccggggacgcctgcgccctgcctgtgagcgtgtggcgcccgctttccctgagccggcggggcagagcccagggagctggaggtcggcgcttcctctcgtgcttggtccactgacgcgcggccccgccgcgaggagcatcagatccatgctgctgctgactcggagccccacagcttggcacaggctctctcagctcaagcctccggtcctccctgggaccctgggaggccaggccctgcatctgaggtcctggcttttgtcaaggcagggccctgcagagacaggtgggcagggccagccccagggccctgggcttcgaacccggctgctgatcacaggcctgttcggggctggactcggtggggcctggctggccctgagggctgagaaggagaggctgcagcagcaaaagcgaacagaagccctgcgccaggcagctgtgggccagggcgacttccacctgctggatcacagaggccgggctcgctgcaaggctgacttccggggccagtgggtgctgatgtactttggcttcactcactgccctgacatctgcccagacgagctggagaagctggtgcaggtggtgcggcagctggaagcagagcctggtttgcctccagtgcagcctgtcttcatcactgtggaccccgagcgggacgacgttgaagccatggcccgctacgtccaggacttccacccaagactgttgggtctgaccggctccaccaaacaggttgcccaggctagtcacagttaccgcgtgtactacaatgccggccccaaggatgaggaccaggactacatcgtggaccactccattgccatctacctgctcaaccctgacggcctcttcacggattactacggccggagcagatcggctgagcagatctcagacagtgtgcggcggcacatggcggctttccgcagtgtcctgtcttgagccactgcagtctgggccccatcattaaacgggctgcgtttaa

SEQ ID NO: 359924 - DNA, 4468 bp, Homo sapiens
aacagcacgaaaatctcctgcccccaccccacccccaggtgattcccttcaccaagtctgggtctagacttggcccccgcgagttcacgtccctgcctaatgcgcctggagtccgggtgatggccctggatccgctcccggccccaagctccacacagccgggaaggaagctcgcgtttgttttgctggcgccagggatacggtccaggccccgccccgccccgcgctgatcccagggtagtgggaaagtgcgctccccaagaatttgcggtgcaggggccgcggccaccgccttctgtccgcaggtgctgcgagccgtaagcgccccccacccgcgctatgggctcggacgcctgggtgggcctttggcggccacaccggccccgcggccccatcgcggcgcactacggaggccccgggcccaaatacaagctgccgcccaacaccggtagaaggggcaggccccgggattgaggggtgggacggcgcctgggggagggaaggggaagagaccagggaggcctgcgctcggggctgaaccgtgcctgctagaggggagagggggtctgtgccgggggagggtccgtgttgcagatggggcttggggctgggcccggccagacgctaactcggatgctcccaggctacgccctgcatgacccgtcgcggccgcgcgcccccgccttcaccttcggcgcgcgcttccccacgcagcagacgacgtgcggccccgggccaggccacctggtgcccgctcgcatgaccgtgcgcggcaccgacggcgcccccgcctactccatctacggccgcccacgccgctcagcgcccttcctcactccgggacctggtcaggacccccgggcccctggccaccccaacgccgaactgcctccagggaggcccacctgggaacccccgacctgaaccccgagtccccctcggataccctaacaccgcatattcggtacccccatatccggatctcaaatcccaaaccccgaaccccacggggctttgataaatcgtggctcagactccccactagtcccaggaccccatctcgggtacccaccaggctcccacgcagttctagccccccacacccttgatccgccccgcaggcaggtacttcccggagcgagcggggaacgcgacgtaccccagtgcgcctcggcacaccattgctccccgaaactggggtgtccaggcggaacagcagagcccaggtcccgcggcctatacggtgccctcgctcttgggtccgcgcgtcatcggcaaagtctccgccccaacttgctccatctacggccgcagagcggctggcagtttcttcgaggacctcagcaaggtgggggaggggccggggcggacgcagggggtccctggtccgcggcagtggaggcggcagccagcaccctctgccctctcgcagaccccgggcccctgcgcctatcaggtcgtgagtccaggggtctacaagtcccgggccccccagttcacgattctggcgcggacttcgctcccccaagacaacactcggaagccagggcccgcggcctacaacgtggatcaggtggcctggagcccagggtcaagggtcagagtcaggagagtggggagggcctgaggtcggagtgatgggatcagagtccccgggggtccaggggtcccggcgcggagaggatgccggccccgcgaggtcagcggtgtctccgggcccgcagcaccggaagccccgcggctggagtttcgggatccggcactcggactacctggccccgctggtgaccgacgcggacaactgacccgccaggcgggagcggccccacacgtgtttgcttaaagtctgcgagtccgcatcgtgtccgcctctctctctctctctctgcgcgtcctggcgcaaggcctggggtggagccacggctggggccgtgtcccaactccgaacccagcggggcggggcccgagcgtcgggcgaggccgggaccccagcgctgcgccgcgtccgaacgtcgagaccccaccgagggcgggagggggactctcgggagccacagacgcccgagacccacgccgggcgggaccggccagggatcacccccgccgacggccccgggccccgacggcccggaagttccgcgtgtccgggggcaccgggggattggccggggcgcggcgtgcaaggcttcccgggggcggcgactgccgagctccgccctccaggcggccccacccgcctgccgtcctggggcgccgccgccccgccgccggcagtggaccgctgtgcgcgaaccctgaaccctacggtcccgacccgcgggcgaggccgggtacctgggctgggatccggagcaagcgggcgagggcagcgccctaacagatgcaagtgctgctggaccaggcgggctgctgtatcgtgggtcagagtgagcagctggttcctgcggacggaatcctatatgcagccagagatgtgacagccaccgtggacagcctgccactcatcacagcctccattctcagtaagaaactcgtggaggggctgtccgctctggtggtggacgttaagttcggaggggccgccgtcttccccaaccaggagcaggcccgggagctggcaaagacgctggttggcgtgggagccagcctagggcttcgggtcgcggcagcgctgaccgccatggacaagcccctgggtcgctgcgtgggccacgccctggaggtggaggaggcgctgctctgcatggacggcgcaggcccgccagacttaagggacctggtcaccacgctcgggggcgccctgctctggctcagcggacacgcggggactcaggctcagggcgctgcccgggtggccgcggcgctggacgacggctcggcccttggccgcttcgagcggatgctggcggcgcagggcgtggatcccggtctggcccgagccctgtgctcgggaagtcccgcagaacgccggcagctgctgcctcgcgcccgggagcaggaggagctgctggcgcccgcagatggcaccgtggagctggtccgggcgctgccgctggcgctggtgctgcacgagctcggggccgggcgcagccgcgctggggagccgctccgcctgggggtgggcgcagagctgctggtcgacgtgggtcagaggctgcgccgtgggaccccctggctccgcgtgcaccgggacggccccgcgctcagcggcccgcagagccgcgccctgcaggaggcgctcgtactctccgaccgcgcgccattcgccgccccctcgcccttcgcagagctcgttctgccgccgcagcaataaagctcctttgccgcgaaaccttgtcagtgcttgggcgggagcggaaggatccagggctgcggaggcgggggccgtctcgatgaacacgtgacccccggcgggctccgccttccgcgcacgcgctgagagcctgtcagcggctgcgcccgtgtgcgcatgcgcagctccggggacgcctgcgccctgcctgtgagcgtgtggcgcccgctttccctgagccggcggggcagagcccagggagctggaggtcggcgcttcctctcgtgcttggtccactgacgcgcggccccgccgcgaggagcatcagatccatgctgctgctgactcggagccccacagcttggcacaggctctctcagctcaagcctccggtcctccctgggaccctgggaggccaggccctgcatctgaggtcctggcttttgtcaaggcagggccctgcagagacaggtgggcagggccagccccagggccctgggcttcgaacccggctgctgatcacaggcctgttcggggctggactcggtggggcctggctggccctgagggctgagaaggagaggctgcagcagcaaaagcgaacagaagccctgcgccaggcagctgtgggccagggcgacttccacctgctggatcacagaggccgggctcgctgcaaggctgacttccggggccagtgggtgctgatgtactttggcttcactcactgccctgacatctgcccagacgagctggagaagctggtgcaggtggtgcggcagctggaagcagagcctggtttgcctccagtgcagcctgtcttcatcactgtggaccccgagcgggacgacgttgaagccatggcccgctacgtccaggacttccacccaagactgttgggtctgaccggctccaccaaacaggttgcccaggctagtcacagttaccgcgtgtactacaatgccggccccaaggatgaggaccaggactacatcgtggaccactccattgccatctacctgctcaaccctgacggcctcttcacggattactacggccggagcagatcggctgagcagatctcagacagtgtgcggcggcacatggcggctttccgcagtgtcctgtcttgagccactgcagtctgggccccatcattaaacgggctgcgtttaa

SEQ ID NO: 359925 - DNA, 4170 bp, Homo sapiens
aacagcacgaaaatctcctgcccccaccccacccccaggtgattcccttcaccaagtctgggtctagacttggcccccgcgagttcacgtccctgcctaatgcgcctggagtccgggtgatggccctggatccgctcccggccccaagctccacacagccgggaaggaagctcgcgtttgttttgctggcgccagggatacggtccaggccccgccccgccccgcgctgatcccagggtagtgggaaagtgcgctccccaagaatttgcggtgcaggggccgcggccaccgccttctgtccgcaggtgctgcgagccgtaagcgccccccacccgcgctatgggctcggacgcctgggtgggcctttggcggccacaccggccccgcggccccatcgcggcgcactacggaggccccgggcccaaatacaagctgccgcccaacaccggtagaaggggcaggccccgggattgaggggtgggacggcgcctgggggagggaaggggaagagaccagggaggcctgcgctcggggctgaaccgtgcctgctagaggggagagggggtctgtgccgggggagggtccgtgttgcagatggggcttggggctgggcccggccagacgctaactcggatgctcccaggctacgccctgcatgacccgtcgcggccgcgcgcccccgccttcaccttcggcgcgcgcttccccacgcagcagacgacgtgcggccccgggccaggccacctggtgcccgctcgcatgaccgtgcgcggcaccgacggcgcccccgcctactccatctacggccgcccacgccgctcagcgcccttcctcactccgggacctggtcaggacccccgggcccctggccaccccaacgccgaactgcctccagggaggcccacctgggaacccccgacctgaaccccgagtccccctcggataccctaacaccgcatattcggtacccccatatccggatctcaaatcccaaaccccgaaccccacggggctttgataaatcgtggctcagactccccactagtcccaggaccccatctcgggtacccaccaggctcccacgcagttctagccccccacacccttgatccgccccgcaggcaggtacttcccggagcgagcggggaacgcgacgtaccccagtgcgcctcggcacaccattgctccccgaaactggggtgtccaggcggaacagcagagcccaggtcccgcggcctatacggtgccctcgctcttgggtccgcgcgtcatcggcaaagtctccgccccaacttgctccatctacggccgcagagcggctggcagtttcttcgaggacctcagcaagaccccgggcccctgcgcctatcaggtcgtgagtccaggggtctacaagtcccgggccccccagttcacgattctggcgcggacttcgctcccccaagacaacactcggaagccagggcccgcggcctacaacgtggatcagcaccggaagccccgcggctggagtttcgggatccggcactcggactacctggccccgctggtgaccgacgcggacaactgacccgccaggcgggagcggccccacacgtgtttgcttaaagtctgcgagtccgcatcgtgtccgcctctctctctctctctctgcgcgtcctggcgcaaggcctggggtggagccacggctggggccgtgtcccaactccgaacccagcggggcggggcccgagcgtcgggcgaggccgggaccccagcgctgcgccgcgtccgaacgtcgagaccccaccgagggcgggagggggactctcgggagccacagacgcccgagacccacgccgggcgggaccggccagggatcacccccgccgacggccccgggccccgacggcccggaagttccgcgtgtccgggggcaccgggggattggccggggcgcggcgtgcaaggcttcccgggggcggcgactgccgagctccgccctccaggcggccccacccgcctgccgtcctggggcgccgccgccccgccgccggcagtggaccgctgtgcgcgaaccctgaaccctacggtcccgacccgcgggcgaggccgggtacctgggctgggatccggagcaagcgggcgagggcagcgccctaagcaggcccggagcgatggcagccttgatgaccccgggaaccggggccccacccgcgcctggtgacttctccggggaagggagccaggacttcccgacccttcgccagagcccaagcagctcccggagctgatccgcatgaagcgagacggaggccgcctgagcgaagcggacatcaggggcttcgtggccgctgtggtgaatgggagcgcgcagggcgcacagatcggggccatgctgatggccatccgacttcggggcatggatctggaggagacctcggtgctgacccaggccctggctcagtcgggacagcagctggagtggccagaggcctggcgccagcagcttgtggacaagcattccacagggggtgtgggtgacaaggtcagcctggtcctcgcacctgccctggcggcatgtggctgcaaggtgccaatgatcagcggacgtggtctggggcacacaggaggcaccttggataagctggagtctattcctggattcaatgtcatccagagcccagagcagatgcaagtgctgctggaccaggcgggctgctgtatcgtgggtcagagtgagcagctggttcctgcggacggaatcctatatgcagccagagatgtgacagccaccgtggacagcctgccactcatcacagcctccattctcagtaagaaactcgtggaggggctgtccgctctggtggtggacgttaagttcggaggggccgccgtcttccccaaccaggagcaggcccgggagctggcaaagacgctggttggcgtgggagccagcctagggcttcgggtcgcggcagcgctgaccgccatggacaagcccctgggtcgctgcgtgggccacgccctggaggtggaggaggcgctgctctgcatggacggcgcaggcccgccagacttaagggacctggtcaccacgctcgggggcgccctgctctggctcagcggacacgcggggactcaggctcagggcgctgcccgggtggccgcggcgctggacgacggctcggcccttggccgcttcgagcggatgctggcggcgcagggcgtggatcccggtctggcccgagccctgtgctcgggaagtcccgcagaacgccggcagctgctgcctcgcgcccgggagcaggaggagctgctggcgcccgcagatgagcatcagatccatgctgctgctgactcggagccccacagcttggcacaggctctctcagctcaagcctccggtcctccctgggaccctgggaggccaggccctgcatctgaggtcctggcttttgtcaaggcagggccctgcagagacaggtgggcagggccagccccagggccctgggcttcgaacccggctgctgatcacaggcctgttcggggctggactcggtggggcctggctggccctgagggctgagaaggagaggctgcagcagcaaaagcgaacagaagccctgcgccaggcagctgtgggccagggcgacttccacctgctggatcacagaggccgggctcgctgcaaggctgacttccggggccagtgggtgctgatgtactttggcttcactcactgccctgacatctgcccagacgagctggagaagctggtgcaggtggtgcggcagctggaagcagagcctggtttgcctccagtgcagcctgtcttcatcactgtggaccccgagcgggacgacgttgaagccatggcccgctacgtccaggacttccacccaagactgttgggtctgaccggctccaccaaacaggttgcccaggctagtcacagttaccgcgtgtactacaatgccggccccaaggatgaggaccaggactacatcgtggaccactccattgccatctacctgctcaaccctgacggcctcttcacggattactacggccggagcagatcggctgagcagatctcagacagtgtgcggcggcacatggcggctttccgcagtgtcctgtcttgagccactgcagtctgggccccatcattaaacgggctgcgtttaa

SEQ ID NO: 359926 - DNA, 2716 bp, Homo sapiens
tgtgggcttctactccccaggccttgtcctctcttcctgttgctgtcgtatacgaacctgaccttgcgattggcgggcacccgtgtcctagtgccctctccacgactgtgctcgtcttgtatgatcctcttgtcatccggagtctcgactctgcgcctggtgacttctccggggaagggagccaggacttcccgacccttcgccagagcccaagcagctcccggagctgatccgcatgaagcgagacggaggccgcctgagcgaagcggacatcaggggcttcgtggccgctgtggtgaatgggagcgcgcagggcgcacagatcggggccatgctgatggccatccgacttcggggcatggatctggaggagacctcggtgctgacccaggccctggctcagtcgggacagcagctggagtggccagaggcctggcgccagcagcttgtggacaagcattccacagggggtgtgggtgacaaggtcagcctggtcctcgcacctgccctggcggcatgtggctgcaaggtgccaatgatcagcggacgtggtctggggcacacaggaggcaccttggataagctggagtctattcctggattcaatgtcatccagagcccagagcagatgcaagtgctgctggaccaggcgggctgctgtatcgtgggtcagagtgagcagctggttcctgcggacggaatcctatatgcagccagagatgtgacagccaccgtggacagcctgccactcatcacagcctccattctcagtaagaaactcgtggaggggctgtccgctctggtggtggacgttaagttcggaggggccgccgtcttccccaaccaggagcaggcccgggagctggcaaagacgctggttggcgtgggagccagcctagggcttcgggtcgcggcagcgctgaccgccatggacaagcccctgggtcgctgcgtgggccacgccctggaggtggaggaggcgctgctctgcatggacggcgcaggcccgccagacttaagggacctggtcaccacgctcgggggcgccctgctctggctcagcggacacgcggggactcaggctcagggcgctgcccgggtggccgcggcgctggacgacggctcggcccttggccgcttcgagcggatgctggcggcgcagggcgtggatcccggtctggcccgagccctgtgctcgggaagtcccgcagaacgccggcagctgctgcctcgcgcccgggagcaggaggagctgctggcgcccgcagatggcaccgtggagctggtccgggcgctgccgctggcgctggtgctgcacgagctcggggccgggcgcagccgcgctggggagccgctccgcctgggggtgggcgcagagctgctggtcgacgtgggtcagaggctgcgccgtgggaccccctggctccgcgtgcaccgggacggccccgcgctcagcggcccgcagagccgcgccctgcaggaggcgctcgtactctccgaccgcgcgccattcgccgccccctcgcccttcgcagagctcgttctgccgccgcagcaataaagctcctttgccgcgaaaccttgtcagtgcttgggcgggagcggaaggatccagggctgcggaggcgggggccgtctcgatgaacacgtgacccccggcgggctccgccttccgcgcacgcgctgagagcctgtcagcggctgcgcccgtgtgcgcatgcgcagctccggggacgcctgcgccctgcctgtgagcgtgtggcgcccgctttccctgagccggcggggcagagcccagggagctggaggtcggcgcttcctctcgtgcttggtccactgacgcgcggccccgccgcgaggagcatcagatccatgctgctgctgactcggagccccacagcttggcacaggctctctcagctcaagcctccggtcctccctgggaccctgggaggccaggccctgcatctgaggtcctggcttttgtcaaggcagggccctgcagagacaggtgggcagggccagccccagggccctgggcttcgaacccggctgctgatcacaggcctgttcggggctggactcggtggggcctggctggccctgagggctgagaaggagaggctgcagcagcaaaagcgaacagaagccctgcgccaggcagctgtgggccagggcgacttccacctgctggatcacagaggccgggctcgctgcaaggctgacttccggggccagtgggtgctgatgtactttggcttcactcactgccctgacatctgcccagacgagctggagaagctggtgcaggtggtgcggcagctggaagcagagcctggtttgcctccagtgcagcctgtcttcatcactgtggaccccgagcgggacgacgttgaagccatggcccgctacgtccaggacttccacccaagactgttgggtctgaccggctccaccaaacaggttgcccaggctagtcacagttaccgcgtgtactacaatgccggccccaaggatgaggaccaggactacatcgtggaccactccattgccatctacctgctcaaccctgacggcctcttcacggattactacggccggagcagatcggctgagcagatctcagacagtgtgcggcggcacatggcggctttccgcagtgtcctgtcttgagccactgcagtctgggccccatcattaaacgggctgcgtttaa

SEQ ID NO: 359927 - DNA, 3726 bp, Homo sapiens
aacagcacgaaaatctcctgcccccaccccacccccaggtgattcccttcaccaagtctgggtctagacttggcccccgcgagttcacgtccctgcctaatgcgcctggagtccgggtgatggccctggatccgctcccggccccaagctccacacagccgggaaggaagctcgcgtttgttttgctggcgccagggatacggtccaggccccgccccgccccgcgctgatcccagggtagtgggaaagtgcgctccccaagaatttgcggtgcaggggccgcggccaccgccttctgtccgcaggtgctgcgagccgtaagcgccccccacccgcgctatgggctcggacgcctgggtgggcctttggcggccacaccggccccgcggccccatcgcggcgcactacggaggccccgggcccaaatacaagctgccgcccaacaccggtagaaggggcaggccccgggattgaggggtgggacggcgcctgggggagggaaggggaagagaccagggaggcctgcgctcggggctgaaccgtgcctgctagaggggagagggggtctgtgccgggggagggtccgtgttgcagatggggcttggggctgggcccggccagacgctaactcggatgctcccaggctacgccctgcatgacccgtcgcggccgcgcgcccccgccttcaccttcggcgcgcgcttccccacgcagcagacgacgtgcggccccgggccaggccacctggtgcccgctcgcatgaccgtgcgcggcaccgacggcgcccccgcctactccatctacggccgcccacgccgctcagcgcccttcctcactccgggacctggtcaggacccccgggcccctggccaccccaacgccgaactgcctccagggaggcccacctgggaacccccgacctgaaccccgagtccccctcggataccctaacaccgcatattcggtacccccatatccggatctcaaatcccaaaccccgaaccccacggggctttgataaatcgtggctcagactccccactagtcccaggaccccatctcgggtacccaccaggctcccacgcagttctagccccccacacccttgatccgccccgcaggcaggtacttcccggagcgagcggggaacgcgacgtaccccagtgcgcctcggcacaccattgctccccgaaactggggtgtccaggcggaacagcagagcccaggtcccgcggcctatacggtgccctcgctcttgggtccgcgcgtcatcggcaaagtctccgccccaacttgctccatctacggccgcagagcggctggcagtttcttcgaggacctcagcaagaccccgggcccctgcgcctatcaggtcgtgagtccaggggtctacaagtcccgggccccccagttcacgattctggcgcggacttcgctcccccaagacaacactcggaagccagggcccgcggcctacaacgtggatcagcaccggaagccccgcggctggagtttcgggatccggcactcggactacctggccccgctggtgaccgacgcggacaactgacccgccaggcgggagcggccccacacgtgtttgcttaaagtctgcgagtccgcatcgtgtccgcctctctctctctctctctgcgcgtcctggcgcaaggcctggggtggagccacggctggggccgtgtcccaactccgaacccagcggggcggggcccgagcgtcgggcgaggccgggaccccagcgctgcgccgcgtccgaacgtcgagaccccaccgagggcgggagggggactctcgggagccacagacgcccgagacccacgccgggcgggaccggccagggatcacccccgccgacggccccgggccccgacggcccggaagttccgcgtgtccgggggcaccgggggattggccggggcgcggcgtgcaaggcttcccgggggcggcgactgccgagctccgccctccaggcggccccacccgcctgccgtcctggggcgccgccgccccgccgccggcagtggaccgctgtgcgcgaaccctgaaccctacggtcccgacccgcgggcgaggccgggtacctgggctgggatccggagcaagcgggcgagggcagcgccctaagcaggcccggagcgatggcagccttgatgaccccgggaaccggggccccacccgcgcctggtgacttctccggggaagggagccaggacttcccgacccttcgccagagcccaagcagctcccggagctgatccgcatgaagcgagacggaggccgcctgagcgaagcggacatcaggggcttcgtggccgctgtggtgaatgggagcgcgcagggcgcacagatcggggccatgctgatggccatccgacttcggggcatggatctggaggagacctcggtgctgacccaggccctggctcagtcgggacagcagctggagtggccagaggcctggcgccagcagcttgtggacaagcattccacagggggtgtgggtgacaaggtcagcctggtcctcgcacctgccctggcggcatgtggctgcaaggtgccaatgatcagcggacgtggtctggggcacacaggaggcaccttggataagctggagtctattcctggattcaatgtcatccagagcccagagcagatgcaagtgctgctggaccaggcgggctgctgtatcgtgggtcagagtgagcagctggttcctgcggacggaatcctatatgcagccagagatgtgacagccaccgtggacagcctgccactcatcacagcctccattctcagtaagaaactcgtggaggggctgtccgctctggtggtggacgttaagttcggaggggccgccgtcttccccaaccaggagcaggcccgggagctggcaaagacgctggttggcgtgggagccagcctagggcttcgggtcgcggcagcgctgaccgccatggacaagcccctgggtcgctgcgtgggccacgccctggaggtggaggaggcgctgctctgcatggacggcgcaggcccgccagacttaagggacctggtcaccacgctcgggggcgccctgctctggctcagcggacacgcggggactcaggctcagggcgctgcccgggtggccgcggcgctggacgacggctcggcccttggccgcttcgagcggatgctggcggcgcagggcgtggatcccggtctggcccgagccctgtgctcgggaagtcccgcagaacgccggcagctgctgcctcgcgcccgggagcaggaggagctgctggcgcccgcagatggtgagcgtcgggggagtccccgtccttccgcctccgccatccccttcccttcccgaggccccgccccttcccgagcccgcgcctttcagcccctctccccgcaggcaccgtggagctggtccgggcgctgccgctggcgctggtgctgcacgagctcggggccgggcgcagccgcgctggggagccgctccgcctgggggtgggcgcagagctgctggtcgacgtgggtcagaggctgcgccgtgggaccccctggctccgcgtgcaccgggacggccccgcgctcagcggcccgcagagccgcgccctgcaggaggcgctcgtactctccgaccgcgcgccattcgccgccccctcgcccttcgcagagctcgttctgccgccgcagcaataaagctcctttgccgcgaaa

SEQ ID NO: 359928 - DNA, 3879 bp, Homo sapiens
aacagcacgaaaatctcctgcccccaccccacccccaggtgattcccttcaccaagtctgggtctagacttggcccccgcgagttcacgtccctgcctaatgcgcctggagtccgggtgatggccctggatccgctcccggccccaagctccacacagccgggaaggaagctcgcgtttgttttgctggcgccagggatacggtccaggccccgccccgccccgcgctgatcccagggtagtgggaaagtgcgctccccaagaatttgcggtgcaggggccgcggccaccgccttctgtccgcaggtgctgcgagccgtaagcgccccccacccgcgctatgggctcggacgcctgggtgggcctttggcggccacaccggccccgcggccccatcgcggcgcactacggaggccccgggcccaaatacaagctgccgcccaacaccggtagaaggggcaggccccgggattgaggggtgggacggcgcctgggggagggaaggggaagagaccagggaggcctgcgctcggggctgaaccgtgcctgctagaggggagagggggtctgtgccgggggagggtccgtgttgcagatggggcttggggctgggcccggccagacgctaactcggatgctcccaggctacgccctgcatgacccgtcgcggccgcgcgcccccgccttcaccttcggcgcgcgcttccccacgcagcagacgacgtgcggccccgggccaggccacctggtgcccgctcgcatgaccgtgcgcggcaccgacggcgcccccgcctactccatctacggccgcccacgccgctcagcgcccttcctcactccgggacctggtcaggacccccgggcccctggccaccccaacgccgaactgcctccagggaggcccacctgggaacccccgacctgaaccccgagtccccctcggataccctaacaccgcatattcggtacccccatatccggatctcaaatcccaaaccccgaaccccacggggctttgataaatcgtggctcagactccccactagtcccaggaccccatctcgggtacccaccaggctcccacgcagttctagccccccacacccttgatccgccccgcaggcaggtacttcccggagcgagcggggaacgcgacgtaccccagtgcgcctcggcacaccattgctccccgaaactggggtgtccaggcggaacagcagagcccaggtcccgcggcctatacggtgccctcgctcttgggtccgcgcgtcatcggcaaagtctccgccccaacttgctccatctacggccgcagagcggctggcagtttcttcgaggacctcagcaaggtgggggaggggccggggcggacgcagggggtccctggtccgcggcagtggaggcggcagccagcaccctctgccctctcgcagaccccgggcccctgcgcctatcaggtcgtgagtccaggggtctacaagtcccgggccccccagttcacgattctggcgcggacttcgctcccccaagacaacactcggaagccagggcccgcggcctacaacgtggatcaggtggcctggagcccagggtcaagggtcagagtcaggagagtggggagggcctgaggtcggagtgatgggatcagagtccccgggggtccaggggtcccggcgcggagaggatgccggccccgcgaggtcagcggtgtctccgggcccgcagcaccggaagccccgcggctggagtttcgggatccggcactcggactacctggccccgctggtgaccgacgcggacaactgacccgccaggcgggagcggccccacacgtgtttgcttaaagtctgcgagtccgcatcgtgtccgcctctctctctctctctctgcgcgtcctggcgcaaggcctggggtggagccacggctggggccgtgtcccaactccgaacccagcggggcggggcccgagcgtcgggcgaggccgggaccccagcgctgcgccgcgtccgaacgtcgagaccccaccgagggcgggagggggactctcgggagccacagacgcccgagacccacgccgggcgggaccggccagggatcacccccgccgacggccccgggccccgacggcccggaagttccgcgtgtccgggggcaccgggggattggccggggcgcggcgtgcaaggcttcccgggggcggcgactgccgagctccgccctccaggcggccccacccgcctgccgtcctggggcgccgccgccccgccgccggcagtggaccgctgtgcgcgaaccctgaaccctacggtcccgacccgcgggcgaggccgggtacctgggctgggatccggagcaagcgggcgagggcagcgccctaacagatgcaagtgctgctggaccaggcgggctgctgtatcgtgggtcagagtgagcagctggttcctgcggacggaatcctatatgcagccagagatgtgacagccaccgtggacagcctgccactcatcacagcctccattctcagtaagaaactcgtggaggggctgtccgctctggtggtggacgttaagttcggaggggccgccgtcttccccaaccaggagcaggcccgggagctggcaaagacgctggttggcgtgggagccagcctagggcttcgggtcgcggcagcgctgaccgccatggacaagcccctgggtcgctgcgtgggccacgccctggaggtggaggaggcgctgctctgcatggacggcgcaggcccgccagacttaagggacctggtcaccacgctcgggggcgccctgctctggctcagcggacacgcggggactcaggctcagggcgctgcccgggtggccgcggcgctggacgacggctcggcccttggccgcttcgagcggatgctggcggcgcagggcgtggatcccggtctggcccgagccctgtgctcgggaagtcccgcagaacgccggcagctgctgcctcgcgcccgggagcaggaggagctgctggcgcccgcagatgagcatcagatccatgctgctgctgactcggagccccacagcttggcacaggctctctcagctcaagcctccggtcctccctgggaccctgggaggccaggccctgcatctgaggtcctggcttttgtcaaggcagggccctgcagagacaggtgggcagggccagccccagggccctgggcttcgaacccggctgctgatcacaggcctgttcggggctggactcggtggggcctggctggccctgagggctgagaaggagaggctgcagcagcaaaagcgaacagaagccctgcgccaggcagctgtgggccagggcgacttccacctgctggatcacagaggccgggctcgctgcaaggctgacttccggggccagtgggtgctgatgtactttggcttcactcactgccctgacatctgcccagacgagctggagaagctggtgcaggtggtgcggcagctggaagcagagcctggtttgcctccagtgcagcctgtcttcatcactgtggaccccgagcgggacgacgttgaagccatggcccgctacgtccaggacttccacccaagactgttgggtctgaccggctccaccaaacaggttgcccaggctagtcacagttaccgcgtgtactacaatgccggccccaaggatgaggaccaggactacatcgtggaccactccattgccatctacctgctcaaccctgacggcctcttcacggattactacggccggagcagatcggctgagcagatctcagacagtgtgcggcggcacatggcggctttccgcagtgtcctgtcttgagccactgcagtctgggccccatcattaaacgggctgcgtttaa

SEQ ID NO: 359929 - DNA, 2710 bp, Homo sapiens
aacagcacgaaaatctcctgcccccaccccacccccaggtgattcccttcaccaagtctgggtctagacttggcccccgcgagttcacgtccctgcctaatgcgcctggagtccgggtgatggccctggatccgctcccggccccaagctccacacagccgggaaggaagctcgcgtttgttttgctggcgccagggatacggtccaggccccgccccgccccgcgctgatcccagggtagtgggaaagtgcgctccccaagaatttgcggtgcaggggccgcggccaccgccttctgtccgcaggtgctgcgagccgtaagcgccccccacccgcgctatgggctcggacgcctgggtgggcctttggcggccacaccggccccgcggccccatcgcggcgcactacggaggccccgggcccaaatacaagctgccgcccaacaccggtagaaggggcaggccccgggattgaggggtgggacggcgcctgggggagggaaggggaagagaccagggaggcctgcgctcggggctgaaccgtgcctgctagaggggagagggggtctgtgccgggggagggtccgtgttgcagatggggcttggggctgggcccggccagacgctaactcggatgctcccaggctacgccctgcatgacccgtcgcggccgcgcgcccccgccttcaccttcggcgcgcgcttccccacgcagcagacgacgtgcggccccgggccaggccacctggtgcccgctcgcatgaccgtgcgcggcaccgacggcgcccccgcctactccatctacggccgcccacgccgctcagcgcccttcctcactccgggacctggtcaggacccccgggcccctggccaccccaacgccgaactgcctccagggaggcccacctgggaacccccgacctgaaccccgagtccccctcggataccctaacaccgcatattcggtacccccatatccggatctcaaatcccaaaccccgaaccccacggggctttgataaatcgtggctcagactccccactagtcccaggaccccatctcgggtacccaccaggctcccacgcagttctagccccccacacccttgatccgccccgcaggcaggtacttcccggagcgagcggggaacgcgacgtaccccagtgcgcctcggcacaccattgctccccgaaactggggtgtccaggcggaacagcagagcccaggtcccgcggcctatacggtgccctcgctcttgggtccgcgcgtcatcggcaaagtctccgccccaacttgctccatctacggccgcagagcggctggcagtttcttcgaggacctcagcaagaccccgggcccctgcgcctatcaggtcgtgagtccaggggtctacaagtcccgggccccccagttcacgattctggcgcggacttcgctcccccaagacaacactcggaagccagggcccgcggcctacaacgtggatcagcaccggaagccccgcggctggagtttcgggatccggcactcggactacctggccccgctggtgaccgacgcggacaactgacccgccaggcgggagcggccccacacgtgtttgcttaaagtctgcgagtccgcatcgtgtccgcctctctctctctctctctgcgcgtcctggcgcaaggcctggggtggagccacggctggggccgtgtcccaactccgaacccagcggggcggggcccgagcgtcgggcgaggccgggaccccagcgctgcgccgcgtccgaacgtcgagaccccaccgagggcgggagggggactctcgggagccacagacgcccgagacccacgccgggcgggaccggccagggatcacccccgccgacggccccgggccccgacggcccggaagttccgcgtgtccgggggcaccgggggattggccggggcgcggcgtgcaaggcttcccgggggcggcgactgccgagctccgccctccaggcggccccacccgcctgccgtcctggggcgccgccgccccgccgccggcagtggaccgctgtgcgcgaaccctgaaccctacggtcccgacccgcgggcgaggccgggtacctgggctgggatccggagcaagcgggcgagggcagcgccctaagcaggcccggagcgatggcagccttgatgaccccgggaaccggggccccacccgcgcctggtgacttctccggggaagggagccaggacttcccgacccttcgccagagcccaagcagctcccggagctgatccgcatgaagcgagacggaggccgcctgagcgaagcggacatcaggggcttcgtggccgctgtggtgaatgggagcgcgcagggcgcacagatcggggccatgctgatggccatccgacttcggggcatggatctggaggagacctcggtgctgacccaggccctggctcagtcgggacagcagctggagtggccagaggcctggcgccagcagcttgtggacaagcattccacagggggtgtgggtgacaaggtcagcctggtcctcgcacctgccctggcggcatgtggctgcaaggttagaaaccacctcctttccagacgggagcctataccgcacatgcagcaaccagtccatccacaggcagctcccaacctcaagcctggcccaaagcctccaagaccctaccaaggcttctccccaccctgctcccca

SEQ ID NO: 359930 - DNA, 263 bp, Homo sapiens
aaaagaagggaagtgtcagagatggctctgctagactcacgtatttttcagtagaatctgggtcaggatggtgcggtcagaagatgcttctggagctctgggacccacaagcctgcgtgtcccacagtggagtattaggacaacttgaaaacatagtcagcagttcatcctccaccacacccaatgtgttcaatagatattggttaaatgaataatagggccgggcatggtggctcacgcctgtaatcccagcactttgggag

SEQ ID NO: 359931 - DNA, 1162 bp, Homo sapiens
actcagacaccgtgtcctcttgcctgggagaggggaagcagatctgaggacatctctgtgccaggccagaaaccgcccacctgcagttccttctccgggatggacgtggggcccagctccctgccccaccttgggctgaagctgctgctgctcctgctgctgctgcccctcaggggccaagccaacacaggctgctacgggatcccagggatgcccggcctgcccggggcaccagggaaggatgggtacgacggactgccggggcccaagggggagccaggaatcccagccattcccgggatccgaggacccaaagggcagaagggagaacccggcttacccggccatcctgggaaaaatggccccatgggaccccctgggatgccaggggtgcccggccccatgggcatccctggagagccaggtgaggagggcagatacaagcagaaattccagtcagtgttcacggtcactcggcagacccaccagccccctgcacccaacagcctgatcagattcaacgcggtcctcaccaacccgcagggagattatgacacgagcactggcaagttcacctgcaaagtccccggcctctactactttgtctaccacgcgtcgcatacagccaacctgtgcgtgctgctgtaccgcagcggcgtcaaagtggtcaccttctgtggccacacgtccaaaaccaatcaggtcaactcgggcggtgtgctgctgaggttgcaggtgggcgaggaggtgtggctggctgtcaatgactactacgacatggtgggcatccagggctctgacagcgtcttctccggcttcctgctcttccccgactagggcgggcagatgcgctcgagacccacgggccttccacctccctcagcttcctgcatggacccaccttactggccagtctgcatccttgcctagaccattctccccaccagatggacttctcctccagggagcccaccctgacccacccccactgcaccccctccccatgggttctctccttcctctgaacttctttaggagtcactgcttgtgtggttcctgggacacttaaccaatgccttctggtactgccattcttttttttttttttttcaagtattggaaggggtggggagatatataaataaatcatgaaatcaataca

SEQ ID NO: 359932 - DNA, 1145 bp, Homo sapiens
actcagacaccgtgtcctcttgcctgggagaggggaagcagatctgaggacatctctgtgccaggccagaaaccgcccacctgcagttccttctccgggatggacgtggggcccagctccctgccccaccttgggctgaagctgctgctgctcctgctgctgctgcccctcaggggccaagccaacacaggctgctacgggatcccagggatgcccggcctgcccggggcaccagggaaggatgggtacgacggactgccggggcccaagggggagccaggaatcccagccattcccgggatccgaggacccaaagggcagaagggagaacccggcttacccggccatcctgggaaaaatggccccatgggaccccctgggatgccaggggtgcccggccccatgggcatccctggagagccaggtgaggagggcagatacaagcagaaattccagtcagtgttcacggtcactcggcagacccaccagccccctgcacccaacagcctgatcagattcaacgcggtcctcaccaacccgcagggagattatgacacgagcactggcaagttcacctgcaaagtccccggcctctactactttgtctaccacgcgtcgcatacagccaacctgtgcgtgctgctgtaccgcagcggcgtcaaagtggtcaccttctgtggccacacgtccaaaaccaatcaggtcaactcgggcggtgtgctgctgaggttgcaggtgggcgaggaggtgtggctggctgtcaatgactactacgacatggtgggcatccagggctctgacagcgtcttctccggcttcctgctcttccccgactagggcgggcagatgcgctcgagacccacgggccttccacctccctcagcttcctgcatggacccaccttactggccagtctgcatccttgcctagaccattttctcctccagggagcccaccctgacccacccccactgcaccccctccccatgggttctctccttcctctgaacttctttaggagtcactgcttgtgtggttcctgggacacttaaccaatgccttctggtactgccattcttttttttttttttttcaagtattggaaggggtggggagatatataaataaatcatgaaatcaataca

SEQ ID NO: 359933 - DNA, 1185 bp, Homo sapiens
actcagacaccgtgtcctcttgcctgggagaggggaagcagatctgaggacatctctgtgccaggccagaaaccgcccacctgcaggtgaggcccggacccctgcccagttccttctccgggatggacgtggggcccagctccctgccccaccttgggctgaagctgctgctgctcctgctgctgctgcccctcaggggccaagccaacacaggctgctacgggatcccagggatgcccggcctgcccggggcaccagggaaggatgggtacgacggactgccggggcccaagggggagccaggaatcccagccattcccgggatccgaggacccaaagggcagaagggagaacccggcttacccggccatcctgggaaaaatggccccatgggaccccctgggatgccaggggtgcccggccccatgggcatccctggagagccaggtgaggagggcagatacaagcagaaattccagtcagtgttcacggtcactcggcagacccaccagccccctgcacccaacagcctgatcagattcaacgcggtcctcaccaacccgcagggagattatgacacgagcactggcaagttcacctgcaaagtccccggcctctactactttgtctaccacgcgtcgcatacagccaacctgtgcgtgctgctgtaccgcagcggcgtcaaagtggtcaccttctgtggccacacgtccaaaaccaatcaggtcaactcgggcggtgtgctgctgaggttgcaggtgggcgaggaggtgtggctggctgtcaatgactactacgacatggtgggcatccagggctctgacagcgtcttctccggcttcctgctcttccccgactagggcgggcagatgcgctcgagacccacgggccttccacctccctcagcttcctgcatggacccaccttactggccagtctgcatccttgcctagaccattctccccaccagatggacttctcctccagggagcccaccctgacccacccccactgcaccccctccccatgggttctctccttcctctgaacttctttaggagtcactgcttgtgtggttcctgggacacttaaccaatgccttctggtactgccattcttttttttttttttttcaagtattggaaggggtggggagatatataaataaatcatgaaatcaataca

SEQ ID NO: 359934 - DNA, 1233 bp, Homo sapiens
actcagacaccgtgtcctcttgcctgggagaggggaagcagatctgaggacatctctgtgccaggccagaaaccgcccacctgcagttccttctccgggatggacgtggggcccagctccctgccccaccttgggctgaagctgctgctgctcctgctgctgctgcccctcaggggccaagccaacacaggctgctacgggatcccagggatgcccggcctgcccggggcaccagggaaggatgggtacgacggactgccggggcccaagggggagccaggaatcccagccattcccgggatccgaggacccaaagggcagaagggagaacccggcttacccggccatcctgggaaaaatggccccatgggaccccctgggatgccaggggtgcccggccccatgggcatccctggagagccaggtgaggagggcagatacaagcagaaattccagtcagtgttcacggtcactcggcagacccaccagccccctgcacccaacagcctgatcagattcaacgcggtcctcaccaacccgcagggagattatgacacgagcactggcaagttcacctgcaaagtccccggcctctactactttgtctaccacgcgtcgcatacagccaacctgtgcgtgctgctgtaccgcagcggcgtcaaagtggtcaccttctgtggccacacgtccaaaaccaatcaggtcaactcgggcggtgtgctgctgaggttgcaggtgggcgaggaggtgtggctggctgtcaatgactactacgacatggtgggcatccagggctctgacagcgtcttctccggcttcctgctcttccccgactagggcgggcagatgcgctcgagacccacgggccttccacctccctcagcttcctgcatggacccaccttactggccagtctgcatccttgcctagaccattctccccaccagatggacttctcctccagggagcccaccctgacccacccccactgcaccccctccccatgggttctctccttcctctgaacttctttaggagtcactgcttgtgtggttcctgggacacttaaccaatgccttctggtactgccattcttttttttttttttttcaagtattggaaggggtggggagatatataaataaatcatgaaatcaatacatgtcaaaaaaataatttctaactttttgtataattttttgggggggcctgaatcccaaattccttttgggg

SEQ ID NO: 359935 - DNA, 951 bp, Homo sapiens
actcagacaccgtgtcctcttgcctgggagaggggaagcagatctgaggacatctctgtgccaggccagaaaccgcccacctgcaggaatcccagccattcccgggatccgaggacccaaagggcagaagggagaacccggcttacccggccatcctgggaaaaatggccccatgggaccccctgggatgccaggggtgcccggccccatgggcatccctggagagccaggtgaggagggcagatacaagcagaaattccagtcagtgttcacggtcactcggcagacccaccagccccctgcacccaacagcctgatcagattcaacgcggtcctcaccaacccgcagggagattatgacacgagcactggcaagttcacctgcaaagtccccggcctctactactttgtctaccacgcgtcgcatacagccaacctgtgcgtgctgctgtaccgcagcggcgtcaaagtggtcaccttctgtggccacacgtccaaaaccaatcaggtcaactcgggcggtgtgctgctgaggttgcaggtgggcgaggaggtgtggctggctgtcaatgactactacgacatggtgggcatccagggctctgacagcgtcttctccggcttcctgctcttccccgactagggcgggcagatgcgctcgagacccacgggccttccacctccctcagcttcctgcatggacccaccttactggccagtctgcatccttgcctagaccattttctcctccagggagcccaccctgacccacccccactgcaccccctccccatgggttctctccttcctctgaacttctttaggagtcactgcttgtgtggttcctgggacacttaaccaatgccttctggtactgccattcttttttttttttttttcaagtattggaaggggtggggagatatataaataaatcatgaaatcaataca

SEQ ID NO: 359936 - DNA, 735 bp, Homo sapiens
actcagacaccgtgtcctcttgcctgggagaggggaagcagatctgaggacatctctgtgccaggccagaaaccgcccacctgcagttccttctccgggatggacgtggggcccagctccctgccccaccttgggctgaagctgctgctgctcctgctgctgctgcccctcaggggccaagccaacacaggctgctacgggatcccagggatgcccggcctgcccggggcaccagggaaggatgggtacgacggactgccggggcccaagggggagccaggaatcccagccattcccgggatccgaggacccaaagggcagaagggagaacccggcttacccggccatcctgggaaaaatggccccatgggaccccctgggatgccaggggtgcccggccccatgggcatccctggagagccaggtgaggagggcagatacaagcagaaattccagtcagtgttcacggtcactcggcagacccaccagccccctgcacccaacagcctgatcagattcaacgcggtcctcaccaacccgcagggagattatgacacgagcactggcaagttcacctgcaaagtccccggcctctactactttgtctaccacgcgtcgcatacagccaacctgtgcgtgctgctgtaccgcagcggcgttggatgcagtcgcggcgttggatgcagtcagcggcgttggatgcagtcatctgaggcgtatgcatgccagggtgag

SEQ ID NO: 359937 - DNA, 1334 bp, Homo sapiens
actcagacaccgtgtcctcttgcctgggagaggggaagcagatctgaggacatctctgtgccaggccagaaaccgcccacctgcaggtgaggcccggacccctgcccaggtatgggcagatggccgtttcctccaccttccgccaccttcctgaaatgtggtgccaggggcagcttggtgtgtgaggggaaggagggttcccactcctgctgggccccggggcctgggctgaagaaaaggccccaccatccatccatgttccttctccgggatggacgtggggcccagctccctgccccaccttgggctgaagctgctgctgctcctgctgctgctgcccctcaggggccaagccaacacaggctgctacgggatcccagggatgcccggcctgcccggggcaccagggaaggatgggtacgacggactgccggggcccaagggggagccaggaatcccagccattcccgggatccgaggacccaaagggcagaagggagaacccggcttacccggccatcctgggaaaaatggccccatgggaccccctgggatgccaggggtgcccggccccatgggcatccctggagagccaggtgaggagggcagatacaagcagaaattccagtcagtgttcacggtcactcggcagacccaccagccccctgcacccaacagcctgatcagattcaacgcggtcctcaccaacccgcagggagattatgacacgagcactggcaagttcacctgcaaagtccccggcctctactactttgtctaccacgcgtcgcatacagccaacctgtgcgtgctgctgtaccgcagcggcgtcaaagtggtcaccttctgtggccacacgtccaaaaccaatcaggtcaactcgggcggtgtgctgctgaggttgcaggtgggcgaggaggtgtggctggctgtcaatgactactacgacatggtgggcatccagggctctgacagcgtcttctccggcttcctgctcttccccgactagggcgggcagatgcgctcgagacccacgggccttccacctccctcagcttcctgcatggacccaccttactggccagtctgcatccttgcctagaccattctccccaccagatggacttctcctccagggagcccaccctgacccacccccactgcaccccctccccatgggttctctccttcctctgaacttctttaggagtcactgcttgtgtggttcctgggacacttaaccaatgccttctggtactgccattcttttttttttttttttcaagtattggaaggggtggggagatatataaataaatcatgaaatcaataca

SEQ ID NO: 359938 - DNA, 1040 bp, Homo sapiens
  misc_feature (935)..(935): n is a, c, g, or t
actcagacaccgtgtcctcttgcctgggagaggggaagcagatctgaggacatctctgtgccaggccagaaaccgcccacctgcagttccttctccgggatggacgtggggcccagctccctgccccaccttgggctgaagctgctgctgctcctgctgctgctgcccctcaggggccaagccaacacaggctgctacgggatcccagggatgcccggcctgcccggggcaccagggaaggatgggtacgacggactgccggggcccaagggggagccaggaatcccagccattcccgggatccgaggacccaaagggcagaagggagaacccggcttacccggccatcctgggaaaaatggccccatgggaccccctgggatgccaggggtgcccggccccatgggcatccctggagagccaggtgaggagggcagatacaagcagaaattccagtcagtgttcacggtcactcggcagacccaccagccccctgcacccaacagcctgatcagattcaacgcggtcctcaccaacccgcagggagattatgacacgagcactggcaagttcacctgcaaagtccccggcctctactactttgtctaccacgcgtcgcatacagccaacctgtgcgtgctgctgtaccgcagcggcgtcaaagtggtcaccttctgtggccacacgtccaaaaccaatcaggtcaactcgggcggtgtgctgctgaggttgcaggtgggcgaggaggtgtggctggctgtcaatgactactacgacggactgccggggcccaagggggagccaggaatcccagccattcccgggatccgaggacccaaagggcagaagggagaacccggcttacccggccatcctgggaaaaatggccccatggaccccctgggatgccaggggtgcccggccccatgggcatncctggagagccaggtgaggagggcagatacaagcagaaattccagtcagtgttcacggtcactcggcagacccaccagcccctgcacccaacagcctgatcagaa

SEQ ID NO: 359939 - DNA, 534 bp, Homo sapiens
  misc_feature (24)..(24): n is a, c, g, or t
aagatttccctcacccaagagggnaaaaaaaactttcttcttctaccacccccctcacttgctctgactgtcactcctttttttcttccagaatgtgtactttatattacatatgtacagtatcagtagggaaaatgtaaaaagatgttgttttcttttgtcatttaattaggccatctgtcctgttttaaagaaatagttaataattcaacactttatataacaaatattaactaatacccatatttataaaacatttttcagatttaaaagattgttaatacttataaacttagtgttattcttagaaaaccccatcaaatttaaatgtgatttacacagtgactaggaacatttgtatttattgtttcttctctgcacttttcatcatctgataaatacaagagctcaagtaactgtcttttcttcaagatggcttctatacttgaaatcagttaatacaatagtttttccagttctttttttatagagagtcaaagagaaataaaccaaattatattcaaaagttggaaa

SEQ ID NO: 359940 - DNA, 574 bp, Homo sapiens
agttcgacggagactctcttatttcttctcaactggaaaaggataagaaacaattggagaaggaaaataagagactccgacaacaagcagaaattaaagataccacattagaagaaaataatgtgaagattggaaatttggaaaaagaaaacaaaaccctatccaaagaaattggtatatataaagaatcttgtgtccgtctgaaagaactagaaaaagaaaataaggagcttgtgaaaagagcaactattgatataaaaacgttggttacactacgtgaggatttggtgagtgaaaagttgaagacccaacagatgaacaatgatctcgaaaaattaactcatgagcttgagaagatagggttaaataaggagcgactcttacatgatgaacaaagtactgatgacaggtgagtactaagtctacttggcaaacagttgaaaatttttttttttttttgctcatacatgaattctttctgtactagctatagaaaacatttatatatttcaccctatttctggttccttccttcccttaaggaaagttctgtagccgggtgcggtggctcaca

SEQ ID NO: 359941 - DNA, 348 bp, Homo sapiens
tgcagggtcagaggggagattgtttcattgcttttggtgttttccctaagcaagtcaactctaatgagagttgtcatttttcttattcctattgagtctatgaaatatgttaagtcaatctgtattatacatgattgaaaaacaatttccatattctatgtaaataaaattttataatggttttttattacaaaaatatctttatatccattttgctattttatgtagatactacatcctttgaagacataagtccacaaggtgttagtgatgattctagtacgggatcaagagttcatggtaagataatgaaccttatttagagagtacacattaaatacagaatgg

SEQ ID NO: 359942 - DNA, 10957 bp, Homo sapiens
aaggaataatgttaaagacaacattaatgacatttatagaacacttaactataagctgccatttcatttaaccctattattagccctgctttacacgtgacggaatcgaagcacaaagagactcaataacgtgcgtaggctcacacagctggtgcatattggaaccaggcaggaagacttcagagtccaggttctcaactacccaattaagaaattctgctctttcttaactgtgttatgacaaaaacatttttactgctaatttaaaatatatactccgtgtaaatatttatgtaatgtaaacatagcacacattataaaactataatattatcttttatcaaaaaaagattgcgttctatatgcccattttaccccgggaaaaaggtctttattttcctttgaaatgaggagtagcatttgattttgccagggaacttaaaattatttcaaggtcccagtcgtacgtggcatggagatttatgacaaatatgtaatctgtttatttgtcacccaacttggatgacttctaaatgtttcttctttgtagctcttgattttgcttgggtttcccccgacccatgcccaaatagtaaaaaacaaaacaaaaccaaaaaacaatgtctgagtcatgtttgctccagtcagggaataccaacgtgctgacagacagctctggtttttaaaaaatcttactgtatgtcacttgcaactttgaagaacattcatgcgttagtggactgcatttggaagaaaacaaaaaggagaaaaaaacccccaccaagttgtggctcaagtccctctgccatttgctgcagtgagttttcctattccattttgctggggagaaggcatgctttacagaacacatcaaactgtccgaaaaaggctgtctgcatccctcatgtttataagagaaggatttctttccccttccttcacgtatcaaagaagtcactcggggaggaaataaaccataattaggcatgagcgagcgagcagacagaccccttgctctgccttccctgtccccgcccaccaggcaaccgtcctgggcgcaaccgaggagcgggttgtctccgcagcagctgcagcgagcgcgcgcccacgcccgagcccgcgcccgccgccaggatctgggcggcggcgaggctagcccgggggcgcgctcgctcgggagcgcgctcatgcagcggttttcttctcccacaatccagaggcagctgcacgggaggggcggggagtcggcggaaggatatcggcgcggagggagcagcgcgctccctttgacggcggcccccggcattggcgggcggcgctggcgggcggcgaggggtggggtgtgatgcggcactgcggttctgaggccgttactccggcttctccatagagggcggagaaggctggagcgcggcggtgattttgtgccagggattcccagagacgcgctgaaaggctggcagggcttaggaagctggggggttagggacacacattcaagcccccacccccgggaggggaagggggctggaggcgaggcttgagggcggcggaggaatggtgtctgctcggggggaaggggcgagccctgcctgttggtactgaggggctgcgggcagtggaggctccgcgggtcgaaagcggctccatgcccatcggtgggtggaacgtgtagaggtcggaacgccgaggtcgagtctggtggcgcctcggtatccttaacgtggtctctgtttaacgtatttcatttagcccccgttgggattgattcattgggagcagtttcgctggtctggatcctccaggagctggacaaccttgacgggctttttgtcttgggttccagccccctttcccttcctcctcctccagatgccttttctctgcccctcctcgcccggtacagacatttccagcgcaggctgctgctcgtggtgtccgtcgtcgaagccacttcttgggatttcggctcgtttcactctggggtgttttttgaggagggagagtgcccccctcctccacgatgggatttttctcccttgccgaaatggactttcattgatttctacttacttccacgtttagtgaccaattccctaggcgtatttttgtggtagttccttttttcaaatacatactctgtaaaatggagaacgaaatttttactccccttctggagcagttcatgaccagccctttggtcacttgggttaaaacgtttggacctctggccgcaggaaatgggaccaaccttgatgaatatgtggctttggtggatggggtattcttgaaccaggtcatgctccaaattaatcctaaattggagagtcagagagtaaataaaaaagtcaataatgatgcctcacttagaatgcacaatctatccattttggtgagacagataaaattttattaccaggagactttgcagcaattgatcatgatgtcgttgccaaatgtcttaatcattggcaaaaatcccttttctgaacaaggcacagaagaagttaaaaaactgcttttacttttattgggttgtgcagttcagtgtcagaaaaaagaggaatttattgaaagaattcaaggtttagattttgatacaaaagcagcggttgccgcacatattcaagaggtaactcataatcaggaaaatgtgtttgacctgcaatggatggaagtgactgatatgtcgcaggaggacatagaaccactcttgaaaaatatggcattgcatctaaaaagacttatagatgagagagatgaacattcagagactatcatagaactctctgaagagcgggatggtctccattttctaccccatgcctcttcatctgcacagtcaccctgtggttctccaggcatgaagcgaacagaaagtcgacaacatctgtcggtggaactggcagatgctaaagccaagataagaaggcttaggcaggaattggaggaaaagactgagcagttgttggattgtaaacaagaacttgagcaaatggaaatagaactcaaaaggctgcaacaagagaacatgaatttgctttcggatgctcgctctgccagaatgtaccgagatgaattagatgcacttcgagagaaagcagtcagagtcgataagcttgaaagtgaagtcagcagatataaagagagactacatgatattgaattttataaggcaagagttgaggaattaaaagaagacaatcaagttttattagaaacaaaaaccatgttggaagaccaactagagggaactcgtgctcgttctgataaattacatgaattagaaaaagagaacttacaactgaaagctaaacttcatgatatggaaatggaacgagatatggatagaaaaaagattgaagaattaatggaagaaaatatgactttggaaatggcacagaaacaaagtatggatgaatcattacatcttggctgggaactggaacagatatccagaactagtgaactttccgaagcaccccagaaatccctgggccatgaggtgaatgagttgacatcaagtagattattgaagctagagatggaaaatcaaagtttgacaaaaaccgtagaagagcttcggactactgtggattctgtagaaggcaatgcttccaaaatcctgaaaatggaaaaagaaaatcaaaggctcagtaaaaaggttgagattcttgaaaatgagattgttcaagaaaagcaaagtcttcagaattgtcagaatttaagcaaggatctaatgaaggagaaagctcagcttgaaaaaacaatagaaacactgagagaaaattcagagagacagattaagatactggaacaggaaaatgaacatctgaatcaaacagtgtcttccttaaggcagcggtcccagataagtgcagaagcaagagtgaaagacattgaaaaagaaaacaaaattcttcatgaatctatcaaagaaacaagtagcaagctaagcaagattgaatttgaaaaaagacaaattaaaaaagaattggaacattataaagaaaaaggagaacgagctgaagaacttgaaaatgaattgcatcatcttgaaaaagaaaatgaattattacagaaaaaaataactaatttaaaaattacttgtgaaaaaattgaggccttagaacaagaaaattcagagctagaaagagaaaatagaaaattaaaaaaaacattggatagctttaaaaatctgacctttcagttagaatccctagaaaaagagaattcccaacttgatgaggaaaacttagaactgcgaaggaatgtagaatctttgaagtgtgcaagcatgaaaatggctcagctacagctagaaaacaaagaactggaaagtgaaaaagagcaacttaagaagggtttggagctcctgaaagcatctttcaagaaaacagaacgcttagaagttagctaccagggtttagatatagaaaatcaaagactgcaaaaaactttagagaacagcaataaaaaaatccagcaattagagagtgaactacaagacttagagatggaaaatcaaacattgcagaaaaacctagaagaactaaaaatatctagcaaaagactagaacagctggaaaaagaaaataaatcattagagcaagagacttctcaactggaaaaggataagaaacaattggagaaggaaaataagagactccgacaacaagcagaaattaaagataccacattagaagaaaataatgtgaagattggaaatttggaaaaagaaaacaaaaccctatccaaagaaattggtatatataaagaatcttgtgtccgtctgaaagaactagaaaaagaaaataaggagcttgtgaaaagagcaactattgatataaaaacgttggttacactacgtgaggatttggtgagtgaaaagttgaagacccaacagatgaacaatgatctcgaaaaattaactcatgagcttgagaagatagggttaaataaggagcgactcttacatgatgaacaaagtactgatgacagtaggtataaacttttggaatcaaaattagaatccactcttaagaagtctcttgaaataaaagaagaaaaaattgctgctttagaagctcgattagaagaatccacgaattataaccagcaattgcgccaagaacttaaaacaaatgctacactgcaagcagagaagcaagcgttgaaaactcaactgaagcaacttgagacacagaacaataatttgcaggctcagattcttgcacttcagaggcagacagtgtcattacaagaacagaataccactcttcaaacacagaatgccaagcttcaggttgaaaattccacccttaattcccaaagtacctcactcatgaaccagaatgcccaactcctaatccagcagtcttccttagaaaatgaaaatgaatctgtaatcaaagagcgagaagacctaaaatctctctatgattctctgatcaaagatcatgaaaagctggaacttcttcatgaacgtcaggcttcagagtatgaatctcttatctctaaacatggaactctgaagtctgcccacaaaaatcttgaggtggaacatagagaccttgaagaccgttacaatcagttattaaaacagaaaggacagttggaagatttggaaaaaatgctcaaagtagaacaggaaaaaatgctgcttgaaaataaaaatcatgaaacagtagctgcagaatacaagaaactttgtggtgaaaatgataggctgaatcatacctatagtcaacttttaaaagagactgaagttttacaaactgaccataaaaatttgaaaagtcttctgaataattccaaactggaacaaacaagattagaagctgaattttcaaaactaaaggaacaataccaacaattggatattacatcaaccaagctgaataaccagtgtgagttgctaagccaacttaaaggaaatttagaagaagaaaatcggcatctactagatcaaattcagacattaatgctacagaacagaacacttttggagcagaatatggaaagcaaggatctttttcatgttgaacaaagacagtacattgataagttaaatgaattaagacgtcagaaggagaaactagaagagaaaattatggatcaatacaaattttatgacccatctcctcctagaaggagaggcaactggattactctaaaaatgagaaaattgataaagtctaagaaagatattaatcgggaacgccagaaatctctaacattaacacccacccgctcagactccagtgaaggatttcttcagctccctcatcaagacagtcaagatagttcttcagtaggttcaaactctttagaagatggccagaccttggggaccaagaaaagcagcatggttgcactgaaaagactgccctttttgaggaacagaccgaaggataaagacaaaatgaaggcctgctaccgtcgttccatgtccatgaatgacctggtgcagtccatggtcctagcaggacagtggacaggtagtactgagaatttggaggttcctgatgatatttcaacgggtaaaaggagaaaagaattgggagctatggccttctctactacagccatcaacttttcaactgtcaactcttctgcaggcttcagatccaagcagttggttaataataaagatactacatcctttgaagacataagtccacaaggtgttagtgatgattctagtacgggatcaagagttcatgcttcaagaccagccagccttgatagtggcagaacatccactagcaatagcaataataatgcttcactacatgaagtcaaagcaggtgcagttaataaccaaagcaggccacaaagccacagcagtggagaatttagcctgcttcatgaccatgaggcttggtccagcagtggtagcagtccaatccagtacttgaaaagacagaccagatcaagcccagtgctccagcacaaaatatctgaaacactggagagtcgacatcacaagatcaaaactggttcccctggaagtgaagttgttactctacaacagtttttggaagaaagcaataagcttacctcagtacagataaagtcctcaagtcaagagaatcttttagatgaagtaatgaaaagtttgtctgtctcttctgactttttgggaaaagacaaaccagttagctgtggtctggccaggtcagtaagtggaaaaaccccaggggacttctatgatagacggacaactaagcctgagtttttgagacctggtcctcgaaaaactgaagatacctacttcattagttctgcgggaaaacctacaccaggcactcaaggaaaaataaaattagtaaaagaatcttctctgtcacgacaatcaaaagatagtaacccttatgcaactttacctcgtgcaagcagcgtgatctcaactgccgaaggaactacacgaaggacaagcatccatgattttttgaccaaggacagtagactgcctatatcagttgattcaccaccagctgctgctgacagcaacaccactgcagcatctaatgtggacaaagtacaagaaagcagaaattcaaaaagcaggtctagggagcaacaaagctcctaattctattacccactacatgacatgtgggccaagtgagagaaaagtgtccttcagtttctcagtatgaagcctttatttctgaagtaacaagacacctagcaactataggaatcatttttaaaaatctttaaggagacttttaacagtccttcgtgaatagagcaggcaagaaatacaaaccttcattccttgaatcaaggagcactactggattcaactgccaaaattttttaaaggttttaggacttactataccttgtactgttaagatctactgaataaaggacgttctctcactaaggaccaggtgttttaaggttaagtgtttaaagaagtactccaagaacaatctgcttttttcatcatttgttttatgaatttatccatgtttgcttaatgcttctgctaagtgttagccaaaatctagccatttatatttagttgtgtaaacctaaattaaatgctgtagtattttgtggaatgtactatatagcaagatacagagaaaattgttttggcatgtcagagccttatttggttagcagactgcatgtgttgatactttttttttcttaaagccaattattttgatgcaaaagaaattcagtttataagataaatctgaaaaatccataatgaaataggagttataaaaaatttatagtgatattaatctttccatatttcccattaagcaacactaagcattcataagttaacccatggtaaagagtgtttttctgaaacttttttttagtaagatggtttttcagcaaatggcattcccaagataaagctgttgtgctttaactcatttcttttctttggtattgggttatgtatgcgtgtgcatttttttaacttgagagctgactgttgcttaagaagttttcttatggcaaaaataatgtaaataagttactatgatctgcattttgccagaaactcatttataattaaggctatcatttattaatgatttttttctcctttatgatattacattaaagttgataactgttattggtacttttgaaatatttgtatgcatttgttacctttaaacatttggaagaagcacaaaaaaatagatttagttaacccagggaaacatcaatttttttagtagttccaattttatatcacagttttattttcttatgaaatcaaaaaatgcattgatactcattaatgcaaattcattatttaacatcaatatcagagtaatcttcaaggtctgaaatgagaaacatactgactttttaaaattttaacagtgtacttcttaggctttcattaccagctctgaagaactttttggaataattccatattccatagtgtgtggtttatgagttgtgggtttcatcactaacccagtaaccataagaaaagtctctctctctctctctctctctttctctctccctctttctctctctctttcgtaggccagtagcaatgttgtgttcacagtctaatttccaaaagaccatcaataaaaaagagagcatgtttaaattgaaatggaacttagagaacttgagcttacttacgtacttcaatgccaccggtaacttaggttttaccaccaaatgctgttaacattaaatcattttgaaaatcttggatgaaaggtgctatgtaaatggaaatacaaaggattcttactaacatacaaaaataatgcacaacagaaatatctaaaaccttttccgtagactttgaaacatctctctctgtcataactccctggattcaagtagcacattggtaataggtatcagagcagtctagagacaattgcatgtcaaaaaatgtacattcatttttaggtgggataaaagtaaacatagaaattatgttatggctaaatacagttagtgggtaacttagatttatattagctagcatctaatttgcacaactagaacacatcccagaacaattactgaaaagctgaaatttaatgggtggtgatgtagcccaatgagggcgaatgacattccagcttgacctctccagaacactaatatcctaaaatacagaacatgctgggttaagtgcattagtgcttcaagcagaaaatgctgaaaacaacgtgtaaagtactgaatctgagtaggctgaccctgagaagggacaattaaagagacaaccaagggaacacattgagactacaaaaatatgaataatctcaattatattcatcacacttttttcataccatttcaagaaacgactagacagtagtaaccacatgaatattttactttctccagtataccttgagaagcaaactttgtaggaagccactcttctcccctaaacaacttctgccaaacaataataaagccaactggaaacgaatcggagccattttcattttcctaaccggggcctgacatgctttaaattatctggctgtattctaaatcaacacctaacccctcaaggaaactgaagaatcaatatacagggtaatagctttggctcagagctccaataatgtgcttcagatctgtccatgtggaaatgctttcatccaaatttttaaattggtggttaccaaagagttcacaaaacaggtttgtatgtagcacctttcatgcaaggcatgcaaaaagcctattttaaaatcactgtgcatattatagagttgtagccacctcacaatgaagtactacagcctgtgctgtcttaatggtttatgtcaggaaatgaaaaagatactgtaccaaatctggaattacaatggggagtaataatgtatactaaatgacttttgtattttaagttactttttgtgagtggtgaatttttgtgtttttcttttcagctacacttagtcctgagatgtattttttctttaagtcttgaatgaatacaaaaggagcccattttataatataaaccttgatgtacatgttgagatatttggacaatgaaaatgccttaaaaggaatgcatatggataaagttgcacttataacacccttcaacaaaatctaattttaaattgtctttttcttttctattaagggttttctttttcagtgtctaccattgtacttataactgttattaaataccaaatcaaataatataaaagctgtaacatttcctttaaaactaatgctaataagggatttagagttgaatggcaaaatgtttattacttggcaatacctgatgtcagtcacaggcatccaactcatgacaagagataccactgtttgttttttaaaaaacatttttcattttgtttctccttcaaaaattaagttggactaacattcacgtatcaaactaatataaaaagaaataaaaccaagaggtgatttttgtaaaaactggtta

SEQ ID NO: 359943 - DNA, 7331 bp, Homo sapiens
aaggaataatgttaaagacaacattaatgacatttatagaacacttaactataagctgccatttcatttaaccctattattagccctgctttacacgtgacggaatcgaagcacaaagagactcaataacgtgcgtaggctcacacagctggtgcatattggaaccaggcaggaagacttcagagtccaggttctcaactacccaattaagaaattctgctctttcttaactgtgttatgacaaaaacatttttactgctaatttaaaatatatactccgtgtaaatatttatgtaatgtaaacatagcacacattataaaactataatattatcttttatcaaaaaaagattgcgttctatatgcccattttaccccgggaaaaaggtctttattttcctttgaaatgaggagtagcatttgattttgccagggaacttaaaattatttcaaggtcccagtcgtacgtggcatggagatttatgacaaatatgtaatctgtttatttgtcacccaacttggatgacttctaaatgtttcttctttgtagctcttgattttgcttgggtttcccccgacccatgcccaaatagtaaaaaacaaaacaaaaccaaaaaacaatgtctgagtcatgtttgctccagtcagggaataccaacgtgctgacagacagctctggtttttaaaaaatcttactgtatgtcacttgcaactttgaagaacattcatgcgttagtggactgcatttggaagaaaacaaaaaggagaaaaaaacccccaccaagttgtggctcaagtccctctgccatttgctgcagtgagttttcctattccattttgctggggagaaggcatgctttacagaacacatcaaactgtccgaaaaaggctgtctgcatccctcatgtttataagagaaggatttctttccccttccttcacgtatcaaagaagtcactcggggaggaaataaaccataattaggcatgagcgagcgagcagacagaccccttgctctgccttccctgtccccgcccaccaggcaaccgtcctgggcgcaaccgaggagcgggttgtctccgcagcagctgcagcgagcgcgcgcccacgcccgagcccgcgcccgccgccaggatctgggcggcggcgaggctagcccgggggcgcgctcgctcgggagcgcgctcatgcagcggttttcttctcccacaatccagaggcagctgcacgggaggggcggggagtcggcggaaggatatcggcgcggagggagcagcgcgctccctttgacggcggcccccggcattggcgggcggcgctggcgggcggcgaggggtggggtgtgatgcggcactgcggttctgaggccgttactccggcttctccatagagggcggagaaggctggagcgcggcggtgattttgtgccagggattcccagagacgcgctgaaaggctggcagggcttaggaagctggggggttagggacacacattcaagcccccacccccgggaggggaagggggctggaggcgaggcttgagggcggcggaggaatggtgtctgctcggggggaaggggcgagccctgcctgttggtactgaggggctgcgggcagtggaggctccgcgggtcgaaagcggctccatgcccatcggtgggtggaacgtgtagaggtcggaacgccgaggtcgagtctggtggcgcctcggtatccttaacgtggtctctgtttaacgtatttcatttagcccccgttgggattgattcattgggagcagtttcgctggtctggatcctccaggagctggacaaccttgacgggctttttgtcttgggttccagccccctttcccttcctcctcctccagatgccttttctctgcccctcctcgcccggtacagacatttccagcgcaggctgctgctcgtggtgtccgtcgtcgaagccacttcttgggatttcggctcgtttcactctggggtgttttttgaggagggagagtgcccccctcctccacgatgggatttttctcccttgccgaaatggactttcattgatttctacttacttccacgtttagtgaccaattccctaggcgtatttttgtggtagttccttttttcaaatacatactctgtaaaatggagaacgaaatttttactccccttctggagcagttcatgaccagccctttggtcacttgggttaaaacgtttggacctctggccgcaggaaatgggaccaaccttgatgaatatgtggctttggtggatggggtattcttgaaccaggtcatgctccaaattaatcctaaattggagagtcagagagtaaataaaaaagtcaataatgatgcctcacttagaatgcacaatctatccattttggtgagacagataaaattttattaccaggagactttgcagcaattgatcatgatgtcgttgccaaatgtcttaatcattggcaaaaatcccttttctgaacaaggcacagaagaagttaaaaaactgcttttacttttattgggttgtgcagttcagtgtcagaaaaaagaggaatttattgaaagaattcaaggtttagattttgatacaaaagcagcggttgccgcacatattcaagaggtaactcataatcaggaaaatgtgtttgacctgcaatggatggaagtgactgatatgtcgcaggaggacatagaaccactcttgaaaaatatggcattgcatctaaaaagacttatagatgagagagatgaacattcagagactatcatagaactctctgaagagcgggatggtctccattttctaccccatgcctcttcatctgcacagtcaccctgtggttctccaggcatgaagcgaacagaaagtcgacaacatctgtcggtggaactggcagatgctaaagccaagataagaaggcttaggcaggaattggaggaaaagactgagcagttgttggattgtaaacaagaacttgagcaaatggaaatagaactcaaaaggctgcaacaagagaacatgaatttgctttcggatgctcgctctgccagaatgtaccgagatgaattagatgcacttcgagagaaagcagtcagagtcgataagcttgaaagtgaagtcagcagatataaagagagactacatgatattgaattttataaggcaagagttgaggaattaaaagaagacaatcaagttttattagaaacaaaaaccatgttggaagaccaactagagggaactcgtgctcgttctgataaattacatgaattagaaaaagagaacttacaactgaaagctaaacttcatgatatggaaatggaacgagatatggatagaaaaaagattgaagaattaatggaagaaaatatgactttggaaatggcacagaaacaaagtatggatgaatcattacatcttggctgggaactggaacagatatccagaactagtgaactttccgaagcaccccagaaatccctgggccatgaggtgaatgagttgacatcaagtagattattgaagctagagatggaaaatcaaagtttgacaaaaaccgtagaagagcttcggactactgtggattctgtagaaggcaatgcttccaaaatcctgaaaatggaaaaagaaaatcaaaggctcagtaaaaaggttgagattcttgaaaatgagattgttcaagaaaagcaaagtcttcagaattgtcagaatttaagcaaggatctaatgaaggagaaagctcagcttgaaaaaacaatagaaacactgagagaaaattcagagagacagattaagatactggaacaggaaaatgaacatctgaatcaaacagtgtcttccttaaggcagcggtcccagataagtgcagaagcaagagtgaaagacattgaaaaagaaaacaaaattcttcatgaatctatcaaagaaacaagtagcaagctaagcaagattgaatttgaaaaaagacaaattaaaaaagaattggaacattataaagaaaaaggagaacgagctgaagaacttgaaaatgaattgcatcatcttgaaaaagaaaatgaattattacagaaaaaaataactaatttaaaaattacttgtgaaaaaattgaggccttagaacaagaaaattcagagctagaaagagaaaatagaaaattaaaaaaaacattggatagctttaaaaatctgacctttcagttagaatccctagaaaaagagaattcccaacttgatgaggaaaacttagaactgcgaaggaatgtagaatctttgaagtgtgcaagcatgaaaatggctcagctacagctagaaaacaaagaactggaaagtgaaaaagagcaacttaagaagggtttggagctcctgaaagcatctttcaagaaaacagaacgcttagaagttagctaccagggtttagatatagaaaatcaaagactgcaaaaaactttagagaacagcaataaaaaaatccagcaattagagagtgaactacaagacttagagatggaaaatcaaacattgcagaaaaacctagaagaactaaaaatatctagcaaaagactagaacagctggaaaaagaaaataaatcattagagcaagagacttctcaactggaaaaggataagaaacaattggagaaggaaaataagagactccgacaacaagcagaaattaaagataccacattagaagaaaataatgtgaagattggaaatttggaaaaagaaaacaaaaccctatccaaagaaattggtatatataaagaatcttgtgtccgtctgaaagaactagaaaaagaaaataaggagcttgtgaaaagagcaactattgatataaaaacgttggttacactacgtgaggatttggtgagtgaaaagttgaagacccaacagatgaacaatgatctcgaaaaattaactcatgagcttgagaagatagggttaaataaggagcgactcttacatgatgaacaaagtactgatgacagtaggtataaacttttggaatcaaaattagaatccactcttaagaagtctcttgaaataaaagaagaaaaaattgctgctttagaagctcgattagaagaatccacgaattataaccagcaattgcgccaagaacttaaaacaaatgctacactgcaagcagagaagcaagcgttgaaaactcaactgaagcaacttgagacacagaacaataatttgcaggctcagattcttgcacttcagaggcagacagtgtcattacaagaacagaataccactcttcaaacacagaatgccaagcttcaggttgaaaattccacccttaattcccaaagtacctcactcatgaaccagaatgcccaactcctaatccagcagtcttccttagaaaatgaaaatgaatctgtaatcaaagagcgagaagacctaaaatctctctatgattctctgatcaaagatcatgaaaagctggaacttcttcatgaacgtcaggcttcagagtatgaatctcttatctctaaacatggaactctgaagtctgcccacaaaaatcttgaggtggaacatagagaccttgaagaccgttacaatcagttattaaaacagaaaggacagttggaagatttggaaaaaatgctcaaagtagaacaggaaaaaatgctgcttgaaaataaaaatcatgaaacagtagctgcagaatacaagaaactttgtggtgaaaatgataggctgaatcatacctatagtcaacttttaaaagagactgaagttttacaaactgaccataaaaatttgaaaagtcttctgaataattccaaactggaacaaacaagattagaagctgaattttcaaaactaaaggaacaataccaacaattggatattacatcaaccaagctgaataaccagtgtgagttgctaagccaacttaaaggaaatttagaagaagaaaatcggcatctactagatcaaattcagacattaatgctacagaacagaacacttttggagcagaatatggaaagcaaggatctttttcatgttgaacaaagacagtacattgataagttaaatgaattaagacgtcagaaggagaaactagaagagaaaattatggatcaatacaaattttatgacccatctcctcctagaaggagaggcaactggattactctaaaaatgagaaaattgataaagtctaagaaagatattaatcgggaacgccagaaatctctaacattaacacccacccgctcagactccagtgaaggatttcttcagctccctcatcaagacagtcaagatagttcttcagtaggttcaaactctttagaagatggccagaccttggggaccaagaaaagcagcaccatgaatgacctggtgcagtccatggtcctagcaggacagtggacaggtagtactgagaatttggaggttcctgatgatatttcaacgggtaaaaggagaaaagaattgggagctatggccttctctactacagccatcaacttttcaactgtcaactcttctgcaggcttcagatccaagcagttggttaataataaagatactacatcctttgaagacataagtccacaaggtgttagtgatgattctagtacgggatcaagagttcatgcttcaagaccagccagccttgatagtggcagaacatccactagcaatagcaataataatgcttcactacatgaagtcaaagcaggtgcagttaataaccaaagcaggccacaaagccacagcagtggagaatttagcctgcttcatgaccatgaggcttggtccagcagtggtagcagtccaatccagtacttgaaaagacagaccagatcaagcccagtgctccagcacaaaatatctgaaacactggagagtcgacatcacaagatcaaaactggttcccctggaagtgaagttgttactctacaacagtttttggaagaaagcaataagcttacctcagtacagataaagtcctcaagtcaagagaatcttttagatgaagtaatgaaaagtttgtctgtctcttctgactttttgggaaaagacaaaccagttagctgtggtctggccaggtcagtaagtggaaaaaccccaggggacttctatgatagacggacaactaagcctgagtttttgagacctggtcctcgaaaaactgaagatacctacttcattagttctgcgggaaaacctacaccaggcactcaaggaaaaataaaatcagaagactgaaggagttgaaagaccagtagacgctcctctactctttgagacatcactggcctataataaatgggttaatttatgt

SEQ ID NO: 359944 - DNA, 7514 bp, Homo sapiens
tttttttttaattttctattttctctttctagctctgaattttcttgttctaaggcctcaattttttcacaagtaatttttaaattagttatttttttctgtaataattcattttctttttcaagatgatgcaattcattttcaagttcttcgtgctcgttctgataaattacatgaattagaaaaagagaacttacaactgaaagctaaacttcatgatatggaaatggaacgagatatggatagaaaaaagattgaagaattaatggaagaaaatatgactttggaaatggcacagaaacaaagtatggatgaatcattacatcttggctgggaactggaacagatatccagaactagtgaactttccgaagcaccccagaaatccctgggccatgaggtgaatgagttgacatcaagtagattattgaagctagagatggaaaatcaaagtttgacaaaaaccgtagaagagcttcggactactgtggattctgtagaaggcaatgcttccaaaatcctgaaaatggaaaaagaaaatcaaaggctcagtaaaaaggttgagattcttgaaaatgagattgttcaagaaaagcaaagtcttcagaattgtcagaatttaagcaaggatctaatgaaggagaaagctcagcttgaaaaaacaatagaaacactgagagaaaattcagagagacagattaagatactggaacaggaaaatgaacatctgaatcaaacagtgtcttccttaaggcagcggtcccagataagtgcagaagcaagagtgaaagacattgaaaaagaaaacaaaattcttcatgaatctatcaaagaaacaagtagcaagctaagcaagattgaatttgaaaaaagacaaattaaaaaagaattggaacattataaagaaaaaggagaacgagctgaagaacttgaaaatgaattgcatcatcttgaaaaagaaaatgaattattacagaaaaaaataactaatttaaaaattacttgtgaaaaaattgaggccttagaacaagaaaattcagagctagaaagagaaaatagaaaattaaaaaaaacattggatagctttaaaaatctgacctttcagttagaatccctagaaaaagagaattcccaacttgatgaggaaaacttagaactgcgaaggaatgtagaatctttgaagtgtgcaagcatgaaaatggctcagctacagctagaaaacaaagaactggaaagtgaaaaagagcaacttaagaagggtttggagctcctgaaagcatctttcaagaaaacagaacgcttagaagttagctaccagggtttagatatagaaaatcaaagactgcaaaaaactttagagaacagcaataaaaaaatccagcaattagagagtgaactacaagacttagagatggaaaatcaaacattgcagaaaaacctagaagaactaaaaatatctagcaaaagactagaacagctggaaaaagaaaataaatcattagagcaagagacttctcaactggaaaaggataagaaacaattggagaaggaaaataagagactccgacaacaagcagaaattaaagataccacattagaagaaaataatgtgaagattggaaatttggaaaaagaaaacaaaaccctatccaaagaaattggtatatataaagaatcttgtgtccgtctgaaagaactagaaaaagaaaataaggagcttgtgaaaagagcaactattgatataaaaacgttggttacactacgtgaggatttggtgagtgaaaagttgaagacccaacagatgaacaatgatctcgaaaaattaactcatgagcttgagaagatagggttaaataaggagcgactcttacatgatgaacaaagtactgatgacagtaggtataaacttttggaatcaaaattagaatccactcttaagaagtctcttgaaataaaagaagaaaaaattgctgctttagaagctcgattagaagaatccacgaattataaccagcaattgcgccaagaacttaaaacaaatgctacactgcaagcagagaagcaagcgttgaaaactcaactgaagcaacttgagacacagaacaataatttgcaggctcagattcttgcacttcagaggcagacagtgtcattacaagaacagaataccactcttcaaacacagaatgccaagcttcaggttgaaaattccacccttaattcccaaagtacctcactcatgaaccagaatgcccaactcctaatccagcagtcttccttagaaaatgaaaatgaatctgtaatcaaagagcgagaagacctaaaatctctctatgattctctgatcaaagatcatgaaaagctggaacttcttcatgaacgtcaggcttcagagtatgaatctcttatctctaaacatggaactctgaagtctgcccacaaaaatcttgaggtggaacatagagaccttgaagaccgttacaatcagttattaaaacagaaaggacagttggaagatttggaaaaaatgctcaaagtagaacaggaaaaaatgctgcttgaaaataaaaatcatgaaacagtagctgcagaatacaagaaactttgtggtgaaaatgataggctgaatcatacctatagtcaacttttaaaagagactgaagttttacaaactgaccataaaaatttgaaaagtcttctgaataattccaaactggaacaaacaagattagaagctgaattttcaaaactaaaggaacaataccaacaattggatattacatcaaccaagctgaataaccagtgtgagttgctaagccaacttaaaggaaatttagaagaagaaaatcggcatctactagatcaaattcagacattaatgctacagaacagaacacttttggagcagaatatggaaagcaaggatctttttcatgttgaacaaagacagtacattgataagttaaatgaattaagacgtcagaaggagaaactagaagagaaaattatggatcaatacaaattttatgacccatctcctcctagaaggagaggcaactggattactctaaaaatgagaaaattgataaagtctaagaaagatattaatcgggaacgccagaaatctctaacattaacacccacccgctcagactccagtgaaggatttcttcagctccctcatcaagacagtcaagatagttcttcagtaggttcaaactctttagaagatggccagaccttggggaccaagaaaagcagcaccatgaatgacctggtgcagtccatggtcctagcaggacagtggacaggtagtactgagaatttggaggttcctgatgatatttcaacgggtaaaaggagaaaagaattgggagctatggccttctctactacagccatcaacttttcaactgtcaactcttctgcaggcttcagatccaagcagttggttaataataaagatactacatcctttgaagacataagtccacaaggtgttagtgatgattctagtacgggatcaagagttcatgcttcaagaccagccagccttgatagtggcagaacatccactagcaatagcaataataatgcttcactacatgaagtcaaagcaggtgcagttaataaccaaagcaggccacaaagccacagcagtggagaatttagcctgcttcatgaccatgaggcttggtccagcagtggtagcagtccaatccagtacttgaaaagacagaccagatcaagcccagtgctccagcacaaaatatctgaaacactggagagtcgacatcacaagatcaaaactggttcccctggaagtgaagttgttactctacaacagtttttggaagaaagcaataagcttacctcagtacagataaagtcctcaagtcaagagaatcttttagatgaagtaatgaaaagtttgtctgtctcttctgactttttgggaaaagacaaaccagttagctgtggtctggccaggtcagtaagtggaaaaaccccaggggacttctatgatagacggacaactaagcctgagtttttgagacctggtcctcgaaaaactgaagatacctacttcattagttctgcgggaaaacctacaccaggcactcaaggaaaaataaaattagtaaaagaatcttctctgtcacgacaatcaaaagatagtaacccttatgcaactttacctcgtgcaagcagcgtgatctcaactgccgaaggaactacacgaaggacaagcatccatgattttttgaccaaggacagtagactgcctatatcagttgattcaccaccagctgctgctgacagcaacaccactgcagcatctaatgtggacaaagtacaagaaagcagaaattcaaaaagcaggtctagggagcaacaaagctcctaattctattacccactacatgacatgtgggccaagtgagagaaaagtgtccttcagtttctcagtatgaagcctttatttctgaagtaacaagacacctagcaactataggaatcatttttaaaaatctttaaggagacttttaacagtccttcgtgaatagagcaggcaagaaatacaaaccttcattccttgaatcaaggagcactactggattcaactgccaaaattttttaaaggttttaggacttactataccttgtactgttaagatctactgaataaaggacgttctctcactaaggaccaggtgttttaaggttaagtgtttaaagaagtactccaagaacaatctgcttttttcatcatttgttttatgaatttatccatgtttgcttaatgcttctgctaagtgttagccaaaatctagccatttatatttagttgtgtaaacctaaattaaatgctgtagtattttgtggaatgtactatatagcaagatacagagaaaattgttttggcatgtcagagccttatttggttagcagactgcatgtgttgatactttttttttcttaaagccaattattttgatgcaaaagaaattcagtttataagataaatctgaaaaatccataatgaaataggagttataaaaaatttatagtgatattaatctttccatatttcccattaagcaacactaagcattcataagttaacccatggtaaagagtgtttttctgaaacttttttttagtaagatggtttttcagcaaatggcattcccaagataaagctgttgtgctttaactcatttcttttctttggtattgggttatgtatgcgtgtgcatttttttaacttgagagctgactgttgcttaagaagttttcttatggcaaaaataatgtaaataagttactatgatctgcattttgccagaaactcatttataattaaggctatcatttattaatgatttttttctcctttatgatattacattaaagttgataactgttattggtacttttgaaatatttgtatgcatttgttacctttaaacatttggaagaagcacaaaaaaatagatttagttaacccagggaaacatcaatttttttagtagttccaattttatatcacagttttattttcttatgaaatcaaaaaatgcattgatactcattaatgcaaattcattatttaacatcaatatcagagtaatcttcaaggtctgaaatgagaaacatactgactttttaaaattttaacagtgtacttcttaggctttcattaccagctctgaagaactttttggaataattccatattccatagtgtgtggtttatgagttgtgggtttcatcactaacccagtaaccataagaaaagtctctctctctctctctctctctttctctctccctctttctctctctctttcgtaggccagtagcaatgttgtgttcacagtctaatttccaaaagaccatcaataaaaaagagagcatgtttaaattgaaatggaacttagagaacttgagcttacttacgtacttcaatgccaccggtaacttaggttttaccaccaaatgctgttaacattaaatcattttgaaaatcttggatgaaaggtgctatgtaaatggaaatacaaaggattcttactaacatacaaaaataatgcacaacagaaatatctaaaaccttttccgtagactttgaaacatctctctctgtcataactccctggattcaagtagcacattggtaataggtatcagagcagtctagagacaattgcatgtcaaaaaatgtacattcatttttaggtgggataaaagtaaacatagaaattatgttatggctaaatacagttagtgggtaacttagatttatattagctagcatctaatttgcacaactagaacacatcccagaacaattactgaaaagctgaaatttaatgggtggtgatgtagcccaatgagggcgaatgacattccagcttgacctctccagaacactaatatcctaaaatacagaacatgctgggttaagtgcattagtgcttcaagcagaaaatgctgaaaacaacgtgtaaagtactgaatctgagtaggctgaccctgagaagggacaattaaagagacaaccaagggaacacattgagactacaaaaatatgaataatctcaattatattcatcacacttttttcataccatttcaagaaacgactagacagtagtaaccacatgaatattttactttctccagtataccttgagaagcaaactttgtaggaagccactcttctcccctaaacaacttctgccaaacaataataaagccaactggaaacgaatcggagccattttcattttcctaaccggggcctgacatgctttaaattatctggctgtattctaaatcaacacctaacccctcaaggaaactgaagaatcaatatacagggtaatagctttggctcagagctccaataatgtgcttcagatctgtccatgtggaaatgctttcatccaaatttttaaattggtggttaccaaagagttcacaaaacaggtttgtatgtagcacctttcatgcaaggcatgcaaaaagcctattttaaaatcactgtgcatattatagagttgtagccacctcacaatgaagtactacagcctgtgctgtcttaatggtttatgtcaggaaatgaaaaagatactgtaccaaatctggaattacaatggggagtaataatgtatactaaatgacttttgtattttaagttactttttgtgagtggtgaatttttgtgtttttcttttcagctacacttagtcctgagatgtattttttctttaagtcttgaatgaatacaaaaggagcccattttataatataaaccttgatgtacatgttgagatatttggacaatgaaaatgccttaaaaggaatgcatatggataaagttgcacttataacacccttcaacaaaatctaattttaaattgtctttttcttttctattaagggttttctttttcagtgtctaccattgtacttataactgttattaaataccaaatcaaataata

SEQ ID NO: 359945 - DNA, 8099 bp, Homo sapiens
aaggaataatgttaaagacaacattaatgacatttatagaacacttaactataagctgccatttcatttaaccctattattagccctgctttacacgtgacggaatcgaagcacaaagagactcaataacgtgcgtaggctcacacagctggtgcatattggaaccaggcaggaagacttcagagtccaggttctcaactacccaattaagaaattctgctctttcttaactgtgttatgacaaaaacatttttactgctaatttaaaatatatactccgtgtaaatatttatgtaatgtaaacatagcacacattataaaactataatattatcttttatcaaaaaaagattgcgttctatatgcccattttaccccgggaaaaaggtctttattttcctttgaaatgaggagtagcatttgattttgccagggaacttaaaattatttcaaggtcccagtcgtacgtggcatggagatttatgacaaatatgtaatctgtttatttgtcacccaacttggatgacttctaaatgtttcttctttgtagctcttgattttgcttgggtttcccccgacccatgcccaaatagtaaaaaacaaaacaaaaccaaaaaacaatgtctgagtcatgtttgctccagtcagggaataccaacgtgctgacagacagctctggtttttaaaaaatcttactgtatgtcacttgcaactttgaagaacattcatgcgttagtggactgcatttggaagaaaacaaaaaggagaaaaaaacccccaccaagttgtggctcaagtccctctgccatttgctgcagtgagttttcctattccattttgctggggagaaggcatgctttacagaacacatcaaactgtccgaaaaaggctgtctgcatccctcatgtttataagagaaggatttctttccccttccttcacgtatcaaagaagtcactcggggaggaaataaaccataattaggcatgagcgagcgagcagacagaccccttgctctgccttccctgtccccgcccaccaggcaaccgtcctgggcgcaaccgaggagcgggttgtctccgcagcagctgcagcgagcgcgcgcccacgcccgagcccgcgcccgccgccaggatctgggcggcggcgaggctagcccgggggcgcgctcgctcgggagcgcgctcatgcagcggttttcttctcccacaatccagaggcagctgcacgggaggggcggggagtcggcggaaggatatcggcgcggagggagcagcgcgctccctttgacggcggcccccggcattggcgggcggcgctggcgggcggcgaggggtggggtgtgatgcggcactgcggttctgaggccgttactccggcttctccatagagggcggagaaggctggagcgcggcggtgattttgtgccagggattcccagagacgcgctgaaaggctggcagggcttaggaagctggggggttagggacacacattcaagcccccacccccgggaggggaagggggctggaggcgaggcttgagggcggcggaggaatggtgtctgctcggggggaaggggcgagccctgcctgttggtactgaggggctgcgggcagtggaggctccgcgggtcgaaagcggctccatgcccatcggtgggtggaacgtgtagaggtcggaacgccgaggtcgagtctggtggcgcctcggtatccttaacgtggtctctgtttaacgtatttcatttagcccccgttgggattgattcattgggagcagtttcgctggtctggatcctccaggagctggacaaccttgacgggctttttgtcttgggttccagccccctttcccttcctcctcctccagatgccttttctctgcccctcctcgcccggtacagacatttccagcgcaggctgctgctcgtggtgtccgtcgtcgaagccacttcttgggatttcggctcgtttcactctggggtgttttttgaggagggagagtgcccccctcctccacgatgggatttttctcccttgccgaaatggactttcattgatttctacttacttccacgtttagtgaccaattccctaggcgtatttttgtggtagttccttttttcaaatacatactctgtaaaatggagaacgaaatttttactccccttctggagcagttcatgaccagccctttggtcacttgggttaaaacgtttggacctctggccgcaggaaatgggaccaaccttgatgaatatgtggctttggtggatggggtattcttgaaccaggtcatgctccaaattaatcctaaattggagagtcagagagtaaataaaaaagtcaataatgatgcctcacttagaatgcacaatctatccattttggtgagacagataaaattttattaccaggagactttgcagcaattgatcatgatgtcgttgccaaatgtcttaatcattggcaaaaatcccttttctgaacaaggcacagaagaagttaaaaaactgcttttacttttattgggttgtgcagttcagtgtcagaaaaaagaggaatttattgaaagaattcaaggtttagattttgatacaaaagcagcggttgccgcacatattcaagaggtaactcataatcaggaaaatgtgtttgacctgcaatggatggaagtgactgatatgtcgcaggaggacatagaaccactcttgaaaaatatggcattgcatctaaaaagacttatagatgagagagatgaacattcagagactatcatagaactctctgaagagcgggatggtctccattttctaccccatgcctcttcatctgcacagtcaccctgtggttctccaggcatgaagcgaacagaaagtcgacaacatctgtcggtggaactggcagatgctaaagccaagataagaaggcttaggcaggaattggaggaaaagactgagcagttgttggattgtaaacaagaacttgagcaaatggaaatagaactcaaaaggctgcaacaagagaacatgaatttgctttcggatgctcgctctgccagaatgtaccgagatgaattagatgcacttcgagagaaagcagtcagagtcgataagcttgaaagtgaagtcagcagatataaagagagactacatgatattgaattttataaggcaagagttgaggaattaaaagaagacaatcaagttttattagaaacaaaaaccatgttggaagaccaactagagggaactcgtgctcgttctgataaattacatgaattagaaaaagagaacttacaactgaaagctaaacttcatgatatggaaatggaacgagatatggatagaaaaaagattgaagaattaatggaagaaaatatgactttggaaatggcacagaaacaaagtatggatgaatcattacatcttggctgggaactggaacagatatccagaactagtgaactttccgaagcaccccagaaatccctgggccatgaggtgaatgagttgacatcaagtagattattgaagctagagatggaaaatcaaagtttgacaaaaaccgtagaagagcttcggactactgtggattctgtagaaggcaatgcttccaaaatcctgaaaatggaaaaagaaaatcaaaggctcagtaaaaaggttgagattcttgaaaatgagattgttcaagaaaagcaaagtcttcagaattgtcagaatttaagcaaggatctaatgaaggagaaagctcagcttgaaaaaacaatagaaacactgagagaaaattcagagagacagattaagatactggaacaggaaaatgaacatctgaatcaaacagtgtcttccttaaggcagcggtcccagataagtgcagaagcaagagtgaaagacattgaaaaagaaaacaaaattcttcatgaatctatcaaagaaacaagtagcaagctaagcaagattgaatttgaaaaaagacaaattaaaaaagaattggaacattataaagaaaaaggagaacgagctgaagaacttgaaaatgaattgcatcatcttgaaaaagaaaatgaattattacagaaaaaaataactaatttaaaaattacttgtgaaaaaattgaggccttagaacaagaaaattcagagctagaaagagaaaatagaaaattaaaaaaaacattggatagctttaaaaatctgacctttcagttagaatccctagaaaaagagaattcccaacttgatgaggaaaacttagaactgcgaaggaatgtagaatctttgaagtgtgcaagcatgaaaatggctcagctacagctagaaaacaaagaactggaaagtgaaaaagagcaacttaagaagggtttggagctcctgaaagcatctttcaagaaaacagaacgcttagaagttagctaccagggtttagatatagaaaatcaaagactgcaaaaaactttagagaacagcaataaaaaaatccagcaattagagagtgaactacaagacttagagatggaaaatcaaacattgcagaaaaacctagaagaactaaaaatatctagcaaaagactagaacagctggaaaaagaaaataaatcattagagcaagagacttctcaactggaaaaggataagaaacaattggagaaggaaaataagagactccgacaacaagcagaaattaaagataccacattagaagaaaataatgtgaagattggaaatttggaaaaagaaaacaaaaccctatccaaagaaattggtatatataaagaatcttgtgtccgtctgaaagaactagaaaaagaaaataaggagcttgtgaaaagagcaactattgatataaaaacgttggttacactacgtgaggatttggtgagtgaaaagttgaagacccaacagatgaacaatgatctcgaaaaattaactcatgagcttgagaagatagggttaaataaggagcgactcttacatgatgaacaaagtactgatgacagtaggtataaacttttggaatcaaaattagaatccactcttaagaagtctcttgaaataaaagaagaaaaaattgctgctttagaagctcgattagaagaatccacgaattataaccagcaattgcgccaagaacttaaaacaaatgctacactgcaagcagagaagcaagcgttgaaaactcaactgaagcaacttgagacacagaacaataatttgcaggctcagattcttgcacttcagaggcagacagtgtcattacaagaacagaataccactcttcaaacacagaatgccaagcttcaggttgaaaattccacccttaattcccaaagtacctcactcatgaaccagaatgcccaactcctaatccagcagtcttccttagaaaatgaaaatgaatctgtaatcaaagagcgagaagacctaaaatctctctatgattctctgatcaaagatcatgaaaagctggaacttcttcatgaacgtcaggcttcagagtatgaatctcttatctctaaacatggaactctgaagtctgcccacaaaaatcttgaggtggaacatagagaccttgaagaccgttacaatcagttattaaaacagaaaggacagttggaagatttggaaaaaatgctcaaagtagaacaggaaaaaatgctgcttgaaaataaaaatcatgaaacagtagctgcagaatacaagaaactttgtggtgaaaatgataggctgaatcatacctatagtcaacttttaaaagagactgaagttttacaaactgaccataaaaatttgaaaagtcttctgaataattccaaactggaacaaacaagattagaagctgaattttcaaaactaaaggaacaataccaacaattggatattacatcaaccaagctgaataaccagtgtgagttgctaagccaacttaaaggaaatttagaagaagaaaatcggcatctactagatcaaattcagacattaatgctacagaacagaacacttttggagcagaatatggaaagcaaggatctttttcatgttgaacaaagacagtacattgataagttaaatgaattaagacgtcagaaggagaaactagaagagaaaattatggatcaatacaaattttatgacccatctcctcctagaaggagaggcaactggattactctaaaaatgagaaaattgataaagtctaagaaagatattaatcgggaacgccagaaatctctaacattaacacccacccgctcagactccagtgaaggatttcttcagctccctcatcaagacagtcaagatagttcttcagtaggttcaaactctttagaagatggccagaccttggggaccaagaaaagcagcatggttgcactgaaaagactgccctttttgaggaacagaccgaaggataaagacaaaatgaaggcctgctaccgtcgttccatgtccatgaatgacctggtgcagtccatggtcctagcaggacagtggacaggtagtactgagaatttggaggttcctgatgatatttcaacgggtaaaaggagcaactcttctgcaggcttcagatccaagcagttggttaataataaagatactacatcctttgaagacataagtccacaaggtgttagtgatgattctagtacgggatcaagagttcatgcttcaagaccagccagccttgatagtggcagaacatccactagcaatagcaataataatgcttcactacatgaagtcaaagcaggtgcagttaataaccaaagcaggccacaaagccacagcagtggagaatttagcctgcttcatgaccatgaggcttggtccagcagtggtagcagtccaatccagtacttgaaaagacagaccagatcaagcccagtgctccagcacaaaatatctgaaacactggagagtcgacatcacaagatcaaaactggttcccctggaagtgaagttgttactctacaacagtttttggaagaaagcaataagcttacctcagtacagataaagtcctcaagtcaagagaatcttttagatgaagtaatgaaaagtttgtctgtctcttctgactttttgggaaaagacaaaccagttagctgtggtctggccaggtcagtaagtggaaaaaccccaggggacttctatgatagacggacaactaagcctgagtttttgagacctggtcctcgaaaaactgaagatacctacttcattagttctgcgggaaaacctacaccaggcactcaaggaaaaataaaattagtaaaagaatcttctctgtcacgacaatcaaaagatagtaacccttatgcaactttacctcgtgcaagcagcgtgatctcaactgccgaaggaactacacgaaggacaagcatccatgattttttgaccaaggacagtagactgcctatatcagttgattcaccaccagctgctgctgacagcaacaccactgcagcatctaatgtggacaaagtacaagaaagcagaaattcaaaaagcaggtctagggagcaacaaagctcctaattctattacccactacatgacatgtgggccaagtgctacacttagtcctgagatgtattttttctttaagtcttgaatgaatacaaaaggagcccattttataatataaaccttgatgtacatgttgagatatttggacaatgaaaatgccttaaaaggaatgcatatggataaagttgcacttataacacccttcaacaaaatctaattttaaattgtctttttcttttctattaagggttttctttttcagtgtctaccattgtacttataactgttattaaataccaaatcaaataatataaaagctgtaacatttcctttaaaactaatgctaataagggatttagagttgaatggcaaaatgtttattacttggcaatacctgatgtcagtcacaggcatccaactcatgacaagagataccactgtttgttttttaaaaaacatttttcattttgtttctccttcaaaaattaagttggactaacattcacgtatcaaactaatataaaaagaaataaaaccaagaggtgatttttgtaaaaactggtta

SEQ ID NO: 359946 - DNA, 5777 bp, Homo sapiens
gagaatggggcagtaagaagaggataatttcatttgcctctttaacaaaaatgcttttataagacccatttatggcatgaatatttgtggtcataaattatctttaaaaataattttctgacctccaataatgaactacattactttgtacttggatagtaggtataaacttttggaatcaaaattagaatccactcttaagaagtctcttgaaataaaagaagaaaaaattgctgctttagaagctcgattagaagaatccacgaattataaccagcaattgcgccaagaacttaaaacaaatgctacactgcaagcagagaagcaagcgttgaaaactcaactgaagcaacttgagacacagaacaataatttgcaggctcagattcttgcacttcagaggcagacagtgtcattacaagaacagaataccactcttcaaacacagaatgccaagcttcaggttgaaaattccacccttaattcccaaagtacctcactcatgaaccagaatgcccaactcctaatccagcagtcttccttagaaaatgaaaatgaatctgtaatcaaagagcgagaagacctaaaatctctctatgattctctgatcaaagatcatgaaaagctggaacttcttcatgaacgtcaggcttcagagtatgaatctcttatctctaaacatggaactctgaagtctgcccacaaaaatcttgaggtggaacatagagaccttgaagaccgttacaatcagttattaaaacagaaaggacagttggaagatttggaaaaaatgctcaaagtagaacaggaaaaaatgctgcttgaaaataaaaatcatgaaacagtagctgcagaatacaagaaactttgtggtgaaaatgataggctgaatcatacctatagtcaacttttaaaagagactgaagttttacaaactgaccataaaaatttgaaaagtcttctgaataattccaaactggaacaaacaagattagaagctgaattttcaaaactaaaggaacaataccaacaattggatattacatcaaccaagctgaataaccagtgtgagttgctaagccaacttaaaggaaatttagaagaagaaaatcggcatctactagatcaaattcagacattaatgctacagaacagaacacttttggagcagaatatggaaagcaaggatctttttcatgttgaacaaagacagtacattgataagttaaatgaattaagacgtcagaaggagaaactagaagagaaaattatggatcaatacaaattttatgacccatctcctcctagaaggagaggcaactggattactctaaaaatgagaaaattgataaagtctaagaaagatattaatcgggaacgccagaaatctctaacattaacacccacccgctcagactccagtgaaggatttcttcagctccctcatcaagacagtcaagatagttcttcagtaggttcaaactctttagaagatggccagaccttggggaccaagaaaagcagcaccatgaatgacctggtgcagtccatggtcctagcaggacagtggacaggtagtactgagaatttggaggttcctgatgatatttcaacgggtaaaaggagaaaagaattgggagctatggccttctctactacagccatcaacttttcaactgtcaactcttctgcaggcttcagatccaagcagttggttaataataaagatactacatcctttgaagacataagtccacaaggtgttagtgatgattctagtacgggatcaagagttcatgcttcaagaccagccagccttgatagtggcagaacatccactagcaatagcaataataatgcttcactacatgaagtcaaagcaggtgcagttaataaccaaagcaggccacaaagccacagcagtggagaatttagcctgcttcatgaccatgaggcttggtccagcagtggtagcagtccaatccagtacttgaaaagacagaccagatcaagcccagtgctccagcacaaaatatctgaaacactggagagtcgacatcacaagatcaaaactggttcccctggaagtgaagttgttactctacaacagtttttggaagaaagcaataagcttacctcagtacagataaagtcctcaagtcaagagaatcttttagatgaagtaatgaaaagtttgtctgtctcttctgactttttgggaaaagacaaaccagttagctgtggtctggccaggtcagtaagtggaaaaaccccaggggacttctatgatagacggacaactaagcctgagtttttgagacctggtcctcgaaaaactgaagatacctacttcattagttctgcgggaaaacctacaccaggcactcaaggaaaaataaaattagtaaaagaatcttctctgtcacgacaatcaaaagatagtaacccttatgcaactttacctcgtgcaagcagcgtgatctcaactgccgaaggaactacacgaaggacaagcatccatgattttttgaccaaggacagtagactgcctatatcagttgattcaccaccagctgctgctgacagcaacaccactgcagcatctaatgtggacaaagtacaagaaagcagaaattcaaaaagcaggtctagggagcaacaaagctcctaattctattacccactacatgacatgtgggccaagtgagagaaaagtgtccttcagtttctcagtatgaagcctttatttctgaagtaacaagacacctagcaactataggaatcatttttaaaaatctttaaggagacttttaacagtccttcgtgaatagagcaggcaagaaatacaaaccttcattccttgaatcaaggagcactactggattcaactgccaaaattttttaaaggttttaggacttactataccttgtactgttaagatctactgaataaaggacgttctctcactaaggaccaggtgttttaaggttaagtgtttaaagaagtactccaagaacaatctgcttttttcatcatttgttttatgaatttatccatgtttgcttaatgcttctgctaagtgttagccaaaatctagccatttatatttagttgtgtaaacctaaattaaatgctgtagtattttgtggaatgtactatatagcaagatacagagaaaattgttttggcatgtcagagccttatttggttagcagactgcatgtgttgatactttttttttcttaaagccaattattttgatgcaaaagaaattcagtttataagataaatctgaaaaatccataatgaaataggagttataaaaaatttatagtgatattaatctttccatatttcccattaagcaacactaagcattcataagttaacccatggtaaagagtgtttttctgaaacttttttttagtaagatggtttttcagcaaatggcattcccaagataaagctgttgtgctttaactcatttcttttctttggtattgggttatgtatgcgtgtgcatttttttaacttgagagctgactgttgcttaagaagttttcttatggcaaaaataatgtaaataagttactatgatctgcattttgccagaaactcatttataattaaggctatcatttattaatgatttttttctcctttatgatattacattaaagttgataactgttattggtacttttgaaatatttgtatgcatttgttacctttaaacatttggaagaagcacaaaaaaatagatttagttaacccagggaaacatcaatttttttagtagttccaattttatatcacagttttattttcttatgaaatcaaaaaatgcattgatactcattaatgcaaattcattatttaacatcaatatcagagtaatcttcaaggtctgaaatgagaaacatactgactttttaaaattttaacagtgtacttcttaggctttcattaccagctctgaagaactttttggaataattccatattccatagtgtgtggtttatgagttgtgggtttcatcactaacccagtaaccataagaaaagtctctctctctctctctctctctttctctctccctctttctctctctctttcgtaggccagtagcaatgttgtgttcacagtctaatttccaaaagaccatcaataaaaaagagagcatgtttaaattgaaatggaacttagagaacttgagcttacttacgtacttcaatgccaccggtaacttaggttttaccaccaaatgctgttaacattaaatcattttgaaaatcttggatgaaaggtgctatgtaaatggaaatacaaaggattcttactaacatacaaaaataatgcacaacagaaatatctaaaaccttttccgtagactttgaaacatctctctctgtcataactccctggattcaagtagcacattggtaataggtatcagagcagtctagagacaattgcatgtcaaaaaatgtacattcatttttaggtgggataaaagtaaacatagaaattatgttatggctaaatacagttagtgggtaacttagatttatattagctagcatctaatttgcacaactagaacacatcccagaacaattactgaaaagctgaaatttaatgggtggtgatgtagcccaatgagggcgaatgacattccagcttgacctctccagaacactaatatcctaaaatacagaacatgctgggttaagtgcattagtgcttcaagcagaaaatgctgaaaacaacgtgtaaagtactgaatctgagtaggctgaccctgagaagggacaattaaagagacaaccaagggaacacattgagactacaaaaatatgaataatctcaattatattcatcacacttttttcataccatttcaagaaacgactagacagtagtaaccacatgaatattttactttctccagtataccttgagaagcaaactttgtaggaagccactcttctcccctaaacaacttctgccaaacaataataaagccaactggaaacgaatcggagccattttcattttcctaaccggggcctgacatgctttaaattatctggctgtattctaaatcaacacctaacccctcaaggaaactgaagaatcaatatacagggtaatagctttggctcagagctccaataatgtgcttcagatctgtccatgtggaaatgctttcatccaaatttttaaattggtggttaccaaagagttcacaaaacaggtttgtatgtagcacctttcatgcaaggcatgcaaaaagcctattttaaaatcactgtgcatattatagagttgtagccacctcacaatgaagtactacagcctgtgctgtcttaatggtttatgtcaggaaatgaaaaagatactgtaccaaatctggaattacaatggggagtaataatgtatactaaatgacttttgtattttaagttactttttgtgagtggtgaatttttgtgtttttcttttcagctacacttagtcctgagatgtattttttctttaagtcttgaatgaatacaaaaggagcccattttataatataaaccttgatgtacatgttgagatatttggacaatgaaaatgccttaaaaggaatgcatatggataaagttgcacttataacacccttcaacaaaatctaattttaaattgtctttttcttttctattaagggttttctttttcagtgtctaccattgtacttataactgttattaaataccaaatcaaataata

SEQ ID NO: 359947 - DNA, 6213 bp, Homo sapiens
aaggaataatgttaaagacaacattaatgacatttatagaacacttaactataagctgccatttcatttaaccctattattagccctgctttacacgtgacggaatcgaagcacaaagagactcaataacgtgcgtaggctcacacagctggtgcatattggaaccaggcaggaagacttcagagtccaggttctcaactacccaattaagaaattctgctctttcttaactgtgttatgacaaaaacatttttactgctaatttaaaatatatactccgtgtaaatatttatgtaatgtaaacatagcacacattataaaactataatattatcttttatcaaaaaaagattgcgttctatatgcccattttaccccgggaaaaaggtctttattttcctttgaaatgaggagtagcatttgattttgccagggaacttaaaattatttcaaggtcccagtcgtacgtggcatggagatttatgacaaatatgtaatctgtttatttgtcacccaacttggatgacttctaaatgtttcttctttgtagctcttgattttgcttgggtttcccccgacccatgcccaaatagtaaaaaacaaaacaaaaccaaaaaacaatgtctgagtcatgtttgctccagtcagggaataccaacgtgctgacagacagctctggtttttaaaaaatcttactgtatgtcacttgcaactttgaagaacattcatgcgttagtggactgcatttggaagaaaacaaaaaggagaaaaaaacccccaccaagttgtggctcaagtccctctgccatttgctgcagtgagttttcctattccattttgctggggagaaggcatgctttacagaacacatcaaactgtccgaaaaaggctgtctgcatccctcatgtttataagagaaggatttctttccccttccttcacgtatcaaagaagtcactcggggaggaaataaaccataattaggcatgagcgagcgagcagacagaccccttgctctgccttccctgtccccgcccaccaggcaaccgtcctgggcgcaaccgaggagcgggttgtctccgcagcagctgcagcgagcgcgcgcccacgcccgagcccgcgcccgccgccaggatctgggcggcggcgaggctagcccgggggcgcgctcgctcgggagcgcgctcatgcagcggttttcttctcccacaatccagaggcagctgcacgggaggggcggggagtcggcggaaggatatcggcgcggagggagcagcgcgctccctttgacggcggcccccggcattggcgggcggcgctggcgggcggcgaggggtggggtgtgatgcggcactgcggttctgaggccgttactccggcttctccatagagggcggagaaggctggagcgcggcggtgattttgtgccagggattcccagagacgcgctgaaaggctggcagggcttaggaagctggggggttagggacacacattcaagcccccacccccgggaggggaagggggctggaggcgaggcttgagggcggcggaggaatggtgtctgctcggggggaaggggcgagccctgcctgttggtactgaggggctgcgggcagtggaggctccgcgggtcgaaagcggctccatgcccatcggtgggtggaacgtgtagaggtcggaacgccgaggtcgagtctggtggcgcctcggtatccttaacgtggtctctgtttaacgtatttcatttagcccccgttgggattgattcattgggagcagtttcgctggtctggatcctccaggagctggacaaccttgacgggctttttgtcttgggttccagccccctttcccttcctcctcctccagatgccttttctctgcccctcctcgcccggtacagacatttccagcgcaggctgctgctcgtggtgtccgtcgtcgaagccacttcttgggatttcggctcgtttcactctggggtgttttttgaggagggagagtgcccccctcctccacgatgggatttttctcccttgccgaaatggactttcattgatttctacttacttccacgtttagtgaccaattccctaggcgtatttttgtggtagttccttttttcaaatacatactctgtaaaatggagaacgaaatttttactccccttctggagcagttcatgaccagccctttggtcacttgggttaaaacgtttggacctctggccgcaggaaatgggaccaaccttgatgaatatgtggctttggtggatggggtattcttgaaccaggtcatgctccaaattaatcctaaattggagagtcagagagtaaataaaaaagtcaataatgatgcctcacttagaatgcacaatctatccattttggtgagacagataaaattttattaccaggagactttgcagcaattgatcatgatgtcgttgccaaatgtcttaatcattggcaaaaatcccttttctgaacaaggcacagaagaagttaaaaaactgcttttacttttattgggttgtgcagttcagtgtcagaaaaaagaggaatttattgaaagaattcaaggtttagattttgatacaaaagcagcggttgccgcacatattcaagaggtaactcataatcaggaaaatgtgtttgacctgcaatggatggaagtgactgatatgtcgcaggaggacatagaaccactcttgaaaaatatggcattgcatctaaaaagacttatagatgagagagatgaacattcagagactatcatagaactctctgaagagcgggatggtctccattttctaccccatgcctcttcatctgcacagtcaccctgtggttctccaggcatgaagcgaacagaaagtcgacaacatctgtcggtggaactggcagatgctaaagccaagataagaaggcttaggcaggaattggaggaaaagactgagcagttgttggattgtaaacaagaacttgagcaaatggaaatagaactcaaaaggctgcaacaagagaacatgaatttgctttcggatgctcgctctgccagaatgtaccgagatgaattagatgcacttcgagagaaagcagtcagagtcgataagcttgaaagtgaagtcagcagatataaagagagactacatgatattgaattttataaggcaagagttgaggaattaaaagaagacaatcaagttttattagaaacaaaaaccatgttggaagaccaactagagggaactcgtgctcgttctgataaattacatgaattagaaaaagagaacttacaactgaaagctaaacttcatgatatggaaatggaacgagatatggatagaaaaaagattgaagaattaatggaagaaaatatgactttggaaatggcacagaaacaaagtatggatgaatcattacatcttggctgggaactggaacagatatccagaactagtgaactttccgaagcaccccagaaatccctgggccatgaggtgaatgagttgacatcaagtagattattgaagctagagatggaaaatcaaagtttgacaaaaaccgtagaagagcttcggactactgtggattctgtagaaggcaatgcttccaaaatcctgaaaatggaaaaagaaaatcaaaggctcagtaaaaaggttgagattcttgaaaatgagattgttcaagaaaagcaaagtcttcagaattgtcagaatttaagcaaggatctaatgaaggagaaagctcagcttgaaaaaacaatagaaacactgagagaaaattcagagagacagattaagatactggaacaggaaaatgaacatctgaatcaaacagtgtcttccttaaggcagcggtcccagataagtgcagaagcaagagtgaaagacattgaaaaagaaaacaaaattcttcatgaatctatcaaagaaacaagtagcaagctaagcaagattgaatttgaaaaaagacaaattaaaaaagaattggaacattataaagaaaaaggagaacgagctgaagaacttgaaaatgaattgcatcatcttgaaaaagaaaatgaattattacagaaaaaaataactaatttaaaaattacttgtgaaaaaattgaggccttagaacaagaaaattcagagctagaaagagaaaatagaaaattaaaaaaaacattggatagctttaaaaatctgacctttcagttagaatccctagaaaaagagaattcccaacttgatgaggaaaacttagaactgcgaaggaatgtagaatctttgaagtgtgcaagcatgaaaatggctcagctacagctagaaaacaaagaactggaaagtgaaaaagagcaacttaagaagggtttggagctcctgaaagcatctttcaagaaaacagaacgcttagaagttagctaccagggtttagatatagaaaatcaaagactgcaaaaaactttagagaacagcaataaaaaaatccagcaattagagagtgaactacaagacttagagatggaaaatcaaacattgcagaaaaacctagaagaactaaaaatatctagcaaaagactagaacagctggaaaaagaaaataaatcattagagcaagagacttctcaactggaaaaggataagaaacaattggagaaggaaaataagagactccgacaacaagcagaaattaaagataccacattagaagaaaataatgtgaagattggaaatttggaaaaagaaaacaaaaccctatccaaagaaattggtatatataaagaatcttgtgtccgtctgaaagaactagaaaaagaaaataaggagcttgtgaaaagagcaactattgatataaaaacgttggttacactacgtgaggatttggtgagtgaaaagttgaagacccaacagatgaacaatgatctcgaaaaattaactcatgagcttgagaagatagggttaaataaggagcgactcttacatgatgaacaaagtactgatgacagtaggtataaacttttggaatcaaaattagaatccactcttaagaagtctcttgaaataaaagaagaaaaaattgctgctttagaagctcgattagaagaatccacgaattataaccagcaattgcgccaagaacttaaaacaaatgctacactgcaagcagagaagcaagcgttgaaaactcaactgaagcaacttgagacacagaacaataatttgcaggctcagattcttgcacttcagaggcagacagtgtcattacaagaacagaataccactcttcaaacacagaatgccaagcttcaggttgaaaattccacccttaattcccaaagtacctcactcatgaaccagaatgcccaactcctaatccagcagtcttccttagaaaatgaaaatgaatctgtaatcaaagagcgagaagacctaaaatctctctatgattctctgatcaaagatcatgaaaagctggaacttcttcatgaacgtcaggcttcagagtatgaatctcttatctctaaacatggaactctgaagtctgcccacaaaaatcttgaggtggaacatagagaccttgaagaccgttacaatcagttattaaaacagaaaggacagttggaagatttggaaaaaatgctcaaagtagaacaggaaaaaatgctgcttgaaaataaaaatcatgaaacagtagctgcagaatacaagaaactttgtggtgaaaatgataggctgaatcatacctatagtcaacttttaaaagagactgaagttttacaaactgaccataaaaatttgaaaagtcttctgaataattccaaactggaacaaacaagattagaagctgaattttcaaaactaaaggaacaataccaacaattggatattacatcaaccaagctgaataaccagtgtgagcagggctctgagagtctgagtggaagtccacaggcaacttgaggcctagacttggaactgttacaccatcacttccacctctttctcttggccaaaagcattccaaattcaagaagaaggaaaatagattccacttctttacgggaaaagtgagaagtcacattgcaagagggcataggtacagggaagaaaataaatgcattcagttttttaatgaatctaccacatatgttatgtttcaatttaacaacatacagataaataaaaccaacgtagtatgatattcacagttacagatc

SEQ ID NO: 359948 - DNA, 4689 bp, Homo sapiens
aaggaataatgttaaagacaacattaatgacatttatagaacacttaactataagctgccatttcatttaaccctattattagccctgctttacacgtgacggaatcgaagcacaaagagactcaataacgtgcgtaggctcacacagctggtgcatattggaaccaggcaggaagacttcagagtccaggttctcaactacccaattaagaaattctgctctttcttaactgtgttatgacaaaaacatttttactgctaatttaaaatatatactccgtgtaaatatttatgtaatgtaaacatagcacacattataaaactataatattatcttttatcaaaaaaagattgcgttctatatgcccattttaccccgggaaaaaggtctttattttcctttgaaatgaggagtagcatttgattttgccagggaacttaaaattatttcaaggtcccagtcgtacgtggcatggagatttatgacaaatatgtaatctgtttatttgtcacccaacttggatgacttctaaatgtttcttctttgtagctcttgattttgcttgggtttcccccgacccatgcccaaatagtaaaaaacaaaacaaaaccaaaaaacaatgtctgagtcatgtttgctccagtcagggaataccaacgtgctgacagacagctctggtttttaaaaaatcttactgtatgtcacttgcaactttgaagaacattcatgcgttagtggactgcatttggaagaaaacaaaaaggagaaaaaaacccccaccaagttgtggctcaagtccctctgccatttgctgcagtgagttttcctattccattttgctggggagaaggcatgctttacagaacacatcaaactgtccgaaaaaggctgtctgcatccctcatgtttataagagaaggatttctttccccttccttcacgtatcaaagaagtcactcggggaggaaataaaccataattaggcatgagcgagcgagcagacagaccccttgctctgccttccctgtccccgcccaccaggcaaccgtcctgggcgcaaccgaggagcgggttgtctccgcagcagctgcagcgagcgcgcgcccacgcccgagcccgcgcccgccgccaggatctgggcggcggcgaggctagcccgggggcgcgctcgctcgggagcgcgctcatgcagcggttttcttctcccacaatccagaggcagctgcacgggaggggcggggagtcggcggaaggatatcggcgcggagggagcagcgcgctccctttgacggcggcccccggcattggcgggcggcgctggcgggcggcgaggggtggggtgtgatgcggcactgcggttctgaggccgttactccggcttctccatagagggcggagaaggctggagcgcggcggtgattttgtgccagggattcccagagacgcgctgaaaggctggcagggcttaggaagctggggggttagggacacacattcaagcccccacccccgggaggggaagggggctggaggcgaggcttgagggcggcggaggaatggtgtctgctcggggggaaggggcgagccctgcctgttggtactgaggggctgcgggcagtggaggctccgcgggtcgaaagcggctccatgcccatcggtgggtggaacgtgtagaggtcggaacgccgaggtcgagtctggtggcgcctcggtatccttaacgtggtctctgtttaacgtatttcatttagcccccgttgggattgattcattgggagcagtttcgctggtctggatcctccaggagctggacaaccttgacgggctttttgtcttgggttccagccccctttcccttcctcctcctccagatgccttttctctgcccctcctcgcccggtacagacatttccagcgcaggctgctgctcgtggtgtccgtcgtcgaagccacttcttgggatttcggctcgtttcactctggggtgttttttgaggagggagagtgcccccctcctccacgatgggatttttctcccttgccgaaatggactttcattgatttctacttacttccacgtttagtgaccaattccctaggcgtatttttgtggtagttccttttttcaaatacatactctgtaaaatggagaacgaaatttttactccccttctggagcagttcatgaccagccctttggtcacttgggttaaaacgtttggacctctggccgcaggaaatgggaccaaccttgatgaatatgtggctttggtggatggggtattcttgaaccaggtcatgctccaaattaatcctaaattggagagtcagagagtaaataaaaaagtcaataatgatgcctcacttagaatgcacaatctatccattttggtgagacagataaaattttattaccaggagactttgcagcaattgatcatgatgtcgttgccaaatgtcttaatcattggcaaaaatcccttttctgaacaaggcacagaagaagttaaaaaactgcttttacttttattgggttgtgcagttcagtgtcagaaaaaagaggaatttattgaaagaattcaaggtttagattttgatacaaaagcagcggttgccgcacatattcaagaggtaactcataatcaggaaaatgtgtttgacctgcaatggatggaagtgactgatatgtcgcaggaggacatagaaccactcttgaaaaatatggcattgcatctaaaaagacttatagatgagagagatgaacattcagagactatcatagaactctctgaagagcgggatggtctccattttctaccccatgcctcttcatctgcacagtcaccctgtggttctccaggcatgaagcgaacagaaagtcgacaacatctgtcggtggaactggcagatgctaaagccaagataagaaggcttaggcaggaattggaggaaaagactgagcagttgttggattgtaaacaagaacttgagcaaatggaaatagaactcaaaaggctgcaacaagagaacatgaatttgctttcggatgctcgctctgccagaatgtaccgagatgaattagatgcacttcgagagaaagcagtcagagtcgataagcttgaaagtgaagtcagcagatataaagagagactacatgatattgaattttataaggcaagagttgaggaattaaaagaagacaatcaagttttattagaaacaaaaaccatgttggaagaccaactagagggaactcgtgctcgttctgataaattacatgaattagaaaaagagaacttacaactgaaagctaaacttcatgatatggaaatggaacgagatatggatagaaaaaagattgaagaattaatggaagaaaatatgactttggaaatggcacagaaacaaagtatggatgaatcattacatcttggctgggaactggaacagatatccagaactagtgaactttccgaagcaccccagaaatccctgggccatgaggtgaatgagttgacatcaagtagattattgaagctagagatggaaaatcaaagtttgacaaaaaccgtagaagagcttcggactactgtggattctgtagaaggcaatgcttccaaaatcctgaaaatggaaaaagaaaatcaaaggctcagtaaaaaggttgagattcttgaaaatgagattgttcaagaaaagcaaagtcttcagaattgtcagaatttaagcaaggatctaatgaaggagaaagctcagcttgaaaaaacaatagaaacactgagagaaaattcagagagacagattaagatactggaacaggaaaatgaacatctgaatcaaacagtgtcttccttaaggcagcggtcccagataagtgcagaagcaagagtgaaagacattgaaaaagaaaacaaaattcttcatgaatctatcaaagaaacaagtagcaagctaagcaagattgaatttgaaaaaagacaaattaaaaaagaattggaacattataaagaaaaaggagaacgagctgaagaacttgaaaatgaattgcatcatcttgaaaaagaaaatgaattattacagaaaaaaataactaatttaaaaattacttgtgaaaaaattgaggccttagaacaagaaaattcagagctagaaagagaaaatagaaaattaaaaaaaacattggatagctttaaaaatctgacctttcagttagaatccctagaaaaagagaattcccaacttgatgaggaaaacttagaactgcgaaggaatgtagaatctttgaagtgtgcaagcatgaaaatggctcagctacagctagaaaacaaagaactggaaagtgaaaaagagcaacttaagaagggtttggagctcctgaaagcatctttcaagaaaacagaacgcttagaagttagctaccagggtttagatatagaaaatcaaagactgcaaaaaactttagagaacagcaataaaaaaatccagcaattagagagtgaactacaagacttagagatggaaaatcaaacattgcagaaaaacctagaagaacttgaaaatgaattgcatcatcttgaaaaagaaaatgaattattacagaaaaaaataactaatttaaaaattacttgtgaaaaaattgaggccttagaacaagaaaattcagagctagaaagagaaaatagaaaatt

SEQ ID NO: 359949 - DNA, 3202 bp, Homo sapiens
aaggaataatgttaaagacaacattaatgacatttatagaacacttaactataagctgccatttcatttaaccctattattagccctgctttacacgtgacggaatcgaagcacaaagagactcaataacgtgcgtaggctcacacagctggtgcatattggaaccaggcaggaagacttcagagtccaggttctcaactacccaattaagaaattctgctctttcttaactgtgttatgacaaaaacatttttactgctaatttaaaatatatactccgtgtaaatatttatgtaatgtaaacatagcacacattataaaactataatattatcttttatcaaaaaaagattgcgttctatatgcccattttaccccgggaaaaaggtctttattttcctttgaaatgaggagtagcatttgattttgccagggaacttaaaattatttcaaggtcccagtcgtacgtggcatggagatttatgacaaatatgtaatctgtttatttgtcacccaacttggatgacttctaaatgtttcttctttgtagctcttgattttgcttgggtttcccccgacccatgcccaaatagtaaaaaacaaaacaaaaccaaaaaacaatgtctgagtcatgtttgctccagtcagggaataccaacgtgctgacagacagctctggtttttaaaaaatcttactgtatgtcacttgcaactttgaagaacattcatgcgttagtggactgcatttggaagaaaacaaaaaggagaaaaaaacccccaccaagttgtggctcaagtccctctgccatttgctgcagtgagttttcctattccattttgctggggagaaggcatgctttacagaacacatcaaactgtccgaaaaaggctgtctgcatccctcatgtttataagagaaggatttctttccccttccttcacgtatcaaagaagtcactcggggaggaaataaaccataattaggcatgagcgagcgagcagacagaccccttgctctgccttccctgtccccgcccaccaggcaaccgtcctgggcgcaaccgaggagcgggttgtctccgcagcagctgcagcgagcgcgcgcccacgcccgagcccgcgcccgccgccaggatctgggcggcggcgaggctagcccgggggcgcgctcgctcgggagcgcgctcatgcagcggttttcttctcccacaatccagaggcagctgcacgggaggggcggggagtcggcggaaggatatcggcgcggagggagcagcgcgctccctttgacggcggcccccggcattggcgggcggcgctggcgggcggcgaggggtggggtgtgatgcggcactgcggttctgaggccgttactccggcttctccatagagggcggagaaggctggagcgcggcggtgattttgtgccagggattcccagagacgcgctgaaaggctggcagggcttaggaagctggggggttagggacacacattcaagcccccacccccgggaggggaagggggctggaggcgaggcttgagggcggcggaggaatggtgtctgctcggggggaaggggcgagccctgcctgttggtactgaggggctgcgggcagtggaggctccgcgggtcgaaagcggctccatgcccatcggtgggtggaacgtgtagaggtcggaacgccgaggtcgagtctggtggcgcctcggtatccttaacgtggtctctgtttaacgtatttcatttagcccccgttgggattgattcattgggagcagtttcgctggtctggatcctccaggagctggacaaccttgacgggctttttgtcttgggttccagccccctttcccttcctcctcctccagatgccttttctctgcccctcctcgcccggtacagacatttccagcgcaggctgctgctcgtggtgtccgtcgtcgaagccacttcttgggatttcggctcgtttcactctggggtgttttttgaggagggagagtgcccccctcctccacgatgggatttttctcccttgccgaaatggactttcattgatttctacttacttccacgtttagtgaccaattccctaggcgtatttttgtggtagttccttttttcaaatacatactctgtaaaatggagaacgaaatttttactccccttctggagcagttcatgaccagccctttggtcacttgggttaaaacgtttggacctctggccgcaggaaatgggaccaaccttgatgaatatgtggctttggtggatggggtattcttgaaccaggtcatgctccaaattaatcctaaattggagagtcagagagtaaataaaaaagtcaataatgatgcctcacttagaatgcacaatctatccattttggtgagacagataaaattttattaccaggagactttgcagcaattgatcatgatgtcgttgccaaatgtcttaatcattggcaaaaatcccttttctgaacaaggcacagaagaagttaaaaaactgcttttacttttattgggttgtgcagttcagtgtcagaaaaaagaggaatttattgaaagaattcaaggtttagattttgatacaaaagcagcggttgccgcacatattcaagaggtaactcataatcaggaaaatgtgtttgacctgcaatggatggaagtgactgatatgtcgcaggaggacatagaaccactcttgaaaaatatggcattgcatctaaaaagacttatagatgagagagatgaacattcagagactatcatagaactctctgaagagcgggatggtctccattttctaccccatgcctcttcatctgcacagtcaccctgtggttctccaggcatgaagcgaacagaaagtcgacaacatctgtcggtggaactggcagatgctaaagccaagataagaaggcttaggcaggaattgtaagttgctgatttttgaggttcattgaatttatatggtcccaaaggtgacctaaacaatatttttaagcttatggaaatattgctagcttgtgtcagtgttttcacaagtaaatgagaaaaataaggaggttggcataaggttttcctattgttaaatcttaacagtttaaaggatgccttttattctggatttatggcctttctagcattctagtatgtatttttttaaataaaataatgtcctcatttggca

SEQ ID NO: 359950 - DNA, 757 bp, Homo sapiens
caaaaattatctctgattgtctgtcattctcattcttatagaaatacctggtgcatgctgttcttatagtggctgctctgtattttgtgtctctcttatctttaagcttttcttatattttctttcttctttctaccttccaactaaatacagagagaaaagtgtccttcagtttctcagtatgaagcctttatttctgaagtaacaagacacctagcaactataggaatcatttttaaaaatctttaaggagacttttaacagtccttcgtgaatagagcaggcaagaaatacaaaccttcattccttgaatcaaggagcactactggattcaactgccaaaattttttaaaggttttaggacttactataccttgtactgttaagatctactgaataaaggacgttctctcactaaggaccaggtgttttaaggttaagtgtttaaagaagtactccaagaacaatctgcttttttcatcatttgttttatgaatttatccatgtttgcttaatgcttctgctaagtgttagccaaaatctagccatttatatttagttgtgtaaacctaaattaaatgctgtagtattttgtggaatgtactatatagcaagatacagagaaaattgttttggcatgtcagagccttatttggttagcagactgcatgtgttgatactttttttttcttaaagccaattattttgatgcaaaagaaattcagtttataagataaatctgaaaaatccataatga

SEQ ID NO: 359951 - DNA, 10619 bp, Homo sapiens
aaggaataatgttaaagacaacattaatgacatttatagaacacttaactataagctgccatttcatttaaccctattattagccctgctttacacgtgacggaatcgaagcacaaagagactcaataacgtgcgtaggctcacacagctggtgcatattggaaccaggcaggaagacttcagagtccaggttctcaactacccaattaagaaattctgctctttcttaactgtgttatgacaaaaacatttttactgctaatttaaaatatatactccgtgtaaatatttatgtaatgtaaacatagcacacattataaaactataatattatcttttatcaaaaaaagattgcgttctatatgcccattttaccccgggaaaaaggtctttattttcctttgaaatgaggagtagcatttgattttgccagggaacttaaaattatttcaaggtcccagtcgtacgtggcatggagatttatgacaaatatgtaatctgtttatttgtcacccaacttggatgacttctaaatgtttcttctttgtagctcttgattttgcttgggtttcccccgacccatgcccaaatagtaaaaaacaaaacaaaaccaaaaaacaatgtctgagtcatgtttgctccagtcagggaataccaacgtgctgacagacagctctggtttttaaaaaatcttactgtatgtcacttgcaactttgaagaacattcatgcgttagtggactgcatttggaagaaaacaaaaaggagaaaaaaacccccaccaagttgtggctcaagtccctctgccatttgctgcagtgagttttcctattccattttgctggggagaaggcatgctttacagaacacatcaaactgtccgaaaaaggctgtctgcatccctcatgtttataagagaaggatttctttccccttccttcacgtatcaaagaagtcactcggggaggaaataaaccataattaggcatgagcgagcgagcagacagaccccttgctctgccttccctgtccccgcccaccaggcaaccgtcctgggcgcaaccgaggagcgggttgtctccgcagcagctgcagcgagcgcgcgcccacgcccgagcccgcgcccgccgccaggatctgggcggcggcgaggctagcccgggggcgcgctcgctcgggagcgcgctcatgcagcggttttcttctcccacaatccagaggcagctgcacgggaggggcggggagtcggcggaaggatatcggcgcggagggagcagcgcgctccctttgacggcggcccccggcattggcgggcggcgctggcgggcggcgaggggtggggtgtgatgcggcactgcggttctgaggccgttactccggcttctccatagagggcggagaaggctggagcgcggcggtgattttgtgccagggattcccagagacgcgctgaaaggctggcagggcttaggaagctggggggttagggacacacattcaagcccccacccccgggaggggaagggggctggaggcgaggcttgagggcggcggaggaatggtgtctgctcggggggaaggggcgagccctgcctgttggtactgaggggctgcgggcagtggaggctccgcgggtcgaaagcggctccatgcccatcggtgggtggaacgtgtagaggtcggaacgccgaggtcgagtctggtggcgcctcggtatccttaacgtggtctctgtttaacgtatttcatttagcccccgttgggattgattcattgggagcagtttcgctggtctggatcctccaggagctggacaaccttgacgggctttttgtcttgggttccagccccctttcccttcctcctcctccagatgccttttctctgcccctcctcgcccggtacagacatttccagcgcaggctgctgctcgtggtgtccgtcgtcgaagccacttcttgggatttcggctcgtttcactctggggtgttttttgaggagggagagtgcccccctcctccacgatgggatttttctcccttgccgaaatggactttcattgatttctacttacttccacgtttagtgaccaattccctaggcgtatttttgtggtagttccttttttcaaatacatactctgtaaaatggagaacgaaatttttactccccttctggagcagttcatgaccagccctttggtcacttgggttaaaacgtttggacctctggccgcaggaaatgggaccaaccttgatgaatatgtggctttggtggatggggtattcttgaaccaggtcatgctccaaattaatcctaaattggagagtcagagagtaaataaaaaagtcaataatgatgcctcacttagaatgcacaatctatccattttggtgagacagataaaattttattaccaggagactttgcagcaattgatcatgatgtcgttgccaaatgtcttaatcattggcaaaaatcccttttctgaacaaggcacagaagaagttaaaaaactgcttttacttttattgggttgtgcagttcagtgtcagaaaaaagaggaatttattgaaagaattcaaggtttagattttgatacaaaagcagcggttgccgcacatattcaagaggtaactcataatcaggaaaatgtgtttgacctgcaatggatggaagtgactgatatgtcgcaggaggacatagaaccactcttgaaaaatatggcattgcatctaaaaagacttatagatgagagagatgaacattcagagactatcatagaactctctgaagagcgggatggtctccattttctaccccatgcctcttcatctgcacagtcaccctgtggttctccaggcatgaagcgaacagaaagtcgacaacatctgtcggtggaactggcagatgctaaagccaagataagaaggcttaggcaggaattggaggaaaagactgagcagttgttggattgtaaacaagaacttgagcaaatggaaatagaactcaaaaggctgcaacaagagaacatgaatttgctttcggatgctcgctctgccagaatgtaccgagatgaattagatgcacttcgagagaaagcagtcagagtcgataagcttgaaagtgaagtcagcagatataaagagagactacatgatattgaattttataaggcaagagttgaggaattaaaagaagacaatcaagttttattagaaacaaaaaccatgttggaagaccaactagagggaactcgtgctcgttctgataaattacatgaattagaaaaagagaacttacaactgaaagctaaacttcatgatatggaaatggaacgagatatggatagaaaaaagattgaagaattaatggaagaaaatatgactttggaaatggcacagaaacaaagtatggatgaatcattacatcttggctgggaactggaacagatatccagaactagtgaactttccgaagcaccccagaaatccctgggccatgaggtgaatgagttgacatcaagtagattattgaagctagagatggaaaatcaaagtttgacaaaaaccgtagaagagcttcggactactgtggattctgtagaaggcaatgcttccaaaatcctgaaaatggaaaaagaaaatcaaaggctcagtaaaaaggttgagattcttgaaaatgagattgttcaagaaaagcaaagtcttcagaattgtcagaatttaagcaaggatctaatgaaggagaaagctcagcttgaaaaaacaatagaaacactgagagaaaattcagagagacagattaagatactggaacaggaaaatgaacatctgaatcaaacagtgtcttccttaaggcagcggtcccagataagtgcagaagcaagagtgaaagacattgaaaaagaaaacaaaattcttcatgaatctatcaaagaaacaagtagcaagctaagcaagattgaatttgaaaaaagacaaattaaaaaagaattggaacattataaagaaaaaggagaacgagctgaagaacttgaaaatgaattgcatcatcttgaaaaagaaaatgaattattacagaaaaaaataactaatttaaaaattacttgtgaaaaaattgaggccttagaacaagaaaattcagagctagaaagagaaaatagaaaattaaaaaaaacattggatagctttaaaaatctgacctttcagttagaatccctagaaaaagagaattcccaacttgatgaggaaaacttagaactgcgaaggaatgtagaatctttgaagtgtgcaagcatgaaaatggctcagctacagctagaaaacaaagaactggaaagtgaaaaagagcaacttaagaagggtttggagctcctgaaagcatctttcaagaaaacagaacgcttagaagttagctaccagggtttagatatagaaaatcaaagactgcaaaaaactttagagaacagcaataaaaaaatccagcaattagagagtgaactacaagacttagagatggaaaatcaaacattgcagaaaaacctagaagaactaaaaatatctagcaaaagactagaacagctggaaaaagaaaataaatcattagagcaagagacttctcaactggaaaaggataagaaacaattggagaaggaaaataagagactccgacaacaagcagaaattaaagataccacattagaagaaaataatgtgaagattggaaatttggaaaaagaaaacaaaaccctatccaaagaaattggtatatataaagaatcttgtgtccgtctgaaagaactagaaaaagaaaataaggagcttgtgaaaagagcaactattgatataaaaacgttggttacactacgtgaggatttggtgagtgaaaagttgaagacccaacagatgaacaatgatctcgaaaaattaactcatgagcttgagaagatagggttaaataaggagcgactcttacatgatgaacaaagtactgatgacagtaggtataaacttttggaatcaaaattagaatccactcttaagaagtctcttgaaataaaagaagaaaaaattgctgctttagaagctcgattagaagaatccacgaattataaccagcaattgcgccaagaacttaaaacaaatgctacactgcaagcagagaagcaagcgttgaaaactcaactgaagcaacttgagacacagaacaataatttgcaggctcagattcttgcacttcagaggcagacagtgtcattacaagaacagaataccactcttcaaacacagaatgccaagcttcaggttgaaaattccacccttaattcccaaagtacctcactcatgaaccagaatgcccaactcctaatccagcagtcttccttagaaaatgaaaatgaatctgtaatcaaagagcgagaagacctaaaatctctctatgattctctgatcaaagatcatgaaaagctggaacttcttcatgaacgtcaggcttcagagtatgaatctcttatctctaaacatggaactctgaagtctgcccacaaaaatcttgaggtggaacatagagaccttgaagaccgttacaatcagttattaaaacagaaaggacagttggaagatttggaaaaaatgctcaaagtagaacaggaaaaaatgctgcttgaaaataaaaatcatgaaacagtagctgcagaatacaagaaactttgtggtgaaaatgataggctgaatcatacctatagtcaacttttaaaagagactgaagttttacaaactgaccataaaaatttgaaaagtcttctgaataattccaaactggaacaaacaagattagaagctgaattttcaaaactaaaggaacaataccaacaattggatattacatcaaccaagctgaataaccagtgtgagttgctaagccaacttaaaggaaatttagaagaagaaaatcggcatctactagatcaaattcagacattaatgctacagaacagaacacttttggagcagaatatggaaagcaaggatctttttcatgttgaacaaagacagtacattgataagttaaatgaattaagacgtcagaaggagaaactagaagagaaaattatggatcaatacaaattttatgacccatctcctcctagaaggagaggcaactggattactctaaaaatgagaaaattgataaagtctaagaaagatattaatcgggaacgccagaaatctctaacattaacacccacccgctcagactccagtgaaggatttcttcagctccctcatcaagacagtcaagatagttcttcagtaggttcaaactctttagaagatggccagaccttggggaccaagaaaagcagcaccatgaatgacctggtgcagtccatggtcctagcaggacagtggacaggtagtactgagaatttggaggttcctgatgatatttcaacgggtaaaaggagaaaagaattgggagctatggccttctctactacagccatcaacttttcaactgtcaactcttctgcaggcttcagatccaagcagttggttaataataaagatactacatcctttgaagacataagtccacaaggtgttagtgatgattctagtacgggatcaagagttcatgcttcaagaccagccagccttgatagtggcagaacatccactagcaatagcaataataatgcttcactacatgaagtcaaagcaggtgcagttaataaccaaagcaggccacaaagccacagcagtggagaatttagcctgcttcatgaccatgaggcttggtccagcagtggtagcagtccaatccagtacttgaaaagacagaccagatcaagcccagtgctccagcacaaaatatctgaaacactggagagtcgacatcacaagatcaaaactggttcccctggaagtgaagttgttactctacaacagtttttggaagaaagcaataagcttacctcagtacagataaagtcctcaagtcaagagaatcttttagatgaagtaatgaaaagtttgtctgtctcttctgactttttgggaaaagacaaaccagttagctgtggtctggccaggtcagtaagtggaaaaaccccaggggacttctatgatagacggacaactaagcctgagtttttgagacctggtcctcgaaaaactgaagatacctacttcattagttctgcgggaaaacctacaccaggcactcaaggaaaaataaaattagtaaaagaatcttctctgtcacgacaatcaaaagatagtaacccttatgcaactttacctcgtgcaagcagcgtgatctcaactgccgaaggaactacacgaaggacaagcatccatgattttttgaccaaggacagtagactgcctatatcagttgattcaccaccagctgctgctgacagcaacaccactgcagcatctaatgtggacaaagtacaagaaagcagaaattcaaaaagcaggtctagggagcaacaaagctcctaattctattacccactacatgacatgtgggccaagtgagagaaaagtgtccttcagtttctcagtatgaagcctttatttctgaagtaacaagacacctagcaactataggaatcatttttaaaaatctttaaggagacttttaacagtccttcgtgaatagagcaggcaagaaatacaaaccttcattccttgaatcaaggagcactactggattcaactgccaaaattttttaaaggttttaggacttactataccttgtactgttaagatctactgaataaaggacgttctctcactaaggaccaggtgttttaaggttaagtgtttaaagaagtactccaagaacaatctgcttttttcatcatttgttttatgaatttatccatgtttgcttaatgcttctgctaagtgttagccaaaatctagccatttatatttagttgtgtaaacctaaattaaatgctgtagtattttgtggaatgtactatatagcaagatacagagaaaattgttttggcatgtcagagccttatttggttagcagactgcatgtgttgatactttttttttcttaaagccaattattttgatgcaaaagaaattcagtttataagataaatctgaaaaatccataatgaaataggagttataaaaaatttatagtgatattaatctttccatatttcccattaagcaacactaagcattcataagttaacccatggtaaagagtgtttttctgaaacttttttttagtaagatggtttttcagcaaatggcattcccaagataaagctgttgtgctttaactcatttcttttctttggtattgggttatgtatgcgtgtgcatttttttaacttgagagctgactgttgcttaagaagttttcttatggcaaaaataatgtaaataagttactatgatctgcattttgccagaaactcatttataattaaggctatcatttattaatgatttttttctcctttatgatattacattaaagttgataactgttattggtacttttgaaatatttgtatgcatttgttacctttaaacatttggaagaagcacaaaaaaatagatttagttaacccagggaaacatcaatttttttagtagttccaattttatatcacagttttattttcttatgaaatcaaaaaatgcattgatactcattaatgcaaattcattatttaacatcaatatcagagtaatcttcaaggtctgaaatgagaaacatactgactttttaaaattttaacagtgtacttcttaggctttcattaccagctctgaagaactttttggaataattccatattccatagtgtgtggtttatgagttgtgggtttcatcactaacccagtaaccataagaaaagtctctctctctctctctctctctttctctctccctctttctctctctctttcgtaggccagtagcaatgttgtgttcacagtctaatttccaaaagaccatcaataaaaaagagagcatgtttaaattgaaatggaacttagagaacttgagcttacttacgtacttcaatgccaccggtaacttaggttttaccaccaaatgctgttaacattaaatcattttgaaaatcttggatgaaaggtgctatgtaaatggaaatacaaaggattcttactaacatacaaaaataatgcacaacagaaatatctaaaaccttttccgtagactttgaaacatctctctctgtcataactccctggattcaagtagcacattggtaataggtatcagagcagtctagagacaattgcatgtcaaaaaatgtacattcatttttaggtgggataaaagtaaacatagaaattatgttatggctaaatacagttagtgggtaacttagatttatattagctagcatctaatttgcacaactagaacacatcccagaacaattactgaaaagctgaaatttaatgggtggtgatgtagcccaatgagggcgaatgacattccagcttgacctctccagaacactaatatcctaaaatacagaacatgctgggttaagtgcattagtgcttcaagcagaaaatgctgaaaacaacgtgtaaagtactgaatctgagtaggctgaccctgagaagggacaattaaagagacaaccaagggaacacattgagactacaaaaatatgaataatctcaattatattcatcacacttttttcataccatttcaagaaacgactagacagtagtaaccacatgaatattttactttctccagtataccttgagaagcaaactttgtaggaagccactcttctcccctaaacaacttctgccaaacaataataaagccaactggaaacgaatcggagccattttcattttcctaaccggggcctgacatgctttaaattatctggctgtattctaaatcaacacctaacccctcaaggaaactgaagaatcaatatacagggtaatagctttggctcagagctccaataatgtgcttcagatctgtccatgtggaaatgctttcatccaaatttttaaattggtggttaccaaagagttcacaaaacaggtttgtatgtagcacctttcatgcaaggcatgcaaaaagcctattttaaaatcactgtgcatattatagagttgtagccacctcacaatgaagtactacagcctgtgctgtcttaatggtttatgtcaggaaatgaaaaagatactgtaccaaatctggaattacaatggggagtaataatgtatactaaatgacttttgtattttaagttactttttgtgagtggtgaatttttgtgtttttcttttcagctacacttagtcctgagatgtattttttctttaagtcttgaatgaatacaaaaggagcccattttataatataaaccttgatgtacatgttgagatatttggacaatgaaaatgccttaaaaggaatgcatatggataaagttgcacttataacacccttcaacaaaatctaattttaaattgtctttttcttttctattaagggttttctttttcagtgtctaccattgtacttataactgttattaaataccaaatcaaataata

SEQ ID NO: 359952 - DNA, 10903 bp, Homo sapiens
aaggaataatgttaaagacaacattaatgacatttatagaacacttaactataagctgccatttcatttaaccctattattagccctgctttacacgtgacggaatcgaagcacaaagagactcaataacgtgcgtaggctcacacagctggtgcatattggaaccaggcaggaagacttcagagtccaggttctcaactacccaattaagaaattctgctctttcttaactgtgttatgacaaaaacatttttactgctaatttaaaatatatactccgtgtaaatatttatgtaatgtaaacatagcacacattataaaactataatattatcttttatcaaaaaaagattgcgttctatatgcccattttaccccgggaaaaaggtctttattttcctttgaaatgaggagtagcatttgattttgccagggaacttaaaattatttcaaggtcccagtcgtacgtggcatggagatttatgacaaatatgtaatctgtttatttgtcacccaacttggatgacttctaaatgtttcttctttgtagctcttgattttgcttgggtttcccccgacccatgcccaaatagtaaaaaacaaaacaaaaccaaaaaacaatgtctgagtcatgtttgctccagtcagggaataccaacgtgctgacagacagctctggtttttaaaaaatcttactgtatgtcacttgcaactttgaagaacattcatgcgttagtggactgcatttggaagaaaacaaaaaggagaaaaaaacccccaccaagttgtggctcaagtccctctgccatttgctgcagtgagttttcctattccattttgctggggagaaggcatgctttacagaacacatcaaactgtccgaaaaaggctgtctgcatccctcatgtttataagagaaggatttctttccccttccttcacgtatcaaagaagtcactcggggaggaaataaaccataattaggcatgagcgagcgagcagacagaccccttgctctgccttccctgtccccgcccaccaggcaaccgtcctgggcgcaaccgaggagcgggttgtctccgcagcagctgcagcgagcgcgcgcccacgcccgagcccgcgcccgccgccaggatctgggcggcggcgaggctagcccgggggcgcgctcgctcgggagcgcgctcatgcagcggttttcttctcccacaatccagaggcagctgcacgggaggggcggggagtcggcggaaggatatcggcgcggagggagcagcgcgctccctttgacggcggcccccggcattggcgggcggcgctggcgggcggcgaggggtggggtgtgatgcggcactgcggttctgaggccgttactccggcttctccatagagggcggagaaggctggagcgcggcggtgattttgtgccagggattcccagagacgcgctgaaaggctggcagggcttaggaagctggggggttagggacacacattcaagcccccacccccgggaggggaagggggctggaggcgaggcttgagggcggcggaggaatggtgtctgctcggggggaaggggcgagccctgcctgttggtactgaggggctgcgggcagtggaggctccgcgggtcgaaagcggctccatgcccatcggtgggtggaacgtgtagaggtcggaacgccgaggtcgagtctggtggcgcctcggtatccttaacgtggtctctgtttaacgtatttcatttagcccccgttgggattgattcattgggagcagtttcgctggtctggatcctccaggagctggacaaccttgacgggctttttgtcttgggttccagccccctttcccttcctcctcctccagatgccttttctctgcccctcctcgcccggtacagacatttccagcgcaggctgctgctcgtggtgtccgtcgtcgaagccacttcttgggatttcggctcgtttcactctggggtgttttttgaggagggagagtgcccccctcctccacgatgggatttttctcccttgccgaaatggactttcattgatttctacttacttccacgtttagtgaccaattccctaggcgtatttttgtggtagttccttttttcaaatacatactctgtaaaatggagaacgaaatttttactccccttctggagcagttcatgaccagccctttggtcacttgggttaaaacgtttggacctctggccgcaggaaatgggaccaaccttgatgaatatgtggctttggtggatggggtattcttgaaccaggtcatgctccaaattaatcctaaattggagagtcagagagtaaataaaaaagtcaataatgatgcctcacttagaatgcacaatctatccattttggtgagacagataaaattttattaccaggagactttgcagcaattgatcatgatgtcgttgccaaatgtcttaatcattggcaaaaatcccttttctgaacaaggcacagaagaagttaaaaaactgcttttacttttattgggttgtgcagttcagtgtcagaaaaaagaggaatttattgaaagaattcaaggtttagattttgatacaaaagcagcggttgccgcacatattcaagaggtaactcataatcaggaaaatgtgtttgacctgcaatggatggaagtgactgatatgtcgcaggaggacatagaaccactcttgaaaaatatggcattgcatctaaaaagacttatagatgagagagatgaacattcagagactatcatagaactctctgaagagcgggatggtctccattttctaccccatgcctcttcatctgcacagtcaccctgtggttctccaggcatgaagcgaacagaaagtcgacaacatctgtcggtggaactggcagatgctaaagccaagataagaaggcttaggcaggaattggaggaaaagactgagcagttgttggattgtaaacaagaacttgagcaaatggaaatagaactcaaaaggctgcaacaagagaacatgaatttgctttcggatgctcgctctgccagaatgtaccgagatgaattagatgcacttcgagagaaagcagtcagagtcgataagcttgaaagtgaagtcagcagatataaagagagactacatgatattgaattttataaggcaagagttgaggaattaaaagaagacaatcaagttttattagaaacaaaaaccatgttggaagaccaactagagggaactcgtgctcgttctgataaattacatgaattagaaaaagagaacttacaactgaaagctaaacttcatgatatggaaatggaacgagatatggatagaaaaaagattgaagaattaatggaagaaaatatgactttggaaatggcacagaaacaaagtatggatgaatcattacatcttggctgggaactggaacagatatccagaactagtgaactttccgaagcaccccagaaatccctgggccatgaggtgaatgagttgacatcaagtagattattgaagctagagatggaaaatcaaagtttgacaaaaaccgtagaagagcttcggactactgtggattctgtagaaggcaatgcttccaaaatcctgaaaatggaaaaagaaaatcaaaggctcagtaaaaaggttgagattcttgaaaatgagattgttcaagaaaagcaaagtcttcagaattgtcagaatttaagcaaggatctaatgaaggagaaagctcagcttgaaaaaacaatagaaacactgagagaaaattcagagagacagattaagatactggaacaggaaaatgaacatctgaatcaaacagtgtcttccttaaggcagcggtcccagataagtgcagaagcaagagtgaaagacattgaaaaagaaaacaaaattcttcatgaatctatcaaagaaacaagtagcaagctaagcaagattgaatttgaaaaaagacaaattaaaaaagaattggaacattataaagaaaaaggagaacgagctgaagaacttgaaaatgaattgcatcatcttgaaaaagaaaatgaattattacagaaaaaaataactaatttaaaaattacttgtgaaaaaattgaggccttagaacaagaaaattcagagctagaaagagaaaatagaaaattaaaaaaaacattggatagctttaaaaatctgacctttcagttagaatccctagaaaaagagaattcccaacttgatgaggaaaacttagaactgcgaaggaatgtagaatctttgaagtgtgcaagcatgaaaatggctcagctacagctagaaaacaaagaactggaaagtgaaaaagagcaacttaagaagggtttggagctcctgaaagcatctttcaagaaaacagaacgcttagaagttagctaccagggtttagatatagaaaatcaaagactgcaaaaaactttagagaacagcaataaaaaaatccagcaattagagagtgaactacaagacttagagatggaaaatcaaacattgcagaaaaacctagaagaactaaaaatatctagcaaaagactagaacagctggaaaaagaaaataaatcattagagcaagagacttctcaactggaaaaggataagaaacaattggagaaggaaaataagagactccgacaacaagcagaaattaaagataccacattagaagaaaataatgtgaagattggaaatttggaaaaagaaaacaaaaccctatccaaagaaattggtatatataaagaatcttgtgtccgtctgaaagaactagaaaaagaaaataaggagcttgtgaaaagagcaactattgatataaaaacgttggttacactacgtgaggatttggtgagtgaaaagttgaagacccaacagatgaacaatgatctcgaaaaattaactcatgagcttgagaagatagggttaaataaggagcgactcttacatgatgaacaaagtactgatgacagtaggtataaacttttggaatcaaaattagaatccactcttaagaagtctcttgaaataaaagaagaaaaaattgctgctttagaagctcgattagaagaatccacgaattataaccagcaattgcgccaagaacttaaaacaaatgctacactgcaagcagagaagcaagcgttgaaaactcaactgaagcaacttgagacacagaacaataatttgcaggctcagattcttgcacttcagaggcagacagtgtcattacaagaacagaataccactcttcaaacacagaatgccaagcttcaggttgaaaattccacccttaattcccaaagtacctcactcatgaaccagaatgcccaactcctaatccagcagtcttccttagaaaatgaaaatgaatctgtaatcaaagagcgagaagacctaaaatctctctatgattctctgatcaaagatcatgaaaagctggaacttcttcatgaacgtcaggcttcagagtatgaatctcttatctctaaacatggaactctgaagtctgcccacaaaaatcttgaggtggaacatagagaccttgaagaccgttacaatcagttattaaaacagaaaggacagttggaagatttggaaaaaatgctcaaagtagaacaggaaaaaatgctgcttgaaaataaaaatcatgaaacagtagctgcagaatacaagaaactttgtggtgaaaatgataggctgaatcatacctatagtcaacttttaaaagagactgaagttttacaaactgaccataaaaatttgaaaagtcttctgaataattccaaactggaacaaacaagattagaagctgaattttcaaaactaaaggaacaataccaacaattggatattacatcaaccaagctgaataaccagtgtgagttgctaagccaacttaaaggaaatttagaagaagaaaatcggcatctactagatcaaattcagacattaatgctacagaacagaacacttttggagcagaatatggaaagcaaggatctttttcatgttgaacaaagacagtacattgataagttaaatgaattaagacgtcagaaggagaaactagaagagaaaattatggatcaatacaaattttatgacccatctcctcctagaaggagaggcaactggattactctaaaaatgagaaaattgataaagtctaagaaagatattaatcgggaacgccagaaatctctaacattaacacccacccgctcagactccagtgaaggatttcttcagctccctcatcaagacagtcaagatagttcttcagtaggttcaaactctttagaagatggccagaccttggggaccaagaaaagcagcatggttgcactgaaaagactgccctttttgaggaacagaccgaaggataaagacaaaatgaaggcctgctaccgtcgttccatgtccatgaatgacctggtgcagtccatggtcctagcaggacagtggacaggtagtactgagaatttggaggttcctgatgatatttcaacgggtaaaaggagcaactcttctgcaggcttcagatccaagcagttggttaataataaagatactacatcctttgaagacataagtccacaaggtgttagtgatgattctagtacgggatcaagagttcatgcttcaagaccagccagccttgatagtggcagaacatccactagcaatagcaataataatgcttcactacatgaagtcaaagcaggtgcagttaataaccaaagcaggccacaaagccacagcagtggagaatttagcctgcttcatgaccatgaggcttggtccagcagtggtagcagtccaatccagtacttgaaaagacagaccagatcaagcccagtgctccagcacaaaatatctgaaacactggagagtcgacatcacaagatcaaaactggttcccctggaagtgaagttgttactctacaacagtttttggaagaaagcaataagcttacctcagtacagataaagtcctcaagtcaagagaatcttttagatgaagtaatgaaaagtttgtctgtctcttctgactttttgggaaaagacaaaccagttagctgtggtctggccaggtcagtaagtggaaaaaccccaggggacttctatgatagacggacaactaagcctgagtttttgagacctggtcctcgaaaaactgaagatacctacttcattagttctgcgggaaaacctacaccaggcactcaaggaaaaataaaattagtaaaagaatcttctctgtcacgacaatcaaaagatagtaacccttatgcaactttacctcgtgcaagcagcgtgatctcaactgccgaaggaactacacgaaggacaagcatccatgattttttgaccaaggacagtagactgcctatatcagttgattcaccaccagctgctgctgacagcaacaccactgcagcatctaatgtggacaaagtacaagaaagcagaaattcaaaaagcaggtctagggagcaacaaagctcctaattctattacccactacatgacatgtgggccaagtgagagaaaagtgtccttcagtttctcagtatgaagcctttatttctgaagtaacaagacacctagcaactataggaatcatttttaaaaatctttaaggagacttttaacagtccttcgtgaatagagcaggcaagaaatacaaaccttcattccttgaatcaaggagcactactggattcaactgccaaaattttttaaaggttttaggacttactataccttgtactgttaagatctactgaataaaggacgttctctcactaaggaccaggtgttttaaggttaagtgtttaaagaagtactccaagaacaatctgcttttttcatcatttgttttatgaatttatccatgtttgcttaatgcttctgctaagtgttagccaaaatctagccatttatatttagttgtgtaaacctaaattaaatgctgtagtattttgtggaatgtactatatagcaagatacagagaaaattgttttggcatgtcagagccttatttggttagcagactgcatgtgttgatactttttttttcttaaagccaattattttgatgcaaaagaaattcagtttataagataaatctgaaaaatccataatgaaataggagttataaaaaatttatagtgatattaatctttccatatttcccattaagcaacactaagcattcataagttaacccatggtaaagagtgtttttctgaaacttttttttagtaagatggtttttcagcaaatggcattcccaagataaagctgttgtgctttaactcatttcttttctttggtattgggttatgtatgcgtgtgcatttttttaacttgagagctgactgttgcttaagaagttttcttatggcaaaaataatgtaaataagttactatgatctgcattttgccagaaactcatttataattaaggctatcatttattaatgatttttttctcctttatgatattacattaaagttgataactgttattggtacttttgaaatatttgtatgcatttgttacctttaaacatttggaagaagcacaaaaaaatagatttagttaacccagggaaacatcaatttttttagtagttccaattttatatcacagttttattttcttatgaaatcaaaaaatgcattgatactcattaatgcaaattcattatttaacatcaatatcagagtaatcttcaaggtctgaaatgagaaacatactgactttttaaaattttaacagtgtacttcttaggctttcattaccagctctgaagaactttttggaataattccatattccatagtgtgtggtttatgagttgtgggtttcatcactaacccagtaaccataagaaaagtctctctctctctctctctctctttctctctccctctttctctctctctttcgtaggccagtagcaatgttgtgttcacagtctaatttccaaaagaccatcaataaaaaagagagcatgtttaaattgaaatggaacttagagaacttgagcttacttacgtacttcaatgccaccggtaacttaggttttaccaccaaatgctgttaacattaaatcattttgaaaatcttggatgaaaggtgctatgtaaatggaaatacaaaggattcttactaacatacaaaaataatgcacaacagaaatatctaaaaccttttccgtagactttgaaacatctctctctgtcataactccctggattcaagtagcacattggtaataggtatcagagcagtctagagacaattgcatgtcaaaaaatgtacattcatttttaggtgggataaaagtaaacatagaaattatgttatggctaaatacagttagtgggtaacttagatttatattagctagcatctaatttgcacaactagaacacatcccagaacaattactgaaaagctgaaatttaatgggtggtgatgtagcccaatgagggcgaatgacattccagcttgacctctccagaacactaatatcctaaaatacagaacatgctgggttaagtgcattagtgcttcaagcagaaaatgctgaaaacaacgtgtaaagtactgaatctgagtaggctgaccctgagaagggacaattaaagagacaaccaagggaacacattgagactacaaaaatatgaataatctcaattatattcatcacacttttttcataccatttcaagaaacgactagacagtagtaaccacatgaatattttactttctccagtataccttgagaagcaaactttgtaggaagccactcttctcccctaaacaacttctgccaaacaataataaagccaactggaaacgaatcggagccattttcattttcctaaccggggcctgacatgctttaaattatctggctgtattctaaatcaacacctaacccctcaaggaaactgaagaatcaatatacagggtaatagctttggctcagagctccaataatgtgcttcagatctgtccatgtggaaatgctttcatccaaatttttaaattggtggttaccaaagagttcacaaaacaggtttgtatgtagcacctttcatgcaaggcatgcaaaaagcctattttaaaatcactgtgcatattatagagttgtagccacctcacaatgaagtactacagcctgtgctgtcttaatggtttatgtcaggaaatgaaaaagatactgtaccaaatctggaattacaatggggagtaataatgtatactaaatgacttttgtattttaagttactttttgtgagtggtgaatttttgtgtttttcttttcagctacacttagtcctgagatgtattttttctttaagtcttgaatgaatacaaaaggagcccattttataatataaaccttgatgtacatgttgagatatttggacaatgaaaatgccttaaaaggaatgcatatggataaagttgcacttataacacccttcaacaaaatctaattttaaattgtctttttcttttctattaagggttttctttttcagtgtctaccattgtacttataactgttattaaataccaaatcaaataatataaaagctgtaacatttcctttaaaactaatgctaataagggatttagagttgaatggcaaaatgtttattacttggcaatacctgatgtcagtcacaggcatccaactcatgacaagagataccactgtttgttttttaaaaaacatttttcattttgtttctccttcaaaaattaagttggactaacattcacgtatcaaactaatataaaaagaaataaaaccaagaggtgatttttgtaaaaactggtta

SEQ ID NO: 359953 - DNA, 10848 bp, Homo sapiens
aaggaataatgttaaagacaacattaatgacatttatagaacacttaactataagctgccatttcatttaaccctattattagccctgctttacacgtgacggaatcgaagcacaaagagactcaataacgtgcgtaggctcacacagctggtgcatattggaaccaggcaggaagacttcagagtccaggttctcaactacccaattaagaaattctgctctttcttaactgtgttatgacaaaaacatttttactgctaatttaaaatatatactccgtgtaaatatttatgtaatgtaaacatagcacacattataaaactataatattatcttttatcaaaaaaagattgcgttctatatgcccattttaccccgggaaaaaggtctttattttcctttgaaatgaggagtagcatttgattttgccagggaacttaaaattatttcaaggtcccagtcgtacgtggcatggagatttatgacaaatatgtaatctgtttatttgtcacccaacttggatgacttctaaatgtttcttctttgtagctcttgattttgcttgggtttcccccgacccatgcccaaatagtaaaaaacaaaacaaaaccaaaaaacaatgtctgagtcatgtttgctccagtcagggaataccaacgtgctgacagacagctctggtttttaaaaaatcttactgtatgtcacttgcaactttgaagaacattcatgcgttagtggactgcatttggaagaaaacaaaaaggagaaaaaaacccccaccaagttgtggctcaagtccctctgccatttgctgcagtgagttttcctattccattttgctggggagaaggcatgctttacagaacacatcaaactgtccgaaaaaggctgtctgcatccctcatgtttataagagaaggatttctttccccttccttcacgtatcaaagaagtcactcggggaggaaataaaccataattaggcatgagcgagcgagcagacagaccccttgctctgccttccctgtccccgcccaccaggcaaccgtcctgggcgcaaccgaggagcgggttgtctccgcagcagctgcagcgagcgcgcgcccacgcccgagcccgcgcccgccgccaggatctgggcggcggcgaggctagcccgggggcgcgctcgctcgggagcgcgctcatgcagcggttttcttctcccacaatccagaggcagctgcacgggaggggcggggagtcggcggaaggatatcggcgcggagggagcagcgcgctccctttgacggcggcccccggcattggcgggcggcgctggcgggcggcgaggggtggggtgtgatgcggcactgcggttctgaggccgttactccggcttctccatagagggcggagaaggctggagcgcggcggtgattttgtgccagggattcccagagacgcgctgaaaggctggcagggcttaggaagctggggggttagggacacacattcaagcccccacccccgggaggggaagggggctggaggcgaggcttgagggcggcggaggaatggtgtctgctcggggggaaggggcgagccctgcctgttggtactgaggggctgcgggcagtggaggctccgcgggtcgaaagcggctccatgcccatcggtgggtggaacgtgtagaggtcggaacgccgaggtcgagtctggtggcgcctcggtatccttaacgtggtctctgtttaacgtatttcatttagcccccgttgggattgattcattgggagcagtttcgctggtctggatcctccaggagctggacaaccttgacgggctttttgtcttgggttccagccccctttcccttcctcctcctccagatgccttttctctgcccctcctcgcccggtacagacatttccagcgcaggctgctgctcgtggtgtccgtcgtcgaagccacttcttgggatttcggctcgtttcactctggggtgttttttgaggagggagagtgcccccctcctccacgatgggatttttctcccttgccgaaatggactttcattgatttctacttacttccacgtttagtgaccaattccctaggcgtatttttgtggtagttccttttttcaaatacatactctgtaaaatggagaacgaaatttttactccccttctggagcagttcatgaccagccctttggtcacttgggttaaaacgtttggacctctggccgcaggaaatgggaccaaccttgatgaatatgtggctttggtggatggggtattcttgaaccaggtcatgctccaaattaatcctaaattggagagtcagagagtaaataaaaaagtcaataatgatgcctcacttagaatgcacaatctatccattttggtgagacagataaaattttattaccaggagactttgcagcaattgatcatgatgtcgttgccaaatgtcttaatcattggcaaaaatcccttttctgaacaaggcacagaagaagttaaaaaactgcttttacttttattgggttgtgcagttcagtgtcagaaaaaagaggaatttattgaaagaattcaaggtttagattttgatacaaaagcagcggttgccgcacatattcaagaggtaactcataatcaggaaaatgtgtttgacctgcaatggatggaagtgactgatatgtcgcaggaggacatagaaccactcttgaaaaatatggcattgcatctaaaaagacttatagatgagagagatgaacattcagagactatcatagaactctctgaagagcgggatggtctccattttctaccccatgcctcttcatctgcacagtcaccctgtggttctccaggcatgaagcgaacagaaagtcgacaacatctgtcggtggaactggcagatgctaaagccaagataagaaggcttaggcaggaattggaggaaaagactgagcagttgttggattgtaaacaagaacttgagcaaatggaaatagaactcaaaaggctgcaacaagagaacatgaatttgctttcggatgctcgctctgccagaatgtaccgagatgaattagatgcacttcgagagaaagcagtcagagtcgataagcttgaaagtgaagtcagcagatataaagagagactacatgatattgaattttataaggcaagagttgaggaattaaaagaagacaatcaagttttattagaaacaaaaaccatgttggaagaccaactagagggaactcgtgctcgttctgataaattacatgaattagaaaaagagaacttacaactgaaagctaaacttcatgatatggaaatggaacgagatatggatagaaaaaagattgaagaattaatggaagaaaatatgactttggaaatggcacagaaacaaagtatggatgaatcattacatcttggctgggaactggaacagatatccagaactagtgaactttccgaagcaccccagaaatccctgggccatgaggtgaatgagttgacatcaagtagattattgaagctagagatggaaaatcaaagtttgacaaaaaccgtagaagagcttcggactactgtggattctgtagaaggcaatgcttccaaaatcctgaaaatggaaaaagaaaatcaaaggctcagtaaaaaggttgagattcttgaaaatgagattgttcaagaaaagcaaagtcttcagaattgtcagaatttaagcaaggatctaatgaaggagaaagctcagcttgaaaaaacaatagaaacactgagagaaaattcagagagacagattaagatactggaacaggaaaatgaacatctgaatcaaacagtgtcttccttaaggcagcggtcccagataagtgcagaagcaagagtgaaagacattgaaaaagaaaacaaaattcttcatgaatctatcaaagaaacaagtagcaagctaagcaagattgaatttgaaaaaagacaaattaaaaaagaattggaacattataaagaaaaaggagaacgagctgaagaacttgaaaatgaattgcatcatcttgaaaaagaaaatgaattattacagaaaaaaataactaatttaaaaattacttgtgaaaaaattgaggccttagaacaagaaaattcagagctagaaagagaaaatagaaaattaaaaaaaacattggatagctttaaaaatctgacctttcagttagaatccctagaaaaagagaattcccaacttgatgaggaaaacttagaactgcgaaggaatgtagaatctttgaagtgtgcaagcatgaaaatggctcagctacagctagaaaacaaagaactggaaagtgaaaaagagcaacttaagaagggtttggagctcctgaaagcatctttcaagaaaacagaacgcttagaagttagctaccagggtttagatatagaaaatcaaagactgcaaaaaactttagagaacagcaataaaaaaatccagcaattagagagtgaactacaagacttagagatggaaaatcaaacattgcagaaaaacctagaagaactaaaaatatctagcaaaagactagaacagctggaaaaagaaaataaatcattagagcaagagacttctcaactggaaaaggataagaaacaattggagaaggaaaataagagactccgacaacaagcagaaattaaagataccacattagaagaaaataatgtgaagattggaaatttggaaaaagaaaacaaaaccctatccaaagaaattggtatatataaagaatcttgtgtccgtctgaaagaactagaaaaagaaaataaggagcttgtgaaaagagcaactattgatataaaaacgttggttacactacgtgaggatttggtgagtgaaaagttgaagacccaacagatgaacaatgatctcgaaaaattaactcatgagcttgagaagatagggttaaataaggagcgactcttacatgatgaacaaagtactgatgacagtaggtataaacttttggaatcaaaattagaatccactcttaagaagtctcttgaaataaaagaagaaaaaattgctgctttagaagctcgattagaagaatccacgaattataaccagcaattgcgccaagaacttaaaacaaatgctacactgcaagcagagaagcaagcgttgaaaactcaactgaagcaacttgagacacagaacaataatttgcaggctcagattcttgcacttcagaggcagacagtgtcattacaagaacagaataccactcttcaaacacagaatgccaagcttcaggttgaaaattccacccttaattcccaaagtacctcactcatgaaccagaatgcccaactcctaatccagcagtcttccttagaaaatgaaaatgaatctgtaatcaaagagcgagaagacctaaaatctctctatgattctctgatcaaagatcatgaaaagctggaacttcttcatgaacgtcaggcttcagagtatgaatctcttatctctaaacatggaactctgaagtctgcccacaaaaatcttgaggtggaacatagagaccttgaagaccgttacaatcagttattaaaacagaaaggacagttggaagatttggaaaaaatgctcaaagtagaacaggaaaaaatgctgcttgaaaataaaaatcatgaaacagtagctgcagaatacaagaaactttgtggtgaaaatgataggctgaatcatacctatagtcaacttttaaaagagactgaagttttacaaactgaccataaaaatttgaaaagtcttctgaataattccaaactggaacaaacaagattagaagctgaattttcaaaactaaaggaacaataccaacaattggatattacatcaaccaagctgaataaccagtgtgagttgctaagccaacttaaaggaaatttagaagaagaaaatcggcatctactagatcaaattcagacattaatgctacagaacagaacacttttggagcagaatatggaaagcaaggatctttttcatgttgaacaaagacagtacattgataagttaaatgaattaagacgtcagaaggagaaactagaagagaaaattatggatcaatacaaattttatgacccatctcctcctagaaggagaggcaactggattactctaaaaatgagaaaattgataaagtctaagaaagatattaatcgggaacgccagaaatctctaacattaacacccacccgctcagactccagtgaaggatttcttcagctccctcatcaagacagtcaagatagttcttcagtaggttcaaactctttagaagatggccagaccttggggaccaagaaaagcagcatggttgcactgaaaagactgccctttttgaggaacagaccgaaggataaagacaaaatgaaggcctgctaccgtcgttccatgtccatgaatgacctggtgcagtccatggtcctagcaggacagtggacaggtagtactgagaatttggaggttcctgatgatatttcaacgggtaaaaggagcaactcttctgcaggcttcagatccaagcagttggttaataataaagatactacatcctttgaagacataagtccacaaggtgttagtgatgattctagtacgggatcaagagttcatgcttcaagaccagccagccttgatagtggcagaacatccactagcaatagcaataataatgcttcactacatgaagtcaaagcaggtgcagttaataaccaaagcaggccacaaagccacagcagtggagaatttagcctgcttcatgaccatgaggcttggtccagcagtggtagcagtccaatccagtacttgaaaagacagaccagatcaagcccagtgctccagcacaaaatatctgaaacactggagagtcgacatcacaagatcaaaactggttcccctggaagtgaagttgttactctacaacagtttttggaagaaagcaataagcttacctcagtacagataaagtcctcaagtcaagagaatcttttagatgaagtaatgaaaagtttgtctgtctcttctgactttttgggaaaagacaaaccagttagctgtggtctggccaggtcagtaagtggaaaaaccccaggggacttctatgatagacggacaactaagcctgagtttttgagacctggtcctcgaaaaactgaagatacctacttcattagttctgcgggaaaacctacaccaggcactcaaggaaaaataaaattagtaaaagaatcttctctgtcacgacaatcaaaagatagtaacccttatgcaactttacctcgtgcaagcagcgtgatctcaactgccgaaggaactacacgaaggacaagcatccatgattttttgaccaaggacagtagactgcctatatcagttgattcaccaccagctgctgctgacagcaacaccactgcagcatctaatgtggacaaagtacaagaaagcagaaattcaaaaagcaggtctagggagcaacaaagctcctaattctattacccactacatgacatgtgggccaagtgagagaaaagtgtccttcagtttctcagtatgaagcctttatttctgaagtaacaagacacctagcaactataggaatcatttttaaaaatctttaaggagacttttaacagtccttcgtgaatagagcaggcaagaaatacaaaccttcattccttgaatcaaggagcactactggattcaactgccaaaattttttaaaggttttaggacttactataccttgtactgttaagatctactgaataaaggacgttctctcactaaggaccaggtgttttaaggttaagtgtttaaagaagtactccaagaacaatctgcttttttcatcatttgttttatgaatttatccatgtttgcttaatgcttctgctaagtgttagccaaaatctagccatttatatttagttgtgtaaacctaaattaaatgctgtagtattttgtggaatgtactatatagcaagatacagagaaaattgttttggcatgtcagagccttatttggttagcagactgcatgtgttgatactttttttttcttaaagccaattattttgatgcaaaagaaattcagtttataagataaatctgaaaaatccataatgaaataggagttataaaaaatttatagtgatattaatctttccatatttcccattaagcaacactaagcattcataagttaacccatggtaaagagtgtttttctgaaacttttttttagtaagatggtttttcagcaaatggcattcccaagataaagctgttgtgctttaactcatttcttttctttggtattgggttatgtatgcgtgtgcatttttttaacttgagagctgactgttgcttaagaagttttcttatggcaaaaataatgtaaataagttactatgatctgcattttgccagaaactcatttataattaaggctatcatttattaatgatttttttctcctttatgatattacattaaagttgataactgttattggtacttttgaaatatttgtatgcatttgttacctttaaacatttggaagaagcacaaaaaaatagatttagttaacccagggaaacatcaatttttttagtagttccaattttatatcacagttttattttcttatgaaatcaaaaaatgcattgatactcattaatgcaaattcattatttaacatcaatatcagagtaatcttcaaggtctgaaatgagaaacatactgactttttaaaattttaacagtgtacttcttaggctttcattaccagctctgaagaactttttggaataattccatattccatagtgtgtggtttatgagttgtgggtttcatcactaacccagtaaccataagaaaagtctctctctctctctctctctctttctctctccctctttctctctctctttcgtaggccagtagcaatgttgtgttcacagtctaatttccaaaagaccatcaataaaaaagagagcatgtttaaattgaaatggaacttagagaacttgagcttacttacgtacttcaatgccaccggtaacttaggttttaccaccaaatgctgttaacattaaatcattttgaaaatcttggatgaaaggtgctatgtaaatggaaatacaaaggattcttactaacatacaaaaataatgcacaacagaaatatctaaaaccttttccgtagactttgaaacatctctctctgtcataactccctggattcaagtagcacattggtaataggtatcagagcagtctagagacaattgcatgtcaaaaaatgtacattcatttttaggtgggataaaagtaaacatagaaattatgttatggctaaatacagttagtgggtaacttagatttatattagctagcatctaatttgcacaactagaacacatcccagaacaattactgaaaagctgaaatttaatgggtggtgatgtagcccaatgagggcgaatgacattccagcttgacctctccagaacactaatatcctaaaatacagaacatgctgggttaagtgcattagtgcttcaagcagaaaatgctgaaaacaacgtgtaaagtactgaatctgagtaggctgaccctgagaagggacaattaaagagacaaccaagggaacacattgagactacaaacgactagacagtagtaaccacatgaatattttactttctccagtataccttgagaagcaaactttgtaggaagccactcttctcccctaaacaacttctgccaaacaataataaagccaactggaaacgaatcggagccattttcattttcctaaccggggcctgacatgctttaaattatctggctgtattctaaatcaacacctaacccctcaaggaaactgaagaatcaatatacagggtaatagctttggctcagagctccaataatgtgcttcagatctgtccatgtggaaatgctttcatccaaatttttaaattggtggttaccaaagagttcacaaaacaggtttgtatgtagcacctttcatgcaaggcatgcaaaaagcctattttaaaatcactgtgcatattatagagttgtagccacctcacaatgaagtactacagcctgtgctgtcttaatggtttatgtcaggaaatgaaaaagatactgtaccaaatctggaattacaatggggagtaataatgtatactaaatgacttttgtattttaagttactttttgtgagtggtgaatttttgtgtttttcttttcagctacacttagtcctgagatgtattttttctttaagtcttgaatgaatacaaaaggagcccattttataatataaaccttgatgtacatgttgagatatttggacaatgaaaatgccttaaaaggaatgcatatggataaagttgcacttataacacccttcaacaaaatctaattttaaattgtctttttcttttctattaagggttttctttttcagtgtctaccattgtacttataactgttattaaataccaaatcaaataatataaaagctgtaacatttcctttaaaactaatgctaataagggatttagagttgaatggcaaaatgtttattacttggcaatacctgatgtcagtcacaggcatccaactcatgacaagagataccactgtttgttttttaaaaaacatttttcattttgtttctccttcaaaaattaagttggactaacattcacgtatcaaactaatataaaaagaaataaaaccaagaggtgatttttgtaaaaactggtta

SEQ ID NO: 359954 - DNA, 9327 bp, Homo sapiens
  misc_feature (9170)..(9170): n is a, c, g, or t
aaggaataatgttaaagacaacattaatgacatttatagaacacttaactataagctgccatttcatttaaccctattattagccctgctttacacgtgacggaatcgaagcacaaagagactcaataacgtgcgtaggctcacacagctggtgcatattggaaccaggcaggaagacttcagagtccaggttctcaactacccaattaagaaattctgctctttcttaactgtgttatgacaaaaacatttttactgctaatttaaaatatatactccgtgtaaatatttatgtaatgtaaacatagcacacattataaaactataatattatcttttatcaaaaaaagattgcgttctatatgcccattttaccccgggaaaaaggtctttattttcctttgaaatgaggagtagcatttgattttgccagggaacttaaaattatttcaaggtcccagtcgtacgtggcatggagatttatgacaaatatgtaatctgtttatttgtcacccaacttggatgacttctaaatgtttcttctttgtagctcttgattttgcttgggtttcccccgacccatgcccaaatagtaaaaaacaaaacaaaaccaaaaaacaatgtctgagtcatgtttgctccagtcagggaataccaacgtgctgacagacagctctggtttttaaaaaatcttactgtatgtcacttgcaactttgaagaacattcatgcgttagtggactgcatttggaagaaaacaaaaaggagaaaaaaacccccaccaagttgtggctcaagtccctctgccatttgctgcagtgagttttcctattccattttgctggggagaaggcatgctttacagaacacatcaaactgtccgaaaaaggctgtctgcatccctcatgtttataagagaaggatttctttccccttccttcacgtatcaaagaagtcactcggggaggaaataaaccataattaggcatgagcgagcgagcagacagaccccttgctctgccttccctgtccccgcccaccaggcaaccgtcctgggcgcaaccgaggagcgggttgtctccgcagcagctgcagcgagcgcgcgcccacgcccgagcccgcgcccgccgccaggatctgggcggcggcgaggctagcccgggggcgcgctcgctcgggagcgcgctcatgcagcggttttcttctcccacaatccagaggcagctgcacgggaggggcggggagtcggcggaaggatatcggcgcggagggagcagcgcgctccctttgacggcggcccccggcattggcgggcggcgctggcgggcggcgaggggtggggtgtgatgcggcactgcggttctgaggccgttactccggcttctccatagagggcggagaaggctggagcgcggcggtgattttgtgccagggattcccagagacgcgctgaaaggctggcagggcttaggaagctggggggttagggacacacattcaagcccccacccccgggaggggaagggggctggaggcgaggcttgagggcggcggaggaatggtgtctgctcggggggaaggggcgagccctgcctgttggtactgaggggctgcgggcagtggaggctccgcgggtcgaaagcggctccatgcccatcggtgggtggaacgtgtagaggtcggaacgccgaggtcgagtctggtggcgcctcggtatccttaacgtggtctctgtttaacgtatttcatttagcccccgttgggattgattcattgggagcagtttcgctggtctggatcctccaggagctggacaaccttgacgggctttttgtcttgggttccagccccctttcccttcctcctcctccagatgccttttctctgcccctcctcgcccggtacagacatttccagcgcaggctgctgctcgtggtgtccgtcgtcgaagccacttcttgggatttcggctcgtttcactctggggtgttttttgaggagggagagtgcccccctcctccacgatgggatttttctcccttgccgaaatggactttcattgatttctacttacttccacgtttagtgaccaattccctaggcgtatttttgtggtagttccttttttcaaatacatactctgtaaaatggagaacgaaatttttactccccttctggagcagttcatgaccagccctttggtcacttgggttaaaacgtttggacctctggccgcaggaaatgggaccaaccttgatgaatatgtggctttggtggatggggtattcttgaaccaggtcatgctccaaattaatcctaaattggagagtcagagagtaaataaaaaagtcaataatgatgcctcacttagaatgcacaatctatccattttggtgagacagataaaattttattaccaggagactttgcagcaattgatcatgatgtcgttgccaaatgtcttaatcattggcaaaaatcccttttctgaacaaggcacagaagaagttaaaaaactgcttttacttttattgggttgtgcagttcagtgtcagaaaaaagaggaatttattgaaagaattcaaggtttagattttgatacaaaagcagcggttgccgcacatattcaagaggtaactcataatcaggaaaatgtgtttgacctgcaatggatggaagtgactgatatgtcgcaggaggacatagaaccactcttgaaaaatatggcattgcatctaaaaagacttatagatgagagagatgaacattcagagactatcatagaactctctgaagagcgggatggtctccattttctaccccatgcctcttcatctgcacagtcaccctgtggttctccaggcatgaagcgaacagaaagtcgacaacatctgtcggtggaactggcagatgctaaagccaagataagaaggcttaggcaggaattggaggaaaagactgagcagttgttggattgtaaacaagaacttgagcaaatggaaatagaactcaaaaggctgcaacaagagaacatgaatttgctttcggatgctcgctctgccagaatgtaccgagatgaattagatgcacttcgagagaaagcagtcagagtcgataagcttgaaagtgaagtcagcagatataaagagagactacatgatattgaattttataaggcaagagttgaggaattaaaagaagacaatcaagttttattagaaacaaaaaccatgttggaagaccaactagagggaactcgtgctcgttctgataaattacatgaattagaaaaagagaacttacaactgaaagctaaacttcatgatatggaaatggaacgagatatggatagaaaaaagattgaagaattaatggaagaaaatatgactttggaaatggcacagaaacaaagtatggatgaatcattacatcttggctgggaactggaacagatatccagaactagtgaactttccgaagcaccccagaaatccctgggccatgaggtgaatgagttgacatcaagtagattattgaagctagagatggaaaatcaaagtttgacaaaaaccgtagaagagcttcggactactgtggattctgtagaaggcaatgcttccaaaatcctgaaaatggaaaaagaaaatcaaaggctcagtaaaaaggttgagattcttgaaaatgagattgttcaagaaaagcaaagtcttcagaattgtcagaatttaagcaaggatctaatgaaggagaaagctcagcttgaaaaaacaatagaaacactgagagaaaattcagagagacagattaagatactggaacaggaaaatgaacatctgaatcaaacagtgtcttccttaaggcagcggtcccagataagtgcagaagcaagagtgaaagacattgaaaaagaaaacaaaattcttcatgaatctatcaaagaaacaagtagcaagctaagcaagattgaatttgaaaaaagacaaattaaaaaagaattggaacattataaagaaaaaggagaacgagctgaagaacttgaaaatgaattgcatcatcttgaaaaagaaaatgaattattacagaaaaaaataactaatttaaaaattacttgtgaaaaaattgaggccttagaacaagaaaattcagagctagaaagagaaaatagaaaattaaaaaaaacattggatagctttaaaaatctgacctttcagttagaatccctagaaaaagagaattcccaacttgatgaggaaaacttagaactgcgaaggaatgtagaatctttgaagtgtgcaagcatgaaaatggctcagctacagctagaaaacaaagaactggaaagtgaaaaagagcaacttaagaagggtttggagctcctgaaagcatctttcaagaaaacagaacgcttagaagttagctaccagggtttagatatagaaaatcaaagactgcaaaaaactttagagaacagcaataaaaaaatccagcaattagagagtgaactacaagacttagagatggaaaatcaaacattgcagaaaaacctagaagaactaaaaatatctagcaaaagactagaacagctggaaaaagaaaataaatcattagagcaagagacttctcaactggaaaaggataagaaacaattggagaaggaaaataagagactccgacaacaagcagaaattaaagataccacattagaagaaaataatgtgaagattggaaatttggaaaaagaaaacaaaaccctatccaaagaaattggtatatataaagaatcttgtgtccgtctgaaagaactagaaaaagaaaataaggagcttgtgaaaagagcaactattgatataaaaacgttggttacactacgtgaggatttggtgagtgaaaagttgaagacccaacagatgaacaatgatctcgaaaaattaactcatgagcttgagaagatagggttaaataaggagcgactcttacatgatgaacaaagtactgatgacagtaggtataaacttttggaatcaaaattagaatccactcttaagaagtctcttgaaataaaagaagaaaaaattgctgctttagaagctcgattagaagaatccacgaattataaccagcaattgcgccaagaacttaaaacaaatgctacactgcaagcagagaagcaagcgttgaaaactcaactgaagcaacttgagacacagaacaataatttgcaggctcagattcttgcacttcagaggcagacagtgtcattacaagaacagaataccactcttcaaacacagaatgccaagcttcaggttgaaaattccacccttaattcccaaagtacctcactcatgaaccagaatgcccaactcctaatccagcagtcttccttagaaaatgaaaatgaatctgtaatcaaagagcgagaagacctaaaatctctctatgattctctgatcaaagatcatgaaaagctggaacttcttcatgaacgtcaggcttcagagtatgaatctcttatctctaaacatggaactctgaagtctgcccacaaaaatcttgaggtggaacatagagaccttgaagaccgttacaatcagttattaaaacagaaaggacagttggaagatttggaaaaaatgctcaaagtagaacaggaaaaaatgctgcttgaaaataaaaatcatgaaacagtagctgcagaatacaagaaactttgtggtgaaaatgataggctgaatcatacctatagtcaacttttaaaagagactgaagttttacaaactgaccataaaaatttgaaaagtcttctgaataattccaaactggaacaaacaagattagaagctgaattttcaaaactaaaggaacaataccaacaattggatattacatcaaccaagctgaataaccagtgtgagttgctaagccaacttaaaggaaatttagaagaagaaaatcggcatctactagatcaaattcagacattaatgctacagaacagaacacttttggagcagaatatggaaagcaaggatctttttcatgttgaacaaagacagtacattgataagttaaatgaattaagacgtcagaaggagaaactagaagagaaaattatggatcaatacaaattttatgacccatctcctcctagaaggagaggcaactggattactctaaaaatgagaaaattgataaagtctaagaaagatattaatcgggaacgccagaaatctctaacattaacacccacccgctcagactccagtgaaggatttcttcagctccctcatcaagacagtcaagatagttcttcagtaggttcaaactctttagaagatggccagaccttggggaccaagaaaagcagcatggttgcactgaaaagactgccctttttgaggaacagaccgaaggataaagacaaaatgaaggcctgctaccgtcgttccatgtccatgaatgacctggtgcagtccatggtcctagcaggacagtggacaggtagtactgagaatttggaggttcctgatgatatttcaacgggtaaaaggagcaactcttctgcaggcttcagatccaagcagttggttaataataaagatactacatcctttgaagacataagtccacaaggtgttagtgatgattctagtacgggatcaagagttcatgcttcaagaccagccagccttgatagtggcagaacatccactagcaatagcaataataatgcttcactacatgaagtcaaagcaggtgcagttaataaccaaagcaggccacaaagccacagcagtggagaatttagcctgcttcatgaccatgaggcttggtccagcagtggtagcagtccaatccagtacttgaaaagacagaccagatcaagcccagtgctccagcacaaaatatctgaaacactggagagtcgacatcacaagatcaaaactggttcccctggaagtgaagttgttactctacaacagtttttggaagaaagcaataagcttacctcagtacagataaagtcctcaagtcaagagaatcttttagatgaagtaatgaaaagtttgtctgtctcttctgactttttgggaaaagacaaaccagttagctgtggtctggccaggtcagtaagtggaaaaaccccaggggacttctatgatagacggacaactaagcctgagtttttgagacctggtcctcgaaaaactgaagatacctacttcattagttctgcgggaaaacctacaccaggcactcaaggaaaaataaaattagtaaaagaatcttctctgtcacgacaatcaaaagatagtaacccttatgcaactttacctcgtgcaagcagcgtgatctcaactgccgaaggaactacacgaaggacaagcatccatgattttttgaccaaggacagtagactgcctatatcagttgattcaccaccagctgctgctgacagcaacaccactgcagcatctaatgtggacaaagtacaagaaagcagaaattcaaaaagcaggtctagggagcaacaaagctcctaattctattacccactacatgacatgtgggccaagtgagagaaaagtgtccttcagtttctcagtatgaagcctttatttctgaagtaacaagacacctagcaactataggaatcatttttaaaaatctttaaggagacttttaacagtccttcgtgaatagagcaggcaagaaatacaaaccttcattccttgaatcaaggagcactactggattcaactgccaaaattttttaaaggttttaggacttactataccttgtactgttaagatctactgaataaaggacgttctctcactaaggaccaggtgttttaaggttaagtgtttaaagaagtactccaagaacaatctgcttttttcatcatttgttttatgaatttatccatgtttgcttaatgcttctgctaagtgttagccaaaatctagccatttatatttagttgtgtaaacctaaattaaatgctgtagtattttgtggaatgtactatatagcaagatacagagaaaattgttttggcatgtcagagccttatttggttagcagactgcatgtgttgatactttttttttcttaaagccaattattttgatgcaaaagaaattcagtttataagataaatctgaaaaatccataatgaaataggagttataaaaaatttatagtgatattaatctttccatatttcccattaagcaacactaagcattcataagttaacccatggtaaagagtgtttttctgaaacttttttttagtaagatggtttttcagcaaatggcattcccaagataaagctgttgtgctttaactcatttcttttctttggtattgggttatgtatgcgtgtgcatttttttaacttgagagctgactgttgcttaagaagttttcttatggcaaaaataatgtaaataagttactatgatctgcattttgccagaaactcatttataattaaggctatcatttattaatgatttttttctcctttatgatattacattaaagttgataactgttattggtacttttgaaatatttgtatgcatttgttacctttaaacatttggaagaagcacaaaaaaatagatttagttaacccagggaaacatcaatttttttagtagttccaattttatatcacagttttattttcttatgaaatcaaaaaatgcattgatactcattaatgcaaattcattatttaacatcaatatcagagtaatcttcaaggtctgaaatgagaaacatactgactttttaaaattttaacagtgtacttcttaggctttcattaccagctctgaagaactttttggaataattccatattccatagtgtgtggtttatgagttgtgggtttcatcactaacccagtaaccataagaaaagtctctctctctctctctctctctttctctctccctctttctctctctctttcgtaggccagtagcaatgttgtgttcacagtctaatttccaaaagaccatcaataaaaaagagagcatgtttaaattgaaatggaacttagagaacttgagcttacttacgtacttcaatgccaccggtaacttaggttttaccaccaaatgctgttaacattaaataccacatcaactgngagaaacatgtatttacagggcatttaaaaacctttaaaaaaaaaaaaaaatcctggggggggggccgggaccccaattccccttttagggggcggtttacaatacatgggcccggttttaaacaccggggtttggggaaaacccctggggtccccc

SEQ ID NO: 359955 - DNA, 8913 bp, Homo sapiens
aaggaataatgttaaagacaacattaatgacatttatagaacacttaactataagctgccatttcatttaaccctattattagccctgctttacacgtgacggaatcgaagcacaaagagactcaataacgtgcgtaggctcacacagctggtgcatattggaaccaggcaggaagacttcagagtccaggttctcaactacccaattaagaaattctgctctttcttaactgtgttatgacaaaaacatttttactgctaatttaaaatatatactccgtgtaaatatttatgtaatgtaaacatagcacacattataaaactataatattatcttttatcaaaaaaagattgcgttctatatgcccattttaccccgggaaaaaggtctttattttcctttgaaatgaggagtagcatttgattttgccagggaacttaaaattatttcaaggtcccagtcgtacgtggcatggagatttatgacaaatatgtaatctgtttatttgtcacccaacttggatgacttctaaatgtttcttctttgtagctcttgattttgcttgggtttcccccgacccatgcccaaatagtaaaaaacaaaacaaaaccaaaaaacaatgtctgagtcatgtttgctccagtcagggaataccaacgtgctgacagacagctctggtttttaaaaaatcttactgtatgtcacttgcaactttgaagaacattcatgcgttagtggactgcatttggaagaaaacaaaaaggagaaaaaaacccccaccaagttgtggctcaagtccctctgccatttgctgcagtgagttttcctattccattttgctggggagaaggcatgctttacagaacacatcaaactgtccgaaaaaggctgtctgcatccctcatgtttataagagaaggatttctttccccttccttcacgtatcaaagaagtcactcggggaggaaataaaccataattaggcatgagcgagcgagcagacagaccccttgctctgccttccctgtccccgcccaccaggcaaccgtcctgggcgcaaccgaggagcgggttgtctccgcagcagctgcagcgagcgcgcgcccacgcccgagcccgcgcccgccgccaggatctgggcggcggcgaggctagcccgggggcgcgctcgctcgggagcgcgctcatgcagcggttttcttctcccacaatccagaggcagctgcacgggaggggcggggagtcggcggaaggatatcggcgcggagggagcagcgcgctccctttgacggcggcccccggcattggcgggcggcgctggcgggcggcgaggggtggggtgtgatgcggcactgcggttctgaggccgttactccggcttctccatagagggcggagaaggctggagcgcggcggtgattttgtgccagggattcccagagacgcgctgaaaggctggcagggcttaggaagctggggggttagggacacacattcaagcccccacccccgggaggggaagggggctggaggcgaggcttgagggcggcggaggaatggtgtctgctcggggggaaggggcgagccctgcctgttggtactgaggggctgcgggcagtggaggctccgcgggtcgaaagcggctccatgcccatcggtgggtggaacgtgtagaggtcggaacgccgaggtcgagtctggtggcgcctcggtatccttaacgtggtctctgtttaacgtatttcatttagcccccgttgggattgattcattgggagcagtttcgctggtctggatcctccaggagctggacaaccttgacgggctttttgtcttgggttccagccccctttcccttcctcctcctccagatgccttttctctgcccctcctcgcccggtacagacatttccagcgcaggctgctgctcgtggtgtccgtcgtcgaagccacttcttgggatttcggctcgtttcactctggggtgttttttgaggagggagagtgcccccctcctccacgatgggatttttctcccttgccgaaatggactttcattgatttctacttacttccacgtttagtgaccaattccctaggcgtatttttgtggtagttccttttttcaaatacatactctgtaaaatggagaacgaaatttttactccccttctggagcagttcatgaccagccctttggtcacttgggttaaaacgtttggacctctggccgcaggaaatgggaccaaccttgatgaatatgtggctttggtggatggggtattcttgaaccaggtcatgctccaaattaatcctaaattggagagtcagagagtaaataaaaaagtcaataatgatgcctcacttagaatgcacaatctatccattttggtgagacagataaaattttattaccaggagactttgcagcaattgatcatgatgtcgttgccaaatgtcttaatcattggcaaaaatcccttttctgaacaaggcacagaagaagttaaaaaactgcttttacttttattgggttgtgcagttcagtgtcagaaaaaagaggaatttattgaaagaattcaaggtttagattttgatacaaaagcagcggttgccgcacatattcaagaggtaactcataatcaggaaaatgtgtttgacctgcaatggatggaagtgactgatatgtcgcaggaggacatagaaccactcttgaaaaatatggcattgcatctaaaaagacttatagatgagagagatgaacattcagagactatcatagaactctctgaagagcgggatggtctccattttctaccccatgcctcttcatctgcacagtcaccctgtggttctccaggcatgaagcgaacagaaagtcgacaacatctgtcggtggaactggcagatgctaaagccaagataagaaggcttaggcaggaattggaggaaaagactgagcagttgttggattgtaaacaagaacttgagcaaatggaaatagaactcaaaaggctgcaacaagagaacatgaatttgctttcggatgctcgctctgccagaatgtaccgagatgaattagatgcacttcgagagaaagcagtcagagtcgataagcttgaaagtgaagtcagcagatataaagagagactacatgatattgaattttataaggcaagagttgaggaattaaaagaagacaatcaagttttattagaaacaaaaaccatgttggaagaccaactagagggaactcgtgctcgttctgataaattacatgaattagaaaaagagaacttacaactgaaagctaaacttcatgatatggaaatggaacgagatatggatagaaaaaagattgaagaattaatggaagaaaatatgactttggaaatggcacagaaacaaagtatggatgaatcattacatcttggctgggaactggaacagatatccagaactagtgaactttccgaagcaccccagaaatccctgggccatgaggtgaatgagttgacatcaagtagattattgaagctagagatggaaaatcaaagtttgacaaaaaccgtagaagagcttcggactactgtggattctgtagaaggcaatgcttccaaaatcctgaaaatggaaaaagaaaatcaaaggctcagtaaaaaggttgagattcttgaaaatgagattgttcaagaaaagcaaagtcttcagaattgtcagaatttaagcaaggatctaatgaaggagaaagctcagcttgaaaaaacaatagaaacactgagagaaaattcagagagacagattaagatactggaacaggaaaatgaacatctgaatcaaacagtgtcttccttaaggcagcggtcccagataagtgcagaagcaagagtgaaagacattgaaaaagaaaacaaaattcttcatgaatctatcaaagaaacaagtagcaagctaagcaagattgaatttgaaaaaagacaaattaaaaaagaattggaacattataaagaaaaaggagaacgagctgaagaacttgaaaatgaattgcatcatcttgaaaaagaaaatgaattattacagaaaaaaataactaatttaaaaattacttgtgaaaaaattgaggccttagaacaagaaaattcagagctagaaagagaaaatagaaaattaaaaaaaacattggatagctttaaaaatctgacctttcagttagaatccctagaaaaagagaattcccaacttgatgaggaaaacttagaactgcgaaggaatgtagaatctttgaagtgtgcaagcatgaaaatggctcagctacagctagaaaacaaagaactggaaagtgaaaaagagcaacttaagaagggtttggagctcctgaaagcatctttcaagaaaacagaacgcttagaagttagctaccagggtttagatatagaaaatcaaagactgcaaaaaactttagagaacagcaataaaaaaatccagcaattagagagtgaactacaagacttagagatggaaaatcaaacattgcagaaaaacctagaagaactaaaaatatctagcaaaagactagaacagctggaaaaagaaaataaatcattagagcaagagacttctcaactggaaaaggataagaaacaattggagaaggaaaataagagactccgacaacaagcagaaattaaagataccacattagaagaaaataatgtgaagattggaaatttggaaaaagaaaacaaaaccctatccaaagaaattggtatatataaagaatcttgtgtccgtctgaaagaactagaaaaagaaaataaggagcttgtgaaaagagcaactattgatataaaaacgttggttacactacgtgaggatttggtgagtgaaaagttgaagacccaacagatgaacaatgatctcgaaaaattaactcatgagcttgagaagatagggttaaataaggagcgactcttacatgatgaacaaagtactgatgacagtaggtataaacttttggaatcaaaattagaatccactcttaagaagtctcttgaaataaaagaagaaaaaattgctgctttagaagctcgattagaagaatccacgaattataaccagcaattgcgccaagaacttaaaacaaatgctacactgcaagcagagaagcaagcgttgaaaactcaactgaagcaacttgagacacagaacaataatttgcaggctcagattcttgcacttcagaggcagacagtgtcattacaagaacagaataccactcttcaaacacagaatgccaagcttcaggttgaaaattccacccttaattcccaaagtacctcactcatgaaccagaatgcccaactcctaatccagcagtcttccttagaaaatgaaaatgaatctgtaatcaaagagcgagaagacctaaaatctctctatgattctctgatcaaagatcatgaaaagctggaacttcttcatgaacgtcaggcttcagagtatgaatctcttatctctaaacatggaactctgaagtctgcccacaaaaatcttgaggtggaacatagagaccttgaagaccgttacaatcagttattaaaacagaaaggacagttggaagatttggaaaaaatgctcaaagtagaacaggaaaaaatgctgcttgaaaataaaaatcatgaaacagtagctgcagaatacaagaaactttgtggtgaaaatgataggctgaatcatacctatagtcaacttttaaaagagactgaagttttacaaactgaccataaaaatttgaaaagtcttctgaataattccaaactggaacaaacaagattagaagctgaattttcaaaactaaaggaacaataccaacaattggatattacatcaaccaagctgaataaccagtgtgagttgctaagccaacttaaaggaaatttagaagaagaaaatcggcatctactagatcaaattcagacattaatgctacagaacagaacacttttggagcagaatatggaaagcaaggatctttttcatgttgaacaaagacagtacattgataagttaaatgaattaagacgtcagaaggagaaactagaagagaaaattatggatcaatacaaattttatgacccatctcctcctagaaggagaggcaactggattactctaaaaatgagaaaattgataaagtctaagaaagatattaatcgggaacgccagaaatctctaacattaacacccacccgctcagactccagtgaaggatttcttcagctccctcatcaagacagtcaagatagttcttcagtaggttcaaactctttagaagatggccagaccttggggaccaagaaaagcagcatggttgcactgaaaagactgccctttttgaggaacagaccgaaggataaagacaaaatgaaggcctgctaccgtcgttccatgtccatgaatgacctggtgcagtccatggtcctagcaggacagtggacaggtagtactgagaatttggaggttcctgatgatatttcaacgggtaaaaggagcaactcttctgcaggcttcagatccaagcagttggttaataataaagatactacatcctttgaagacataagtccacaaggtgttagtgatgattctagtacgggatcaagagttcatgcttcaagaccagccagccttgatagtggcagaacatccactagcaatagcaataataatgcttcactacatgaagtcaaagcaggtgcagttaataaccaaagcaggccacaaagccacagcagtggagaatttagcctgcttcatgaccatgaggcttggtccagcagtggtagcagtccaatccagtacttgaaaagacagaccagatcaagcccagtgctccagcacaaaatatctgaaacactggagagtcgacatcacaagatcaaaactggttcccctggaagtgaagttgttactctacaacagtttttggaagaaagcaataagcttacctcagtacagataaagtcctcaagtcaagagaatcttttagatgaagtaatgaaaagtttgtctgtctcttctgactttttgggaaaagacaaaccagttagctgtggtctggccaggtcagtaagtggaaaaaccccaggggacttctatgatagacggacaactaagcctgagtttttgagacctggtcctcgaaaaactgaagatacctacttcattagttctgcgggaaaacctacaccaggcactcaaggaaaaataaaattagtaaaagaatcttctctgtcacgacaatcaaaagatagtaacccttatgcaactttacctcgtgcaagcagcgtgatctcaactgccgaaggaactacacgaaggacaagcatccatgattttttgaccaaggacagtagactgcctatatcagttgattcaccaccagctgctgctgacagcaacaccactgcagcatctagtgagtaccatttacaccagtggtcctctcatatacttgacatcccaacacatactataggttcttgtgcccaaaatgatttagctatagacatgcctgagcctctatatgcccaggctagaaactcaagaacaggaaggtcacattttctaaaccaaacttttgccactattaggatgcctagtgatgcattcggaatgttggcaaaagatagcataggaccatttactgtggcccattcatctcagccattcttatccctgaatacagaattagttagtaacataagtgggttacctcctaggccagtcatcagaataactgaccaggcttctgcctctttggataaacctgcacagaaagaaaatgaacagttttctgatcatcagaaccctagtaacagtaacctacagttttctataaatagcaacaatcttgtcacttctgcatgcctctatcctgatgacacagaagctgcattgttggtttctgaggataatcaaactgtttggtatgaatatggttgtatatgatcaaaactgcacaatataatatattgatgttatttgatatacactgcttctctaatatgatttgaaaagttgctgttaacaaaatatcatttggctaggtttttattttttatttaaaattgttgcacagtgttcagctgtacatgatggcatgtatattaatgtgaatgtgtaaccacaccaaaacctgcatgaaatattaattactttgtccattttctgcatgcctttaaaaaccttaaccatacatgctcctccttcacattttttgttgcctgataagattgttactttgatatccagaagcatgttaaaacagttgcatgctctcttaccaagaagacatttccaagtcatatttgctttgttgcttctggaaaaaaatgttcatttcctccctcccttcctcctcttcccacccctcacttgctctgactgtcactcctttttttcttccagaatgtgtactttatattacatatgtacagtatcagtagggaaaatgtaaaaagatgttgttttcttttgtcatttaattaggccatctgtcctgttttaaagaaatagttaataattcaacactttatataacaaatattaactaatacccatatttataaaacatttttcagatttaaaagattgttaatacttataaacttagtgttattcttagaaaaccccatcaaatttaaatgtgatttacacagtgactaggaacatttgtatttattgtttcttctctgcacttttcatcatctgataaatacaagagctcaagtaactgtcttttcttcaagatggcttctatacttgaaatcagttaatacaatagtttttccagttctttttttatagagagtcaaagagaaataaaccaaattatattcaaaagttggaaa

SEQ ID NO: 359956 - DNA, 7845 bp, Homo sapiens
aaggaataatgttaaagacaacattaatgacatttatagaacacttaactataagctgccatttcatttaaccctattattagccctgctttacacgtgacggaatcgaagcacaaagagactcaataacgtgcgtaggctcacacagctggtgcatattggaaccaggcaggaagacttcagagtccaggttctcaactacccaattaagaaattctgctctttcttaactgtgttatgacaaaaacatttttactgctaatttaaaatatatactccgtgtaaatatttatgtaatgtaaacatagcacacattataaaactataatattatcttttatcaaaaaaagattgcgttctatatgcccattttaccccgggaaaaaggtctttattttcctttgaaatgaggagtagcatttgattttgccagggaacttaaaattatttcaaggtcccagtcgtacgtggcatggagatttatgacaaatatgtaatctgtttatttgtcacccaacttggatgacttctaaatgtttcttctttgtagctcttgattttgcttgggtttcccccgacccatgcccaaatagtaaaaaacaaaacaaaaccaaaaaacaatgtctgagtcatgtttgctccagtcagggaataccaacgtgctgacagacagctctggtttttaaaaaatcttactgtatgtcacttgcaactttgaagaacattcatgcgttagtggactgcatttggaagaaaacaaaaaggagaaaaaaacccccaccaagttgtggctcaagtccctctgccatttgctgcagtgagttttcctattccattttgctggggagaaggcatgctttacagaacacatcaaactgtccgaaaaaggctgtctgcatccctcatgtttataagagaaggatttctttccccttccttcacgtatcaaagaagtcactcggggaggaaataaaccataattaggcatgagcgagcgagcagacagaccccttgctctgccttccctgtccccgcccaccaggcaaccgtcctgggcgcaaccgaggagcgggttgtctccgcagcagctgcagcgagcgcgcgcccacgcccgagcccgcgcccgccgccaggatctgggcggcggcgaggctagcccgggggcgcgctcgctcgggagcgcgctcatgcagcggttttcttctcccacaatccagaggcagctgcacgggaggggcggggagtcggcggaaggatatcggcgcggagggagcagcgcgctccctttgacggcggcccccggcattggcgggcggcgctggcgggcggcgaggggtggggtgtgatgcggcactgcggttctgaggccgttactccggcttctccatagagggcggagaaggctggagcgcggcggtgattttgtgccagggattcccagagacgcgctgaaaggctggcagggcttaggaagctggggggttagggacacacattcaagcccccacccccgggaggggaagggggctggaggcgaggcttgagggcggcggaggaatggtgtctgctcggggggaaggggcgagccctgcctgttggtactgaggggctgcgggcagtggaggctccgcgggtcgaaagcggctccatgcccatcggtgggtggaacgtgtagaggtcggaacgccgaggtcgagtctggtggcgcctcggtatccttaacgtggtctctgtttaacgtatttcatttagcccccgttgggattgattcattgggagcagtttcgctggtctggatcctccaggagctggacaaccttgacgggctttttgtcttgggttccagccccctttcccttcctcctcctccagatgccttttctctgcccctcctcgcccggtacagacatttccagcgcaggctgctgctcgtggtgtccgtcgtcgaagccacttcttgggatttcggctcgtttcactctggggtgttttttgaggagggagagtgcccccctcctccacgatgggatttttctcccttgccgaaatggactttcattgatttctacttacttccacgtttagtgaccaattccctaggcgtatttttgtggtagttccttttttcaaatacatactctgtaaaatggagaacgaaatttttactccccttctggagcagttcatgaccagccctttggtcacttgggttaaaacgtttggacctctggccgcaggaaatgggaccaaccttgatgaatatgtggctttggtggatggggtattcttgaaccaggtcatgctccaaattaatcctaaattggagagtcagagagtaaataaaaaagtcaataatgatgcctcacttagaatgcacaatctatccattttggtgagacagataaaattttattaccaggagactttgcagcaattgatcatgatgtcgttgccaaatgtcttaatcattggcaaaaatcccttttctgaacaaggcacagaagaagttaaaaaactgcttttacttttattgggttgtgcagttcagtgtcagaaaaaagaggaatttattgaaagaattcaaggtttagattttgatacaaaagcagcggttgccgcacatattcaagaggtaactcataatcaggaaaatgtgtttgacctgcaatggatggaagtgactgatatgtcgcaggaggacatagaaccactcttgaaaaatatggcattgcatctaaaaagacttatagatgagagagatgaacattcagagactatcatagaactctctgaagagcgggatggtctccattttctaccccatgcctcttcatctgcacagtcaccctgtggttctccaggcatgaagcgaacagaaagtcgacaacatctgtcggtggaactggcagatgctaaagccaagataagaaggcttaggcaggaattggaggaaaagactgagcagttgttggattgtaaacaagaacttgagcaaatggaaatagaactcaaaaggctgcaacaagagaacatgaatttgctttcggatgctcgctctgccagaatgtaccgagatgaattagatgcacttcgagagaaagcagtcagagtcgataagcttgaaagtgaagtcagcagatataaagagagactacatgatattgaattttataaggcaagagttgaggaattaaaagaagacaatcaagttttattagaaacaaaaaccatgttggaagaccaactagagggaactcgtgctcgttctgataaattacatgaattagaaaaagagaacttacaactgaaagctaaacttcatgatatggaaatggaacgagatatggatagaaaaaagattgaagaattaatggaagaaaatatgactttggaaatggcacagaaacaaagtatggatgaatcattacatcttggctgggaactggaacagatatccagaactagtgaactttccgaagcaccccagaaatccctgggccatgaggtgaatgagttgacatcaagtagattattgaagctagagatggaaaatcaaagtttgacaaaaaccgtagaagagcttcggactactgtggattctgtagaaggcaatgcttccaaaatcctgaaaatggaaaaagaaaatcaaaggctcagtaaaaaggttgagattcttgaaaatgagattgttcaagaaaagcaaagtcttcagaattgtcagaatttaagcaaggatctaatgaaggagaaagctcagcttgaaaaaacaatagaaacactgagagaaaattcagagagacagattaagatactggaacaggaaaatgaacatctgaatcaaacagtgtcttccttaaggcagcggtcccagataagtgcagaagcaagagtgaaagacattgaaaaagaaaacaaaattcttcatgaatctatcaaagaaacaagtagcaagctaagcaagattgaatttgaaaaaagacaaattaaaaaagaattggaacattataaagaaaaaggagaacgagctgaagaacttgaaaatgaattgcatcatcttgaaaaagaaaatgaattattacagaaaaaaataactaatttaaaaattacttgtgaaaaaattgaggccttagaacaagaaaattcagagctagaaagagaaaatagaaaattaaaaaaaacattggatagctttaaaaatctgacctttcagttagaatccctagaaaaagagaattcccaacttgatgaggaaaacttagaactgcgaaggaatgtagaatctttgaagtgtgcaagcatgaaaatggctcagctacagctagaaaacaaagaactggaaagtgaaaaagagcaacttaagaagggtttggagctcctgaaagcatctttcaagaaaacagaacgcttagaagttagctaccagggtttagatatagaaaatcaaagactgcaaaaaactttagagaacagcaataaaaaaatccagcaattagagagtgaactacaagacttagagatggaaaatcaaacattgcagaaaaacctagaagaactaaaaatatctagcaaaagactagaacagctggaaaaagaaaataaatcattagagcaagagacttctcaactggaaaaggataagaaacaattggagaaggaaaataagagactccgacaacaagcagaaattaaagataccacattagaagaaaataatgtgaagattggaaatttggaaaaagaaaacaaaaccctatccaaagaaattggtatatataaagaatcttgtgtccgtctgaaagaactagaaaaagaaaataaggagcttgtgaaaagagcaactattgatataaaaacgttggttacactacgtgaggatttggtgagtgaaaagttgaagacccaacagatgaacaatgatctcgaaaaattaactcatgagcttgagaagatagggttaaataaggagcgactcttacatgatgaacaaagtactgatgacagtaggtataaacttttggaatcaaaattagaatccactcttaagaagtctcttgaaataaaagaagaaaaaattgctgctttagaagctcgattagaagaatccacgaattataaccagcaattgcgccaagaacttaaaacaaatgctacactgcaagcagagaagcaagcgttgaaaactcaactgaagcaacttgagacacagaacaataatttgcaggctcagattcttgcacttcagaggcagacagtgtcattacaagaacagaataccactcttcaaacacagaatgccaagcttcaggttgaaaattccacccttaattcccaaagtacctcactcatgaaccagaatgcccaactcctaatccagcagtcttccttagaaaatgaaaatgaatctgtaatcaaagagcgagaagacctaaaatctctctatgattctctgatcaaagatcatgaaaagctggaacttcttcatgaacgtcaggcttcagagtatgaatctcttatctctaaacatggaactctgaagtctgcccacaaaaatcttgaggtggaacatagagaccttgaagaccgttacaatcagttattaaaacagaaaggacagttggaagatttggaaaaaatgctcaaagtagaacaggaaaaaatgctgcttgaaaataaaaatcatgaaacagtagctgcagaatacaagaaactttgtggtgaaaatgataggctgaatcatacctatagtcaacttttaaaagagactgaagttttacaaactgaccataaaaatttgaaaagtcttctgaataattccaaactggaacaaacaagattagaagctgaattttcaaaactaaaggaacaataccaacaattggatattacatcaaccaagctgaataaccagtgtgagttgctaagccaacttaaaggaaatttagaagaagaaaatcggcatctactagatcaaattcagacattaatgctacagaacagaacacttttggagcagaatatggaaagcaaggatctttttcatgttgaacaaagacagtacattgataagttaaatgaattaagacgtcagaaggagaaactagaagagaaaattatggatcaatacaaattttatgacccatctcctcctagaaggagaggcaactggattactctaaaaatgagaaaattgataaagtctaagaaagatattaatcgggaacgccagaaatctctaacattaacacccacccgctcagactccagtgaaggatttcttcagctccctcatcaagacagtcaagatagttcttcagtaggttcaaactctttagaagatggccagaccttggggaccaagaaaagcagcatggttgcactgaaaagactgccctttttgaggaacagaccgaaggataaagacaaaatgaaggcctgctaccgtcgttccatgtccatgaatgacctggtgcagtccatggtcctagcaggacagtggacaggtagtactgagaatttggaggttcctgatgatatttcaacgggtaaaaggagcaactcttctgcaggcttcagatccaagcagttggttaataataaagatactacatcctttgaagacataagtccacaaggtgttagtgatgattctagtacgggatcaagagttcatgcttcaagaccagccagccttgatagtggcagaacatccactagcaatagcaataataatgcttcactacatgaagtcaaagcaggtgcagttaataaccaaagcaggccacaaagccacagcagtggagaatttagcctgcttcatgaccatgaggcttggtccagcagtggtagcagtccaatccagtacttgaaaagacagaccagatcaagcccagtgctccagcacaaaatatctgaaacactggagagtcgacatcacaagatcaaaactggttcccctggaagtgaagttgttactctacaacagtttttggaagaaagcaataagcttacctcagtacagataaagtcctcaagtcaagagaatcttttagatgaagtaatgaaaagtttgtctgtctcttctgactttttgggaaaagacaaaccagttagctgtggtctggccaggtcagtaagtggaaaaaccccaggggacttctatgatagacggacaactaagcctgagtttttgagacctggtcctcgaaaaactgaagatacctacttcattagttctgcgggaaaacctacaccaggcactcaaggaaaaataaaattagtaaaagaatcttctctgtcacgacaatcaaaagatagtaacccttatgcaactttacctcgtgcaagcagcgtgatctcaactgccgaaggaactacacgaaggacaagcatccatgattttttgaccaaggacagtagactgcctatatcagttgattcaccaccagctgctgctgacagcaacaccactgcagcatctaatgtggacaaagtacaagaaagcagaaattcaaaaagcaggtctagggagcaacaaagctcctaattctattacccactacatgacatgtgggccaagtgctacacttagtcctgagatgtattttttctttaagtcttgaatgaatacaaaaggagcccattttataatataaaccttgatgtacatgttgagatatttggacaatgaaaatgccttaaaaggaatgcatatggataaagttgcacttataacacccttcaacaaaatctaattttaaattgtctttttcttttctattaagggttttctttttcagtgtctaccattgtacttataactgttattaaataccaaatcaaataata

SEQ ID NO: 359957 - DNA, 4442 bp, Homo sapiens
gaatgctttgtatgaggctctgtttaggctctgagtatgatagtaaaagcaagtctttgcccttatggagcttacaatagttgtcagtttgacaaaataaggaagcaggctatggcagacaattgttagactgataaaagattgacatggtttactaagcatttctaaataaagcttgaaagtaaatttggctgttcatataattagcacacagtcaacaaatgttattactcatgaagtattaatctcaattctattattgaaatctcaacaccccatttactccaaaagcaggtgcagttaataaccaaagcaggccacaaagccacagcagtggagaatttagcctgcttcatgaccatgaggcttggtccagcagtggtagcagtccaatccagtacttgaaaagacagaccagatcaagcccagtgctccagcacaaaatatctgaaacactggagagtcgacatcacaagatcaaaactggttcccctggaagtgaagttgttactctacaacagtttttggaagaaagcaataagcttacctcagtacagataaagtcctcaagtcaagagaatcttttagatgaagtaatgaaaagtttgtctgtctcttctgactttttgggaaaagacaaaccagttagctgtggtctggccaggtcagtaagtggaaaaaccccaggggacttctatgatagacggacaactaagcctgagtttttgagacctggtcctcgaaaaactgaagatacctacttcattagttctgcgggaaaacctacaccaggcactcaaggaaaaataaaattagtaaaagaatcttctctgtcacgacaatcaaaagatagtaacccttatgcaactttacctcgtgcaagcagcgtgatctcaactgccgaaggaactacacgaaggacaagcatccatgattttttgaccaaggacagtagactgcctatatcagttgattcaccaccagctgctgctgacagcaacaccactgcagcatctaatgtggacaaagtacaagaaagcagaaattcaaaaagcaggtctagggagcaacaaagctcctaattctattacccactacatgacatgtgggccaagtgagagaaaagtgtccttcagtttctcagtatgaagcctttatttctgaagtaacaagacacctagcaactataggaatcatttttaaaaatctttaaggagacttttaacagtccttcgtgaatagagcaggcaagaaatacaaaccttcattccttgaatcaaggagcactactggattcaactgccaaaattttttaaaggttttaggacttactataccttgtactgttaagatctactgaataaaggacgttctctcactaaggaccaggtgttttaaggttaagtgtttaaagaagtactccaagaacaatctgcttttttcatcatttgttttatgaatttatccatgtttgcttaatgcttctgctaagtgttagccaaaatctagccatttatatttagttgtgtaaacctaaattaaatgctgtagtattttgtggaatgtactatatagcaagatacagagaaaattgttttggcatgtcagagccttatttggttagcagactgcatgtgttgatactttttttttcttaaagccaattattttgatgcaaaagaaattcagtttataagataaatctgaaaaatccataatgaaataggagttataaaaaatttatagtgatattaatctttccatatttcccattaagcaacactaagcattcataagttaacccatggtaaagagtgtttttctgaaacttttttttagtaagatggtttttcagcaaatggcattcccaagataaagctgttgtgctttaactcatttcttttctttggtattgggttatgtatgcgtgtgcatttttttaacttgagagctgactgttgcttaagaagttttcttatggcaaaaataatgtaaataagttactatgatctgcattttgccagaaactcatttataattaaggctatcatttattaatgatttttttctcctttatgatattacattaaagttgataactgttattggtacttttgaaatatttgtatgcatttgttacctttaaacatttggaagaagcacaaaaaaatagatttagttaacccagggaaacatcaatttttttagtagttccaattttatatcacagttttattttcttatgaaatcaaaaaatgcattgatactcattaatgcaaattcattatttaacatcaatatcagagtaatcttcaaggtctgaaatgagaaacatactgactttttaaaattttaacagtgtacttcttaggctttcattaccagctctgaagaactttttggaataattccatattccatagtgtgtggtttatgagttgtgggtttcatcactaacccagtaaccataagaaaagtctctctctctctctctctctctttctctctccctctttctctctctctttcgtaggccagtagcaatgttgtgttcacagtctaatttccaaaagaccatcaataaaaaagagagcatgtttaaattgaaatggaacttagagaacttgagcttacttacgtacttcaatgccaccggtaacttaggttttaccaccaaatgctgttaacattaaatcattttgaaaatcttggatgaaaggtgctatgtaaatggaaatacaaaggattcttactaacatacaaaaataatgcacaacagaaatatctaaaaccttttccgtagactttgaaacatctctctctgtcataactccctggattcaagtagcacattggtaataggtatcagagcagtctagagacaattgcatgtcaaaaaatgtacattcatttttaggtgggataaaagtaaacatagaaattatgttatggctaaatacagttagtgggtaacttagatttatattagctagcatctaatttgcacaactagaacacatcccagaacaattactgaaaagctgaaatttaatgggtggtgatgtagcccaatgagggcgaatgacattccagcttgacctctccagaacactaatatcctaaaatacagaacatgctgggttaagtgcattagtgcttcaagcagaaaatgctgaaaacaacgtgtaaagtactgaatctgagtaggctgaccctgagaagggacaattaaagagacaaccaagggaacacattgagactacaaaaatatgaataatctcaattatattcatcacacttttttcataccatttcaagaaacgactagacagtagtaaccacatgaatattttactttctccagtataccttgagaagcaaactttgtaggaagccactcttctcccctaaacaacttctgccaaacaataataaagccaactggaaacgaatcggagccattttcattttcctaaccggggcctgacatgctttaaattatctggctgtattctaaatcaacacctaacccctcaaggaaactgaagaatcaatatacagggtaatagctttggctcagagctccaataatgtgcttcagatctgtccatgtggaaatgctttcatccaaatttttaaattggtggttaccaaagagttcacaaaacaggtttgtatgtagcacctttcatgcaaggcatgcaaaaagcctattttaaaatcactgtgcatattatagagttgtagccacctcacaatgaagtactacagcctgtgctgtcttaatggtttatgtcaggaaatgaaaaagatactgtaccaaatctggaattacaatggggagtaataatgtatactaaatgacttttgtattttaagttactttttgtgagtggtgaatttttgtgtttttcttttcagctacacttagtcctgagatgtattttttctttaagtcttgaatgaatacaaaaggagcccattttataatataaaccttgatgtacatgttgagatatttggacaatgaaaatgccttaaaaggaatgcatatggataaagttgcacttataacacccttcaacaaaatctaattttaaattgtctttttcttttctattaagggttttctttttcagtgtctaccattgtacttataactgttattaaataccaaatcaaataatataaaagctgtaacatttcctttaaaactaatgctaataagggatttagagttgaatggcaaaatgtttattacttggcaatacctgatgtcagtcacaggcatccaactcatgacaagagataccactgtttgttttttaaaaaacatttttcattttgtttctccttcaaaaattaagttggactaacattcacgtatcaaactaatataaaaagaaataaaaccaagaggtgatttttgtaaaaactggtta

SEQ ID NO: 359958 - DNA, 4006 bp, Homo sapiens
aaggaataatgttaaagacaacattaatgacatttatagaacacttaactataagctgccatttcatttaaccctattattagccctgctttacacgtgacggaatcgaagcacaaagagactcaataacgtgcgtaggctcacacagctggtgcatattggaaccaggcaggaagacttcagagtccaggttctcaactacccaattaagaaattctgctctttcttaactgtgttatgacaaaaacatttttactgctaatttaaaatatatactccgtgtaaatatttatgtaatgtaaacatagcacacattataaaactataatattatcttttatcaaaaaaagattgcgttctatatgcccattttaccccgggaaaaaggtctttattttcctttgaaatgaggagtagcatttgattttgccagggaacttaaaattatttcaaggtcccagtcgtacgtggcatggagatttatgacaaatatgtaatctgtttatttgtcacccaacttggatgacttctaaatgtttcttctttgtagctcttgattttgcttgggtttcccccgacccatgcccaaatagtaaaaaacaaaacaaaaccaaaaaacaatgtctgagtcatgtttgctccagtcagggaataccaacgtgctgacagacagctctggtttttaaaaaatcttactgtatgtcacttgcaactttgaagaacattcatgcgttagtggactgcatttggaagaaaacaaaaaggagaaaaaaacccccaccaagttgtggctcaagtccctctgccatttgctgcagtgagttttcctattccattttgctggggagaaggcatgctttacagaacacatcaaactgtccgaaaaaggctgtctgcatccctcatgtttataagagaaggatttctttccccttccttcacgtatcaaagaagtcactcggggaggaaataaaccataattaggcatgagcgagcgagcagacagaccccttgctctgccttccctgtccccgcccaccaggcaaccgtcctgggcgcaaccgaggagcgggttgtctccgcagcagctgcagcgagcgcgcgcccacgcccgagcccgcgcccgccgccaggatctgggcggcggcgaggctagcccgggggcgcgctcgctcgggagcgcgctcatgcagcggttttcttctcccacaatccagaggcagctgcacgggaggggcggggagtcggcggaaggatatcggcgcggagggagcagcgcgctccctttgacggcggcccccggcattggcgggcggcgctggcgggcggcgaggggtggggtgtgatgcggcactgcggttctgaggccgttactccggcttctccatagagggcggagaaggctggagcgcggcggtgattttgtgccagggattcccagagacgcgctgaaaggctggcagggcttaggaagctggggggttagggacacacattcaagcccccacccccgggaggggaagggggctggaggcgaggcttgagggcggcggaggaatggtgtctgctcggggggaaggggcgagccctgcctgttggtactgaggggctgcgggcagtggaggctccgcgggtcgaaagcggctccatgcccatcggtgggtggaacgtgtagaggtcggaacgccgaggtcgagtctggtggcgcctcggtatccttaacgtggtctctgtttaacgtatttcatttagcccccgttgggattgattcattgggagcagtttcgctggtctggatcctccaggagctggacaaccttgacgggctttttgtcttgggttccagccccctttcccttcctcctcctccagatgccttttctctgcccctcctcgcccggtacagacatttccagcgcaggctgctgctcgtggtgtccgtcgtcgaagccacttcttgggatttcggctcgtttcactctggggtgttttttgaggagggagagtgcccccctcctccacgatgggatttttctcccttgccgaaatggactttcattgatttctacttacttccacgtttagtgaccaattccctaggcgtatttttgtggtagttccttttttcaaatacatactctgtaaaatggagaacgaaatttttactccccttctggagcagttcatgaccagccctttggtcacttgggttaaaacgtttggacctctggccgcaggaaatgggaccaaccttgatgaatatgtggctttggtggatggggtattcttgaaccaggtcatgctccaaattaatcctaaattggagagtcagagagtaaataaaaaagtcaataatgatgcctcacttagaatgcacaatctatccattttggtgagacagataaaattttattaccaggagactttgcagcaattgatcatgatgtcgttgccaaatgtcttaatcattggcaaaaatcccttttctgaacaaggcacagaagaagttaaaaaactgcttttacttttattgggttgtgcagttcagtgtcagaaaaaagaggaatttattgaaagaattcaaggtttagattttgatacaaaagcagcggttgccgcacatattcaagaggtaactcataatcaggaaaatgtgtttgacctgcaatggatggaagtgactgatatgtcgcaggaggacatagaaccactcttgaaaaatatggcattgcatctaaaaagacttatagatgagagagatgaacattcagagactatcatagaactctctgaagagcgggatggtctccattttctaccccatgcctcttcatctgcacagtcaccctgtggttctccaggcatgaagcgaacagaaagtcgacaacatctgtcggtggaactggcagatgctaaagccaagataagaaggcttaggcaggaattggaggaaaagactgagcagttgttggattgtaaacaagaacttgagcaaatggaaatagaactcaaaaggctgcaacaagagaacatgaatttgctttcggatgctcgctctgccagaatgtaccgagatgaattagatgcacttcgagagaaagcagtcagagtcgataagcttgaaagtgaagtcagcagatataaagagagactacatgatattgaattttataaggcaagagttgaggaattaaaagaagacaatcaagttttattagaaacaaaaaccatgttggaagaccaactagagggaactcgtgctcgttctgataaattacatgaattagaaaaagagaacttacaactgaaagctaaacttcatgatatggaaatggaacgagatatggatagaaaaaagattgaagaattaatggaagaaaatatgactttggaaatggcacagaaacaaagtatggatgaatcattacatcttggctgggaactggaacagatatccagaactagtgaactttccgaagcaccccagaaatccctgggccatgaggtgaatgagttgacatcaagtagattattgaagctagagatggaaaatcaaagtttgacaaaaaccgtagaagagcttcggactactgtggattctgtagaaggcaatgcttccaaaatcctgaaaatggaaaaagaaaatcaaaggctcagtaaaaaggttgagattcttgaaaatgagattgttcaagaaaagcaaagtcttcagaattgtcagaatttaagcaaggatctaatgaaggagaaagctcagcttgaaaaaacaatagaaacactgagagaaaattcagagagacagattaagatactggaacaggaaaatgaacatctgaatcaaacagtgtcttccttaaggcagcggtcccagataagtgcagaagcaagagtgaaagacattgaaaaagaaaacaaaattcttcatgaatctatcaaagaaacaagtagcaagctaagcaagattgaatttgaaaaaagacaaattaaaaaagaattggaacattat

SEQ ID NO: 359959 - DNA, 349 bp, Homo sapiens
taattagccaggtatggtggcaatcgcctatagtcccagctacttaggaggctgaagagggaggattgatagaggctaggaagtcgaggctgcagtgagccgtgatcatgccactgcactccagcctggacaacagagcaaggccttgtctcaaaagaagaaaagaaaagaaaatgtgaaccacagattaggagaaactatctgcaatgcatgtatttgtcaaaggacttgtattcagtataaataactcctacagtaataagaaaataaaaacccaaataagacactgagaaaaagatttgaacagacatttcataaaagatgtatgaatgaccagtaagcatacaaa

SEQ ID NO: 359960 - DNA, 814 bp, Homo sapiens
cccccactctaggcggcgacctcagcgcctccgccccggggcccccgctcacccaggtatcgactccgcagccgggacgggtcctccagcccgagggaccttttcctcacgtcccacaacagccagggacgagaacacagccacgctcccacccggctgccaacgatccctcggcggcgatgtcggccgccggtgcccgaggcctgcgggccacctaccaccggctcctcgataaagtggagctgatgctgcccgagaaattgaggccgttgtacaaccatccagcaggtcccagaacagttttcttctgggctccaattatgaaatgggggttggtgtgtgctggattggctgatatggccagacctgcagaaaaacttagcacagctcaatctgctgttttgatggctacagggtttatttggtcaagatactcacttgtaattattccaaaaaattggagtctgtttgctgttaatttctttgtgggggcagcaggagcctctcagctttttcgtatttggagatataaccaagaactaaaagctaaagcacacaaataaaagagttcctgatcacctgaacaatctagatgtggacaaaaccattgggacctagtttattatttggttattgataaagcaaagctaactgtgtgtttagaaggcactgtaactggtagctagttcttgattcaatagaaaaatgcagcaaacttttaataacagtctctctacatgacttaaggaacttatctatggatattagtaacatttttctaccatttgtccgtaataaaccatacttgctcgta

SEQ ID NO: 359961 - DNA, 880 bp, Homo sapiens
ggccaatcatggcgggcagctcggcctgcgcaagcgcgctgccagcagggcgcagcgcagacttggtgaggtgattattttggcacctgttgccatggctcctccctctctcctgccgggggccggaggcggaccgggggctggcagtcggcagcctccgccccctcaaccttcgcggggcgcgggccgcagcttttcggttcacagcgggcagggaaagccgcgggaagggtactccaggcgagaggcggacgcgagtcgtcgtggcaggaaaagtgactagctccccttcgttgtcagccagggacgagaacacagccacgctcccacccggctgccaacgatccctcggcggcgatgtcggccgccggtgcccgaggcctgcgggccacctaccaccggctcctcgataaagtggagctgatgctgcccgagaaattgaggccgttgtacaaccatccagcaggtcccagaacagttttcttctgggctccaattatgaaatgggggttggtgtgtgctggattggctgatatggccagacctgcagaaaaacttagcacagctcaatctgctgttttgatggctacagatataaccaagaactaaaagctaaagcacacaaataaaagagttcctgatcacctgaacaatctagatgtggacaaaaccattgggacctagtttattatttggttattgataaagcaaagctaactgtgtgtttagaaggcactgtaactggtagctagttcttgattcaatagaaaaatgcagcaaacttttaataacagtctctctacatgacttaaggaacttatctatggatattagtaacatttttctaccatttgtccgtaataaaccatacttgctcgta

SEQ ID NO: 359962 - DNA, 324 bp, Homo sapiens
tattgatgattatttttctttctgttttctttatagatataaccaagaactaaaagctaaagcacacaaataaaagagttcctgatcacctgaacaatctagatgtggacaaaaccattgggacctagtttattatttggttattgataaagcaaagctaactgtgtgtttagaaggcactgtaactggtagctagttcttgattcaatagaaaaatgcagcaaacttttaataacagtctctctacatgacttaaggaacttatctatggatattagtaacatttttctaccatttgtccgtaataaaccatacttgctcgta

SEQ ID NO: 359963 - DNA, 2386 bp, Homo sapiens
ggccaatcatggcgggcagctcggcctgcgcaagcgcgctgccagcagggcgcagcgcagacttggtgaggtgattattttggcacctgttgccatggctcctccctctctcctgccgggggccggaggcggaccgggggctggcagtcggcagcctccgccccctcaaccttcgcggggcgcgggccgcagcttttcggttcacagcgggcagggaaagccgcgggaagggtactccaggcgagaggcggacgcgagtcgtcgtggcaggaaaagtgactagctccccttcgttgtcagccagggacgagaacacagccacgctcccacccggctgccaacgatccctcggcggcgatgtcggccgccggtgcccgaggcctgcgggccacctaccaccggctcctcgataaagtggagctgatgctgcccgagaaattgaggccgttgtacaaccatccagcaggtcccagaacagttttcttctgggctccaattatgaaatgggggttggtgtgtgctggattggctgatatggccagacctgcagaaaaacttagcacagctcaatctgctgttttgatggctacagggtttatttggtcaagatactcacttgtaattattccaaaaaattggagtctgtttgctgttaatttctttgtgggggcagcaggagcctctcagctttttcgtatttggagatataaccaagaactaaaagctaaagcacacaaataaaagagttcctgatcacctgaacaatctagatgtggacaaaaccattgggacctagtttattatttggttattgataaagcaaagctaactgtgtgtttagaaggcactgtaactggtagctagttcttgattcaatagaaaaatgcagcaaacttttaataacagtctctctacatgacttaaggaacttatctatggatattagtaacatttttctaccatttgtccgtaataaaccatacttgctcgtatataccccctgcctccttctgttccagtcagccaacatatgtacataaaagaacacacaaattcaagaagttggaagattaaattatctgcttatttagtgtaggatggtcaggtagctagctataagtgaaaggaaattttgctgaagagactgagaaatgggtagtggaatgactatcaagatgacctcaaactatttaaaaacattttaacttgccatgaagaatcttgatgatttttgtataaatgttgtataaaattcttttacagctacagatttttaaataggatcattgtaaagattaatgagataatgttttaacatagtgcctggtccatgataagtgttaaatttttcaattaccctcagtaactgataatgtagcagaaaatactctatattcagacagacctgaatttgaatcccagctctatgacttatgctgttgtacttttttttttttttttttttgagacagggtctcgctctgtggcccaggctggagtgcagtggcacaatctcggctcactgcaaaccctacctcctgggctcaagtgatcctcctgcctcagcctcccgagcagctgggactacaggcacacaccaccacacccagctaatttttgtatttttttagaggtaggttttgtcatgttgcccaggctggtctcgaactcctgggctcaggtgatctgcccgcctcgtcctgtcaaagtgctggaatacaggcatgagccaccatacccagcctatgctgtgactttagacaagttaggaaagtacctagcagagtacctgggacataagtaggttttctgtaaatgtttgtgacctttggctccgttgtgaggagagactgagcatacattactccacgctacaaataattaactatctatttgatttgactttcagtgtggagtgcagagctttttttctaaaagtgctaataaagccagtcctcattaaaaatatagtcagatgagtcagcaaagcaagttatttcaaaatttgaagaaatgagacaaaacaactttttgagtaatactataacctatgaaaatttggcagttagcaattgaaaaccttgtactttatcatctgtcccttaaccatggcctaccattgaggagaaaagattagagagcttgacataggccacaatgaagaggttctgaagagtcaaactattattgctttcatttcataaaccacactgttaaattcatttgtgtgtttggcatgggtgtgcacacatgtgtttcctaggttaagcatttaggaaaaacattatgaaatatgacatagacacaaaaaagtttattaaaaatttatgtgagcttggtgtttcacttccttttcattaaaacctcttctgtgcggggtctccta

SEQ ID NO: 359964 - DNA, 2342 bp, Homo sapiens
  misc_feature (2339)..(2342): n is a, c, g, or t
ggccaatcatggcgggcagctcggcctgcgcaagcgcgctgccagcagggcgcagcgcagacttggtgaggtgattattttggcacctgttgccatggctcctccctctctcctgccgggggccggaggcggaccgggggctggcagtcggcagcctccgccccctcaaccttcgcggggcgcgggccgcagcttttcggttcacagcgggcagggaaagccgcgggaagggtactccaggcgagaggcggacgcgagtcgtcgtggcaggaaaagtgactagctccccttcgttgtcagccagggacgagaacacagccacgctcccacccggctgccaacgatccctcggcggcgatgtcggccgccggtgcccgaggcctgcgggccacctaccaccggctcctcgataaagtggagctgatgctgcccgagaaattgaggccgttgtacaaccatccagcaggtcccagaacagttttcttctgggctccaattatgaaatgggggttggtgtgtgctggattggctgatatggccagacctgcagaaaaacttagcacagctcaatctgctgttttgatggctacagggtttatttggtcaagatactcacttgtaattattccaaaaaattggagtctgtttgctgttaatttctttgtgggggcagcaggagcctctcagctttttcgtatttggagatataaccaagaactaaaagctaaagcacacaaataaaagagttcctgatcacctgaacaatctagatgtggacaaaaccattgggacctagtttattatttggttattgataaagcaaagctaactgtgtgtttagaaggcactgtaactggtagctagttcttgattcaatagaaaaatgcagcaaacttttaataacagtctctctacatgacttaaggaacttatctatggatattagtaacatttttctaccatttgtccgtaataaaccatacttgctcgtatataccccctgcctccttctgttccagtcagccaacatatgtacataaaagaacacacaaattcaagaagttggaagattaaattatctgcttatttagtgtaggatggtcaggtagctagctataagtgaaaggaaattttgctgaagagactgagaaatgggtagtggaatgactatcaagatgacctcaaactatttaaaaacattttaacttgccatgaagaatcttgatgatttttgtataaatgttgtataaaattcttttacagctacagatttttaaataggatcattgtaaagattaatgagataatgttttaacatagtgcctggtccatgataagtgttaaatttttcaattaccctcagtaactgataatgtagcagaaaatactctatattcagacagacctgaatttgaatcccagctctatgacttatgctgttgtacttttttttttttttttttttgagacagggtctcgctctgtggcccaggctggagtgcagtggcacaatctcggctcactgcaaaccctacctcctgggctcaagtgatcctcctgcctcagcctcccgagcagctgggactacaggcacacaccaccacacccagctaatttttgtatttttttagaggtaggttttgtcatgttgcccaggctggtctcgaactcctgggctcaggtgatctgcccgcctcgtcctgtcaaagtgctggaatacaggcatgagccaccatacccagcctatgctgtgactttagacaagttaggaaagtacctagcagagtacctgggacataagtaggttttctgtaaatgtttgtgacctttggctccgttgtgaggagagactgagcatacattactccacgctacaaataattaactatctatttgatttgactttcagtgtggagtgcagagctttttttctaaaagtgctaataaagccagtcctcattaaaaatatagtcagatgagtcagcaaagcaagttatttcaaaatttgaagaaatgagacaaaacaactttttgagtaatactataacctatgaaaatttggcagttagcaattgaaaaccttgtactttatcatctgtcccttaaccatggcctaccattgaggagaaaagattagagagcttgacataggccacaatgaagaggttctgaagagtcaaactattattgctttcatttcataaaccacactgttaaattcatttgtgtgtttggcatgggtgtgcacacatgtgtttcctaggttaagcatttaggaaaaaccccatccttcaactctggaggttccacaaggctataaaggtgagatgttactgcannnn

SEQ ID NO: 359965 - DNA, 878 bp, Homo sapiens
ggccaatcatggcgggcagctcggcctgcgcaagcgcgctgccagcagggcgcagcgcagacttggtgaggtgattattttggcacctgttgccatggctcctccctctctcctgccgggggccggaggcggaccgggggctggcagtcggcagcctccgccccctcaaccttcgcggggcgcgggccgcagcttttcggttcacagcgggcagggaaagccgcgggaagggtactccaggcgatgtcggccgccggtgcccgaggcctgcgggccacctaccaccggctcctcgataaagtggagctgatgctgcccgagaaattgaggccgttgtacaaccatccagcaggtcccagaacagttttcttctgggctccaattatgaaatgggggttggtgtgtgctggattggctgatatggccagacctgcagaaaaacttagcacagctcaatctgctgttttgatggctacagggtttatttggtcaagatactcacttgtaattattccaaaaaattggagtctgtttgctgttaatttctttgtgggggcagcaggagcctctcagctttttcgtatttggagatataaccaagaactaaaagctaaagcacacaaataaaagagttcctgatcacctgaacaatctagatgtggacaaaaccattgggacctagtttattatttggttattgataaagcaaagctaactgtgtgtttagaaggcactgtaactggtagctagttcttgattcaatagaaaaatgcagcaaacttttaataacagtctctctacatgacttaaggaacttatctatggatattagtaacatttttctaccatttgtccgtaataaaccatacttgctcgta

SEQ ID NO: 359966 - DNA, 643 bp, Homo sapiens
ggccaatcatggcgggcagctcggcctgcgcaagcgcgctgccagcagggcgcagcgcagacttggtgaggtgattattttggcacctgttgccatggctcctccctctctcctgccgggggccggaggcggaccgggggctggcagtcggcagcctccgccccctcaaccttcgcggggcgcgggccgcagcttttcggttcacagcgggcagggaaagccgcgggaagggtactccaggcgagaggcggacgcgagtcgtcgtggcaggaaaagtgactagctccccttcgttgtcagccagggacgagaacacagccacgctcccacccggctgccaacgatccctcggcggcgatgtcggccgccggtgcccgaggcctgcgggccacctaccaccggctcctcgataaagtggagctgatgctgcccgagaaattgaggccgttgtacaaccatccagcaggtcccagaacagttttcttctgggctccaattatgaaatgggggttggtgtgtgctggattggctgatatggccagacctgcagaaaaacttagcacagctcaatctgctgttttgatggctacaggttatttgtcaagatactcacttgtatattccgggatcctctaggcacctc

SEQ ID NO: 359967 - DNA, 992 bp, Homo sapiens
ggccaatcatggcgggcagctcggcctgcgcaagcgcgctgccagcagggcgcagcgcagacttggtgaggtgattattttggcacctgttgccatggctcctccctctctcctgccgggggccggaggcggaccgggggctggcagtcggcagcctccgccccctcaaccttcgcggggcgcgggccgcagcttttcggttcacagcgggcagggaaagccgcgggaagggtactccaggcgagaggcggacgcgagtcgtcgtggcaggaaaagtgactagctccccttcgttgtcagccagggacgagaacacagccacgctcccacccggctgccaacgatccctcggcggcgatgtcggccgccggtgcccgaggcctgcgggccacctaccaccggctcctcgataaagtggagctgatgctgcccgagaaattgaggccgttgtacaaccatccagcaggtcccagaacagttttcttctgggctccaattatgaaatgggggttggtgtgtgctggattggctgatatggccagacctgcagaaaaacttagcacagctcaatctgctgttttgatggctacagggtttatttggtcaagatactcacttgtaattattccaaaaaattggagtctgtttgctgttaatttctttgtgggggcagcaggagcctctcagctttttcgtatttggagatataaccaagaactaaaagctaaagcacacaaataaaagagttcctgatcacctgaacaatctagatgtggacaaaaccattgggacctagtttattatttggttattgataaagcaaagctaactgtgtgtttagaaggcactgtaactggtagctagttcttgattcaatagaaaaatgcagcaaacttttaataacagtctctctacatgacttaaggaacttatctatggatattagtaacatttttctaccatttgtccgtaataaaccatacttgctcgta

SEQ ID NO: 359968 - DNA, 748 bp, Homo sapiens
cccccactctaggcggcgacctcagcgcctccgccccggggcccccgctcacccagccagggacgagaacacagccacgctcccacccggctgccaacgatccctcggcggcgatgtcggccgccggtgcccgaggcctgcgggccacctaccaccggctcctcgataaagtggagctgatgctgcccgagaaattgaggccgttgtacaaccatccagcaggtcccagaacagttttcttctgggctccaattatgaaatgggggttggtgtgtgctggattggctgatatggccagacctgcagaaaaacttagcacagctcaatctgctgttttgatggctacagggtttatttggtcaagatactcacttgtaattattccaaaaaattggagtctgtttgctgttaatttctttgtgggggcagcaggagcctctcagctttttcgtatttggagatataaccaagaactaaaagctaaagcacacaaataaaagagttcctgatcacctgaacaatctagatgtggacaaaaccattgggacctagtttattatttggttattgataaagcaaagctaactgtgtgtttagaaggcactgtaactggtagctagttcttgattcaatagaaaaatgcagcaaacttttaataacagtctctctacatgacttaaggaacttatctatggatattagtaacatttttctaccatttgtccgtaataaaccatacttgctcgta

SEQ ID NO: 359969 - DNA, 2334 bp, Homo sapiens
ggccaatcatggcgggcagctcggcctgcgcaagcgcgctgccagcagggcgcagcgcagacttggtgaggtgattattttggcacctgttgccatggctcctccctctctcctgccgggggccggaggcggaccgggggctggcagtcggcagcctccgccccctcaaccttcgcggggcgcgggccgcagcttttcggttcacagcgggcagggaaagccgcgggaagggtactccaggcgagaggcggacgcgagtcgtcgtggcaggaaaagtgactagctccccttcgttgtcagccagggacgagaacacagccacgctcccacccggctgccaacgatccctcggcggcgatgtcggccgccggtgcccgaggcctgcgggccacctaccaccggctcctcgataaagtggagctgatgctgcccgagaaattgaggccgttgtacaaccatccagcaggtcccagaacagttttcttctgggctccaattatgaaatgggggttggtgtgtgctggattggctgatatggccagacctgcagaaaaacttagcacagctcaatctgctgttttgatggctacagggtttatttggtcaagatactcacttgtaattattccaaaaaattggagtctgtttgctgttaatttctttgtgggggcagcaggagcctctcagctttttcgtatttggagatataaccaagaactaaaagctaaagcacacaaataaaagagttcctgatcacctgaacaatctagatgtggacaaaaccattgggacctagtttattatttggttattgataaagcaaagctaactgtgtgtttagaaggcactgtaactggtagctagttcttgattcaatagaaaaatgcagcaaacttttaataacagtctctctacatgacttaaggaacttatctatggatattagtaacatttttctaccatttgtccgtaataaaccatacttgctcgtatataccccctgcctccttctgttccagtcagccaacatatgtacataaaagaacacacaaattcaagaagttggaagattaaattatctgcttatttagtgtaggatggtcaggtagctagctataagtgaaaggaaattttgctgaagagactgagaaatgggtagtggaatgactatcaagatgacctcaaactatttaaaaacattttaacttgccatgaagaatcttgatgatttttgtataaatgttgtataaaattcttttacagctacagatttttaaataggatcattgtaaagattaatgagataatgttttaacatagtgcctggtccatgataagtgttaaatttttcaattaccctcagtaactgataatgtagcagaaaatactctatattcagacagacctgaatttgaatcccagctctatgacttatgctgttgtacttttttttttttttttttttgagacagggtctcgctctgtggcccaggctggagtgcagtggcacaatctcggctcactgcaaaccctacctcctgggctcaagtgatcctcctgcctcagcctcccgagcagctgggactacaggcacacaccaccacacccagctaatttttgtatttttttagaggtaggttttgtcatgttgcccaggctggtctcgaactcctgggctcaggtgatctgcccgcctcgtcctgtcaaagtgctggaatacaggcatgagccaccatacccagcctatgctgtgactttagacaagttaggaaagtacctagcagagtacctgggacataagtaggttttctgtaaatgtttgtgacctttggctccgttgtgaggagagactgagcatacattactccacgctacaaataattaactatctatttgatttgactttcagtgtggagtgcagagctttttttctaaaagtgctaataaagccagtcctcattaaaaatatagtcagatgagtcagcaaagcaagttatttcaaaatttgaagaaatgagacaaaacaactttttgagtaatactataacctatgaaaatttggcagttagcaattgaaaaccttgtactttatcatctgtcccttaaccatggcctaccattgaggagaaaagattagagagcttgacataggccacaatgaagaggttctgaagagtcaaactattattgctttcatttcataaaccacactgttaaattcatttgtgtgtttggcatgggtgtgcacacatgtgtttcctaggttaagcatttaggaaaaacattatgaaatatgacatagacacaaaaaagtttattaaaaatttatgtgag

SEQ ID NO: 359970 - DNA, 859 bp, Homo sapiens
gactaaccagaacatccaaagatcagcaacagtctcctccctcagcccccctccaacaggaggaggcggaggcggaggcgatggcgactcctccctctcctcgtcctggataccctccccgccaaccctttctcgcgagatgacgaccaccctggggactgaggctgccagggacgagaacacagccacgctcccacccggctgccaacgatccctcggcggcgatgtcggccgccggtgcccgaggcctgcgggccacctaccaccggctcctcgataaagtggagctgatgctgcccgagaaattgaggccgttgtacaaccatccagcaggtcccagaacagttttcttctgggctccaattatgaaatgggggttggtgtgtgctggattggctgatatggccagacctgcagaaaaacttagcacagctcaatctgctgttttgatggctacagggtttatttggtcaagatactcacttgtaattattccaaaaaattggagtctgtttgctgttaatttctttgtgggggcagcaggagcctctcagctttttcgtatttggagatataaccaagaactaaaagctaaagcacacaaataaaagagttcctgatcacctgaacaatctagatgtggacaaaaccattgggacctagtttattatttggttattgataaagcaaagctaactgtgtgtttagaaggcactgtaactggtagctagttcttgattcaatagaaaaatgcagcaaacttttaataacagtctctctacatgacttaaggaacttatctatggatattagtaacatttttctaccatttgtccgtaataaaccatacttgctcgta

SEQ ID NO: 359971 - DNA, 1003 bp, Homo sapiens
ggccaatcatggcgggcagctcggcctgcgcaagcgcgctgccagcagggcgcagcgcagacttggtgaggtgattattttggcacctgttgccatggctcctccctctctcctgccgggggccggaggcggaccgggggctggcagtcggcagcctccgccccctcaaccttcgcggggcgcgggccgcagcttttcggttcacagcgggcagggaaagccgcgggaagggtactccaggcgagaggcggacgcgagtcgtcgtggcaggaaaagtgactagctccccttcgttgtcagccagggacgagaacacagccacgctcccacccggctgccaacgatccctcggcggcgatgtcggccgccggtgcccgaggcctgcgggccacctaccaccggctcctcgataaagtggagctgatgctgcccgagaaattgaggccgttgtacaaccatccagcaggtcccagaacagttttcttctgggctccaattatgaaatgggggttggtgtgtgctggattggctgatatggccagacctgcagaaaaacttagcacagctcaatctgctgttttgatggctacagggtttatttggtcaagatactcacttgtaattattccaaaaaattggagtctgtttgctgttaatttctttgtgggggcagcaggagcctctcagctttttcgtatttggagatataaccaagaactaaaagctaaagcacacaaataaaagagttcctgatcacctgaacaatctagatgtggacaaaaccattgggacctagtttattatttggttattgataaagcaaagctaactgtgtgtttagaaggcactgtaactggtagctagttcttgattcaatagaaaaatggtgctcagtaagaacgagttccccgaggtgtacgtgaccaccgttttcgagaaatatgaggaacacttttccgccgtgtgtccgtaatgaacctggctaaatagtatatgaaaaaaa

SEQ ID NO: 359972 - DNA, 336 bp, Homo sapiens
caggcctacgggtggggcgagctccttgcccaaggcagagggtagctggcccgtgagcccaagtcccttgacgctttgtaatcacggacctccacagtgcaggaccccagcacgagatagcgtttcacctcctccaaacgtctctctccaaggagagtcgggaggaaaataccccaaatgcttaccggggctttgctttctcttttttcccccctacatccctgtattctccgaattatttggacactggtcatatattaggttaacttcatttttctaaataaaaaggcttatttcctgaatagaaaagaaacacgtgcttactgcaaacaagca

SEQ ID NO: 359973 - DNA, 682 bp, Homo sapiens
aaaactgttaaggagtcaataacgaaacattcaaagaaacccagccagttacaggacaggctattttgtacgtctttaaaaatacgctactgcattgttatcaatttctaaattcccagtctgaagcaatgtaaaatttacgtagttgtttatcattttaaatgtttacatgatagaaatatttttaaagttcaattctctctcatgttcaaagataatggaacctttccctcaactttgctcgggaatcttcactaattaaaatttatatttctggttcattattgttatttaaatttaaaggaaagagttgataaattggtacatatttataatataatttattcattaatcattggagaggtattgtgctaagagtgaaagagtacaaaattttgagccatgggcaatgacttaaatcctgtttcttttgcttaattagctctttggccttagaaatttatttaacctcctgattttcagtttcttcattaaatacttgatgagtatttgaattaaagtaacaatacttactttatagggttgctgttataattaaataaaacattgcaaggcatgcagcagacactgtatttgacatttatgtggcttttaaaaaaatgtcattaatcctttattaagggccacctcaacacacttgtgatttattttgttcatgggt

SEQ ID NO: 359974 - DNA, 404 bp, Homo sapiens
gcacattctttagcacctactatttgtatcagtcatttgacatttacagtatttaggaagcctgatggccattttttgttttattggatcaaattcttttactatcttttttttttttttaactgagacatcttgcagggcacagagttctctgcaaagatattgttggttctcctggtagaggtgatgaggagggggtcatactgaagtacatctcattcttgcccacctcatgaccatatttccctttaagaattcaaatgatgcatcctccatgatcgatccttaagcacctttgatgtcttgctctcccttgctgaaatggctcacataatgggagctttaactgaaggagagatggagctaggaatataaagatcatttttgcctgggtgtagtggctc

SEQ ID NO: 359975 - DNA, 3697 bp, Homo sapiens
caatgaggaagcctggcaggatggagggcgaggcctggcagctgtagtgcttctgggcagtagaggcgcggggtgcggagctagggcggccgagagccatggcggcgctattggcggcggcggcagtgcgagcccggatcctgcaggtttcttccaaggtgaaatccagtcccacctggtattcagcatcttccttctcttcttcagtgccaactgtaaagctcttcattggtgggaaattcgttgaatccaaaagtgacaaatggatcgatatccacaacccagccaccaatgaggtcattggtcgggtccctcaggccaccaaggcagaaatggatgcagccattgcttcctgcaaacgtgcttttcctgcatgggcagacacttcagtattaagccgccagcaggtcttgctccgctatcaacaacttattaaagaaaacttgaaagaaattgccaagttaatcacattggaacaagggaagaccctagctgatgctgaaggagatgtatttcgaggccttcaggtggttgagcatgcctgtagtgtgacatccctcatgatgggagagaccatgccatccatcaccaaagacatggacctttattcctaccgtctgcctctgggagtgtgtgcaggcattgctccattcaattttcctgccatgatccccctttggatgtttcccatggccatggtgtgtggaaataccttcctaatgaaaccatctgagcgagtccctggagcaactatgcttcttgctaagttgctccaggattctggtgcccctgatggaacattaaacatcatccatggacagcatgaagctgtaaattttatttgcgatcatccggacatcaaagcaatcagctttgtgggatccaacaaggcaggagagtatatcttcgagagaggatcaagacatggcaagagggttcaagccaatatgggagccaagaaccatggggtagtcatgccagatgccaataaggaaaataccctgaaccagctggttggggcagcatttggagctgctggtcagcgctgcatggctctttcaacagcagtccttgtgggagaagccaagaagtggctgccagagctggtggagcatgccaaaaacctgagagtcaatgcaggagatcagcctggagctgatcttggccctctgatcactccccaggccaaagagcgagtctgtaatctgattgatagtggaacaaaggagggagcttccatccttcttgatggacgaaaaattaaagtgaaaggctatgaaaatggcaactttgttggaccaaccatcatctcgaatgtcaagccaaatatgacctgttacaaagaggagatttttggtccagttcttgtggttctggagacagaaacattggatgaagccatccagattgtaaataacaacccatatggaaatggaactgccatcttcaccaccaatggagccactgctcggaaatatgcccacttggtggatgttggacaggtgggagtgaatgtccccattccagtgcctttgccaatgttctcattcaccggctctcgatcctccttcaggggagacaccaatttctatggcaaacagggcatccaattctacactcagttaaagaccattacttctcagtggaaagaagaagatgctactctttcctcacctgctgttgtcatgcctaccatgggccgttagaaacaagtttgtttaagactgactccatcctgagtaatctccctttatttttgaccagcttcatttgtcagctttgctcagatcagatcgatgggattggaatacattgtaactaaaatcttcctcaggactattaacccctgcaaagtttctatagggaactgcctagtgtaacaatgaaaccagatttctcacttgctcttcatacttctattttgaggtaactgttgtaactatgaaatgcttatctgaaagtagtgcttaaacctgatttctaaaaattatcccattttctgatgatttgaaggggagaaaagccagtgtatgtaaagaaaatgttccagccaggcgcggtggctcacgcctgtgattccatcattttgggaggccacagtgggcagattgcttgagcccaggagttgaagaacgtggcgaaaccccgtatctattatttaaaaaaattgaaaaagtaaaaaaagaaaagggaaaaaaaattttttaaagaagatgttccaataattgcaagaagaactcttagatggggaaacaggacagaaataactcaccgcttttggttgatcctcaaacatagcgctacctaaatgccactgggagagacctcctgcaaagttttctttagcccctcttttatcccacaatacacaagatataatccatttttatatatcccaaagttgtggcaacagcttctttcttttctgctcaatgccactttgtttcctagtaattcttacaggcatgagccaccacacccagccagatgcaaataattttcttagaaaattatttcaaaagttattttaggcccagaaatcaaggattgttccaaccatgaaaatgggtaagacacctgccttaagcaaatctaacctgctattacttgccaaattttatatattcttttctcttgcctgtatttctaattagtgatttgtttaatgaagaactcttcatgtagagcaattaactgggcctaagaaatttcgaagctttccatgacataaagtggttaaaaaaaaatgctttgacagtcttcttctgccattagttcaactgcctttacgcttttttttttttttttttttttgagatggagtttcactcttgttgcccaggctagagtgcaatgggcgtgatctgggctcactgcaacctctgcctcccgggttcaagcaattctcctgcctcagcctcctgagtagctgggatttcaggcatacgccaccatgcctggctaatttggtatttttagtagagacagggtttctccatgttggtcaggctggtctcgaactcccgacctcaggtgatctgcctgccttggcctcccaaagtgctgggattacaggtgtgagccaccacccccagccgcctctatgctttttgtttctttgatatatctaaacttaaggtcagaacagaaattcatgtgctgaacagaatggattctttttgcagtaccaatccaattgaatcctctttttattttcctgcgtccttaccagtcactttgatagtgctaactaacctacactatgggggttattcatgaattaagtatgataaaaaaaaaaaaagaccttgaaaatgttgtgtaccctgtggatttgaggcttattactaccacctggctggataaaatgtcaaaaccttcaatcacttaaggtgactggaacttttgtaaaatacacttatgatcctacggggccttttttttttttttttctgctttcctaaatatgaggcaatagaaatttataatttgagactacagtaccccttgttttagctcttatcacagctggcaactggtagtgattttttttgttgttgttttgttttgttttgagatggagtctcgctctgttgcccagggtggagtgcagtggcacgatctcggctcactgcaacctccacctcctgggttcaagtaattctcctgcctcagtctcccgagtagctgggattac

SEQ ID NO: 359976 - DNA, 3491 bp, Homo sapiens
caatgaggaagcctggcaggatggagggcgaggcctggcagctgtagtgcttctgggcagtagaggcgcggggtgcggagctagggcggccgagagccatggcggcgctattggcggcggcggcagtgcgagcccggatcctgcaggtttcttccaaggtgaaatccagtcccacctggtattcagcatcttccttctcttcttcagtgccaactgtaaagctcttcattggtgggaaattcgttgaatccaaaagtgacaaatggatcgatatccacaacccagccaccaatgaggtcattggtcgggtccctcaggccaccaaggcagaaatggatgcagccattgcttcctgcaaacgtgcttttcctgcatgggcagacacttcagtattaagccgccagcaggtcttgctccgctatcaacaacttattaaagaaaacttgaaagaaattgccaagttaatcacattggaacaagggaagaccctagctgatgctgaaggagatgtatttcgaggccttcaggtggttgagcatgcctgtagtgtgacatccctcatgatgggagagaccatgccatccatcaccaaagacatggacctttattcctaccgtctgcctctgggagtgtgtgcaggcattgctccattcaattttcctgccatgatccccctttggatgtttcccatggccatggtgtgtggaaataccttcctaatgaaaccatctgagcgagtccctggagcaactatgcttcttgctaagttgctccaggattctggtgcccctgatggaacattaaacatcatccatggacagcatgaagctgtaaattttatttgcgatcatccggacatcaaagcaatcagctttgtgggatccaacaaggcaggagagtatatcttcgagagaggatcaagacatggcaagagggttcaagccaatatgggagccaagaaccatggggtagtcatgccagatgccaataaggaaaataccctgaaccagctggttggggcagcatttggagctgctggtcagcgctgcatggctctttcaacagcagtccttgtgggagaagccaagaagtggctgccagagctggtggagcatgccaaaaacctgagagtcaatgcaggagatcagcctggagctgatcttggccctctgatcactccccaggccaaagagcgagtctgtaatctgattgatagtggaacaaaggagggagcttccatccttcttgatggacgaaaaattaaagtgaaaggctatgaaaatggcaactttgttggaccaaccatcatctcgaatgtcaagccaaatatgacctgttacaaagaggagatttttggtccagttcttgtggttctggagacagaaacattggatgaagccatccagattgtaaataacaacccatatggaaatggaactgccatcttcaccaccaatggagccactgctcggaaatatgcccacttggtggatgttggacaggtgggagtgaatgtccccattccagtgcctttgccaatgttctcattcaccggctctcgatcctccttcaggggagacaccaatttctatggcaaacagggcatccaattctacactcagttaaagaccattacttctcagtggaaagaagaagatgctactctttcctcacctgctgttgtcatgcctaccatgggccgttagaaacaagtttgtttaagactgactccatcctgagtaatctccctttatttttgaccagcttcatttgtcagctttgctcagatcagatcgatgggattggaatacattgtaactaaaatcttcctcaggactattaacccctgcaaagtttctatagggaactgcctagtgtaacaatgaaaccagatttctcacttgctcttcatacttctattttgaggtaactgttgtaactatgaaatgcttatctgaaagtagtgcttaaacctgatttctaaaaattatcccattttctgatgatttgaaggggagaaaagccagtgtatgtaaagaaaatgttccagccaggcgcggtggctcacgcctgtgattccatcattttgggaggccacagtgggcagattgcttgagcccaggagttgaagaacgtggcgaaaccccgtatctattatttaaaaaaattgaaaaagtaaaaaaagaaaagggaaaaaaaattttttaaagaagatgttccaataattgcaagaagaactcttagatggggaaacaggacagaaataactcaccgcttttggttgatcctcaaacatagcgctacctaaatgccactgggagagacctcctgcaaagttttctttagcccctcttttatcccacaatacacaagatataatccatttttatatatcccaaagttgtggcaacagcttctttcttttctgctcaatgccactttgtttcctagtaattcttacaggcatgagccaccacacccagccagatgcaaataattttcttagaaaattatttcaaaagttattttaggcccagaaatcaaggattgttccaaccatgaaaatgggtaagacacctgccttaagcaaatctaacctgctattacttgccaaattttatatattcttttctcttgcctgtatttctaattagtgatttgtttaatgaagaactcttcatgtagagcaattaactgggcctaagaaatttcgaagctttccatgacataaagtggttaaaaaaaaatgctttgacagtcttcttctgccattagttcaactgcctttacgcttttttttttttttttttttttggaaagggggttcccccatgtgttgtggccaggatgtggttcttcaattctctccgtgaccttatatgtgatctccgcccactcttgcggcctctcccaaagggtgcgtgggatttccggggcgttgacccactgcgaccctgtggcccgtggtgataggtgatatatcttataatctccatatctccacacacaacctttattgggcgccggggttatcacatataacagggggtctcatatatattggcgtccatatattttctcccacaagtgtggagaatttacagtgttgttatgtctcacacgagaagaatttctccccataaacacatttttttctcctctatatatatttttaaagcagggggggagaatcctacagctgtctcttataaaaaagaaaaaagaccacaccagcttatatatctccagaaaacacgcgtggtgagaaatggtgactcctcctataatgattttttaggagacaaaacccaaactcctccttatacatcctgctggtgggggccccaaaaatattatttgttggggggcgttcgactctccagaagaagatatctcccctataatatattcgtcctttttaagacgactgtgcaaaacaacaaagaaatctcttctcttatcgagggatttataatattttccccagggtt

SEQ ID NO: 359977 - DNA, 1899 bp, Homo sapiens
caatgaggaagcctggcaggatggagggcgaggcctggcagctgtagtgcttctgggcagtagaggcgcggggtgcggagctagggcggccgagagccatggcggcgctattggcggcggcggcagtgcgagcccggatcctgcaggtttcttccaaggtgaaatccagtcccacctggtattcagcatcttccttctcttcttcagtgccaactgtaaagctcttcattggtgggaaattcgttgaatccaaaagtgacaaatggatcgatatccacaacccagccaccaatgaggtcattggtcgggtccctcaggccaccaaggcagaaatggatgcagccattgcttcctgcaaacgtgcttttcctgcatgggcagacacttcagtattaagccgccagcaggtcttgctccgctatcaacaacttattaaagaaaacttgaaagaaattgccaagttaatcacattggaacaagggaagaccctagctgatgctgaaggagatgtatttcgaggccttcaggtggttgagcatgcctgtagtgtgacatccctcatgatgggagagaccatgccatccatcaccaaagacatggacctttattcctaccgtctgcctctgggagtgtgtgcaggcattgctccattcaattttcctgccatgatccccctttggatgtttcccatggccatggtgtgtggaaataccttcctaatgaaaccatctgagcgagtccctggagcaactatgcttcttgctaagttgctccaggattctggtgcccctgatggaacattaaacatcatccatggacagcatgaagctgtaaattttatttgcgatcatccggacatcaaagcaatcagctttgtgggatccaacaaggcaggagagtatatcttcgagagaggatcaagacatggcaagagggttcaagccaatatgggagccaagaaccatggggtagtcatgccagatgccaataaggaaaataccctgaaccagctggttggggcagcatttggagctgctggtcagcgctgcatggctctttcaacagcagtccttgtgggagaagccaagaagtggctgccagagctggtggagcatgccaaaaacctgagagtcaatgcaggagatcagcctggagctgatcttggccctctgatcactccccaggccaaagagcgagtctgtaatctgattgatagtggaacaaaggagggagcttccatccttcttgatggacgaaaaattaaagtgaaaggctatgaaaatggcaactttgttggaccaaccatcatctcgaatgtcaagccaaatatgacctgttacaaagaggagatttttggtccagttcttgtggttctggagacagaaacattggatgaagccatccagattgtaaataacaacccatatggaaatggaactgccatcttcaccaccaatggagccactgctcggaaatatgcccacttggtggatgttggacaggtgggagtgaatgtccccattccagtgcctttgccaatgttctcattcaccggctctcgatcctccttcaggggagacaccaatttctatggcaaacagggcatccaattctacactcagttaaagaccattacttctcagtggaaagaagaagatgctactctttcctcacctgctgttgtcatgcctaccatgggccgttagaaacaagtttgtttaagactgactccatcctgagtaatctccctttatttttgaccagcttcatttgtcagctttgctcagatcagatcgatgggattggaatacattgtaactaaaatcttcctcaggactattaacccctgcaaagtttctatagggaactgcctagtgtaacaatgaaaccagatttctc

SEQ ID NO: 359978 - DNA, 2449 bp, Homo sapiens
caatgaggaagcctggcaggatggagggcgaggcctggcagctgtagtgcttctgggcagtagaggcgcggggtgcggagctagggcggccgagagccatggcggcgctattggcggcggcggcagtgcgagcccggatcctgcaggtttcttccaaggtgaaatccagtcccacctggtattcagcatcttccttctcttcttcagtgccaactgtaaagctcttcattggtgggaaattcgttgaatccaaaagtgacaaatggatcgatatccacaacccagccaccaatgaggtcattggtcgggtccctcaggccaccaaggcagaaatggatgcagccattgcttcctgcaaacgtgcttttcctgcatgggcagacacttcagtattaagccgccagcaggtcttgctccgctatcaacaacttattaaagaaaacttgaaagaaattgccaagttaatcacattggaacaagggaagaccctagctgatgctgaaggagatgtatttcgaggccttcaggtggttgagcatgcctgtagtgtgacatccctcatgatgggagagaccatgccatccatcaccaaagacatggacctttattcctaccgtctgcctctgggagtgtgtgcaggcattgctccattcaattttcctgccatgatccccctttggatgtttcccatggccatggtgtgtggaaataccttcctaatgaaaccatctgagcgagtccctggagcaactatgcttcttgctaagttgctccaggattctggtgcccctgatggaacattaaacatcatccatggacagcatgaagctgtaaattttatttgcgatcatccggacatcaaagcaatcagctttgtgggatccaacaaggcaggagagtatatcttcgagagaggatcaagacatggcaagagggttcaagccaatatgggagccaagaaccatggggtagtcatgccagatgccaataaggaaaataccctgaaccagctggttggggcagcatttggagctgctggtcagcgctgcatggctctttcaacagcagtccttgtgggagaagccaagaagtggctgccagagctggtggagcatgccaaaaacctgagagtcaatgcaggagatcagcctggagctgatcttggccctctgatcactccccaggccaaagagcgagtctgtaatctgattgatagtggaacaaaggagggagcttccatccttcttgatggacgaaaaattaaagtgaaaggctatgaaaatggcaactttgttggaccaaccatcatctcgaatgtcaagccaaatatgacctgttacaaagaggagatttttggtccagttcttgtggttctggagacagaaacattggatgaagccatccagattgtaaataacaacccatatggaaatggaactgccatcttcaccaccaatggagccactgctcggaaatatgcccacttggtggatgttggacaggtgggagtgaatgtccccattccagtgcctttgccaatgttctcattcaccggctctcgatcctccttcaggggagacaccaatttctatggcaaacagggcatccaattctacactcagttaaagaccattacttctcagtggaaagaagaagatgctactctttcctcacctgctgttgtcatgcctaccatgggccgttagaaacaagtttgtttaagactgactccatcctgagtaatctccctttatttttgaccagcttcatttgtcagctttgctcagatcagatcgatgggattggaatacattgtaactaaaatcttcctcaggactattaacccctgcaaagtttctatagggaactgcctagtgtaacaatgaaaccagatttctcacttgctcttcatacttctattttgaggtaactgttgtaactatgaaatgcttatctgaaagtagtgcttaaacctgatttctaaaaattatcccattttctgatgatttgaaggggagaaaagccagtgtatgtaaagaaaatgaaccaccgcacctggccctggtagtgatatttaatccaatccaacaactataggctgggttaaataaaaggtcattattgtctatattccaagtggaattaaatgtagtcacagagattcctaacattttccttatatttaagggaaatcacttctaaaaaaacacactaatcagaactgtgatgctctaattagaaacaactcatctggccaactatttgctgctcagagtttcttatttcttagatgaaaaaaactcatcagttatattcatgtgatcgcggctaaaaagtcagtattttctttttgttctaatgtggcttcatttgaaatttctcagattctacattgtactaattatgaataacaaattataaattaaaaactcttaaagagaaaaacttg

SEQ ID NO: 359979 - DNA, 3434 bp, Homo sapiens
aagtaaaagaaaaacacaggaaaacttcaaatccatagcagtggggaaaggggaaatttgccatgttgagaatccatttgctcctttgtgagtgatcatttattttcttcttaaagctgtaaattttatttgcgatcatccggacatcaaagcaatcagctttgtgggatccaacaaggcaggagagtatatcttcgagagaggatcaagacatggcaagagggttcaagccaatatgggagccaagaaccatggggtagtcatgccagatgccaataaggaaaataccctgaaccagctggttggggcagcatttggagctgctggtcagcgctgcatggctctttcaacagcagtccttgtgggagaagccaagaagtggctgccagagctggtggagcatgccaaaaacctgagagtcaatgcaggagatcagcctggagctgatcttggccctctgatcactccccaggccaaagagcgagtctgtaatctgattgatagtggaacaaaggagggagcttccatccttcttgatggacgaaaaattaaagtgaaaggctatgaaaatggcaactttgttggaccaaccatcatctcgaatgtcaagccaaatatgacctgttacaaagaggagatttttggtccagttcttgtggttctggagacagaaacattggatgaagccatccagattgtaaataacaacccatatggaaatggaactgccatcttcaccaccaatggagccactgctcggaaatatgcccacttggtggatgttggacaggtgggagtgaatgtccccattccagtgcctttgccaatgttctcattcaccggctctcgatcctccttcaggggagacaccaatttctatggcaaacagggcatccaattctacactcagttaaagaccattacttctcagtggaaagaagaagatgctactctttcctcacctgctgttgtcatgcctaccatgggccgttagaaacaagtttgtttaagactgactccatcctgagtaatctccctttatttttgaccagcttcatttgtcagctttgctcagatcagatcgatgggattggaatacattgtaactaaaatcttcctcaggactattaacccctgcaaagtttctatagggaactgcctagtgtaacaatgaaaccagatttctcacttgctcttcatacttctattttgaggtaactgttgtaactatgaaatgcttatctgaaagtagtgcttaaacctgatttctaaaaattatcccattttctgatgatttgaaggggagaaaagccagtgtatgtaaagaaaatgttccagccaggcgcggtggctcacgcctgtgattccatcattttgggaggccacagtgggcagattgcttgagcccaggagttgaagaacgtggcgaaaccccgtatctattatttaaaaaaattgaaaaagtaaaaaaagaaaagggaaaaaaaattttttaaagaagatgttccaataattgcaagaagaactcttagatggggaaacaggacagaaataactcaccgcttttggttgatcctcaaacatagcgctacctaaatgccactgggagagacctcctgcaaagttttctttagcccctcttttatcccacaatacacaagatataatccatttttatatatcccaaagttgtggcaacagcttctttcttttctgctcaatgccactttgtttcctagtaattcatgaccactattaattctatcattgtcactgctcctgcttaagatcacttctcaaggatacctcagtaagcaatggataaatcaactttttgttatatgtgccaagtactaagtttcagggttctcttcagcaatcattaattaatacttcagccattaattcagatgcaaataattttcttttttcttttttttgagatggagtttcactcttgttgcccaggctggagtgcaatggcgtgatctcagctcaccgcaacctccgcctcccaggttcaagcgattctcctgcctcagcccccctagtagctgggattacaggcatgcgccaccacacccagctaattttgtatttttagtagagacggggtttctccgtgttggtcaggctggtcttgaactcctcacctcaggtgatccgcctgcctcggcctcccaaagtgctgggattacaggcatgagccaccacacccagccagatgcaaataattttcttagaaaattatttcaaaagttattttaggcccagaaatcaaggattgttccaaccatgaaaatgggtaagacacctgccttaagcaaatctaacctgctattacttgccaaattttatatattcttttctcttgcctgtatttctaattagtgatttgtttaatgaagaactcttcatgtagagcaattaactgggcctaagaaatttcgaagctttccatgacataaagtggttaaaaaaaaatgctttgacagtcttcttctgccattagttcaactgcctttacgcttttttttttttttttttttttgagatggagtttcactcttgttgcccaggctagagtgcaatgggcgtgatctgggctcactgcaacctctgcctcccgggttcaagcaattctcctgcctcagcctcctgagtagctgggatttcaggcatacgccaccatgcctggctaatttggtatttttagtagagacagggtttctccatgttggtcaggctggtctcgaactcccgacctcaggtgatctgcctgccttggcctcccaaagtgctgggattacaggtgtgagccaccacccccagccgcctctatgctttttgtttctttgatatatctaaacttaaggtcagaacagaaattcatgtgctgaacagaatggattctttttgcagtaccaatccaattgaatcctctttttattttcctgcgtccttaccagtcactttgatagtgctaactaacctacactatgggggttattcatgaattaagtatgataaaaaaaaaaaaagaccttgaaaatgttgtgtaccctgtggatttgaggcttattactaccacctggctggataaaatgtcaaaaccttcaatcacttaaggtgactggaacttttgtaaaatacacttatgatcctacggggccttttttttttttttttctgctttcctaaatatgaggcaatagaaatttataatttgagactacagtaccccttgttttagctcttatcacagctggcaactggtagtgattttttttgttgttgttttgttttgttttgagatggagtctcgctctgttgcccagggtggagtgcagtggcacgatctcggctcactgcaacctccacctcctgggttcaagtaattctcctgcctcagtctcccgagtagctgggattac

SEQ ID NO: 359980 - DNA, 2512 bp, Homo sapiens
caatgaggaagcctggcaggatggagggcgaggcctggcagctgtagtgcttctgggcagtagaggcgcggggtgcggagctagggcggccgagagccatggcggcgctattggcggcggcggcagtgcgagcccggatcctgcaggtttcttccaaggtgaaatccagtcccacctggtattcagcatcttccttctcttcttcagtgccaactgtaaagctcttcattggtgggaaattcgttgaatccaaaagtgacaaatggatcgatatccacaacccagccaccaatgaggtcattggtcgggtccctcaggccaccaaggcagaaatggatgcagccattgcttcctgcaaacgtgcttttcctgcatgggcagacacttcagtattaagccgccagcaggtcttgctccgctatcaacaacttattaaagaaaacttgaaagaaattgccaagttaatcacattggaacaagggaagaccctagctgatgctgaaggagatgtatttcgaggccttcaggtggttgagcatgcctgtagtgtgacatccctcatgatgggagagaccatgccatccatcaccaaagacatggacctttattcctaccgtctgcctctgggagtgtgtgcaggcattgctccattcaattttcctgccatgatccccctttggatgtttcccatggccatggtgtgtggaaataccttcctaatgaaaccatctgagcgagtccctggagcaactatgcttcttgctaagttgctccaggattctggtgcccctgatggaacattaaacatcatccatggacagcatgaagctgtaaattttatttgcgatcatccggacatcaaagcaatcagctttgtgggatccaacaaggcaggagagtatatcttcgagagaggatcaagacatggcaagagggttcaagccaatatgggagccaagaaccatggggtagtcatgccagatgccaataaggaaaataccctgaaccagctggttggggcagcatttggagctgctggtcagcgctgcatggctctttcaacagcagtccttgtgggagaagccaagaagtggctgccagagctggtggagcatgccaaaaacctgagagtcaatgcaggagatcagcctggagctgatcttggccctctgatcactccccaggccaaagagcgagtctgtaatctgattgatagtggaacaaaggagggagcttccatccttcttgatggacgaaaaattaaagtgaaagttacaggcatgagccaccacacccagccagatgcaaataattttcttagaaaattatttcaaaagttattttaggcccagaaatcaaggattgttccaaccatgaaaatgggtaagacacctgccttaagcaaatctaacctgctattacttgccaaattttatatattcttttctcttgcctgtatttctaattagtgatttgtttaatgaagaactcttcatgtagagcaattaactgggcctaagaaatttcgaagctttccatgacataaagtggttaaaaaaaaatgctttgacagtcttcttctgccattagttcaactgcctttacgcttttttttttttttttttttttgagatggagtttcactcttgttgcccaggctagagtgcaatgggcgtgatctgggctcactgcaacctctgcctcccgggttcaagcaattctcctgcctcagcctcctgagtagctgggatttcaggcatacgccaccatgcctggctaatttggtatttttagtagagacagggtttctccatgttggtcaggctggtctcgaactcccgacctcaggtgatctgcctgccttggcctcccaaagtgctgggattacaggtgtgagccaccacccccagccgcctctatgctttttgtttctttgatatatctaaacttaaggtcagaacagaaattcatgtgctgaacagaatggattctttttgcagtaccaatccaattgaatcctctttttattttcctgcgtccttaccagtcactttgatagtgctaactaacctacactatgggggttattcatgaattaagtatgataaaaaaaaaaaaagaccttgaaaatgttgtgtaccctgtggatttgaggcttattactaccacctggctggataaaatgtcaaaaccttcaatcacttaaggtgactggaacttttgtaaaatacacttatgatcctacggggccttttttttttttttttctgctttcctaaatatgaggcaatagaaatttataatttgagactacagtaccccttgttttagctcttatcacagctggcaactggtagtgattttttttgttgttgttttgttttgttttgagatggagtctcgctctgttgcccagggtggagtgcagtggcacgatctcggctcactgcaacctccacctcctgggttcaagtaattctcctgcctcagtctcccgagtagctgggattac

SEQ ID NO: 359981 - DNA, 4146 bp, Homo sapiens
caatgaggaagcctggcaggatggagggcgaggcctggcagctgtagtgcttctgggcagtagaggcgcggggtgcggagctagggcggccgagagccatggcggcgctattggcggcggcggcagtgcgagcccggatcctgcaggtttcttccaaggtgaaatccagtcccacctggtattcagcatcttccttctcttcttcagtgccaactgtaaagctcttcattggtgggaaattcgttgaatccaaaagtgacaaatggatcgatatccacaacccagccaccaatgaggtcattggtcgggtccctcaggccaccaaggcagaaatggatgcagccattgcttcctgcaaacgtgcttttcctgcatgggcagacacttcagtattaagccgccagcaggtcttgctccgctatcaacaacttattaaagaaaacttgaaagaaattgccaagttaatcacattggaacaagggaagaccctagctgatgctgaaggagatgtatttcgaggccttcaggtggttgagcatgcctgtagtgtgacatccctcatgatgggagagaccatgccatccatcaccaaagacatggacctttattcctaccgtctgcctctgggagtgtgtgcaggcattgctccattcaattttcctgccatgatccccctttggatgtttcccatggccatggtgtgtggaaataccttcctaatgaaaccatctgagcgagtccctggagcaactatgcttcttgctaagttgctccaggattctggtgcccctgatggaacattaaacatcatccatggacagcatgaagctgtaaattttatttgcgatcatccggacatcaaagcaatcagctttgtgggatccaacaaggcaggagagtatatcttcgagagaggatcaagacatggcaagagggttcaagccaatatgggagccaagaaccatggggtagtcatgccagatgccaataaggaaaataccctgaaccagctggttggggcagcatttggagctgctggtcagcgctgcatggctctttcaacagcagtccttgtgggagaagccaagaagtggctgccagagctggtggagcatgccaaaaacctgagagtcaatgcaggagatcagcctggagctgatcttggccctctgatcactccccaggccaaagagcgagtctgtaatctgattgatagtggaacaaaggagggagcttccatccttcttgatggacgaaaaattaaagtgaaaggctatgaaaatggcaactttgttggaccaaccatcatctcgaatgtcaagccaaatatgacctgttacaaagaggagatttttggtccagttcttgtggttctggagacagaaacattggatgaagccatccagattgtaaataacaacccatatggaaatggaactgccatcttcaccaccaatggagccactgctcggaaatatgcccacttggtggatgttggacaggtgggagtgaatgtccccattccagtgcctttgccaatgttctcattcaccggctctcgatcctccttcaggggagacaccaatttctatggcaaacagggcatccaattctacactcagttaaagaccattacttctcagtggaaagaagaagatgctactctttcctcacctgctgttgtcatgcctaccatgggccgttagaaacaagtttgtttaagactgactccatcctgagtaatctccctttatttttgaccagcttcatttgtcagctttgctcagatcagatcgatgggattggaatacattgtaactaaaatcttcctcaggactattaacccctgcaaagtttctatagggaactgcctagtgtaacaatgaaaccagatttctcacttgctcttcatacttctattttgaggtaactgttgtaactatgaaatgcttatctgaaagtagtgcttaaacctgatttctaaaaattatcccattttctgatgatttgaaggggagaaaagccagtgtatgtaaagaaaatgttccagccaggcgcggtggctcacgcctgtgattccatcattttgggaggccacagtgggcagattgcttgagcccaggagttgaagaacgtggcgaaaccccgtatctattatttaaaaaaattgaaaaagtaaaaaaagaaaagggaaaaaaaattttttaaagaagatgttccaataattgcaagaagaactcttagatggggaaacaggacagaaataactcaccgcttttggttgatcctcaaacatagcgctacctaaatgccactgggagagacctcctgcaaagttttctttagcccctcttttatcccacaatacacaagatataatccatttttatatatcccaaagttgtggcaacagcttctttcttttctgctcaatgccactttgtttcctagtaattcatgaccactattaattctatcattgtcactgctcctgcttaagatcacttctcaaggatacctcagtaagcaatggataaatcaactttttgttatatgtgccaagtactaagtttcagggttctcttcagcaatcattaattaatacttcagccattaattcagatgcaaataattttcttttttcttttttttgagatggagtttcactcttgttgcccaggctggagtgcaatggcgtgatctcagctcaccgcaacctccgcctcccaggttcaagcgattctcctgcctcagcccccctagtagctgggattacaggcatgcgccaccacacccagctaattttgtatttttagtagagacggggtttctccgtgttggtcaggctggtcttgaactcctcacctcaggtgatccgcctgcctcggcctcccaaagtgctgggattacaggcatgagccaccacacccagccagatgcaaataattttcttagaaaattatttcaaaagttattttaggcccagaaatcaaggattgttccaaccatgaaaatgggtaagacacctgccttaagcaaatctaacctgctattacttgccaaattttatatattcttttctcttgcctgtatttctaattagtgatttgtttaatgaagaactcttcatgtagagcaattaactgggcctaagaaatttcgaagctttccatgacataaagtggttaaaaaaaaatgctttgacagtcttcttctgccattagttcaactgcctttacgcttttttttttttttttttttttgagatggagtttcactcttgttgcccaggctagagtgcaatgggcgtgatctgggctcactgcaacctctgcctcccgggttcaagcaattctcctgcctcagcctcctgagtagctgggatttcaggcatacgccaccatgcctggctaatttggtatttttagtagagacagggtttctccatgttggtcaggctggtctcgaactcccgacctcaggtgatctgcctgccttggcctcccaaagtgctgggattacaggtgtgagccaccacccccagccgcctctatgctttttgtttctttgatatatctaaacttaaggtcagaacagaaattcatgtgctgaacagaatggattctttttgcagtaccaatccaattgaatcctctttttattttcctgcgtccttaccagtcactttgatagtgctaactaacctacactatgggggttattcatgaattaagtatgataaaaaaaaaaaaagaccttgaaaatgttgtgtaccctgtggatttgaggcttattactaccacctggctggataaaatgtcaaaaccttcaatcacttaaggtgactggaacttttgtaaaatacacttatgatcctacggggccttttttttttttttttctgctttcctaaatatgaggcaatagaaatttataatttgagactacagtaccccttgttttagctcttatcacagctggcaactggtagtgattttttttgttgttgttttgttttgttttgagatggagtctcgctctgttgcccagggtggagtgcagtggcacgatctcggctcactgcaacctccacctcctgggttcaagtaattctcctgcctcagtctcccgagtagctgggattac

SEQ ID NO: 359982 - DNA, 2825 bp, Homo sapiens
caatgaggaagcctggcaggatggagggcgaggcctggcagctgtagtgcttctgggcagtagaggcgcggggtgcggagctagggcggccgagagccatggcggcgctattggcggcggcggcagtgcgagcccggatcctgcaggtttcttccaaggtgaaatccagtcccacctggtattcagcatcttccttctcttcttcagtgccaactgtaaagctcttcattggtgggaaattcgttgaatccaaaagtgacaaatggatcgatatccacaacccagccaccaatgaggtcattggtcgggtccctcaggccaccaaggcagaaatggatgcagccattgcttcctgcaaacgtgcttttcctgcatgggcagacacttcagtattaagccgccagcaggtcttgctccgctatcaacaacttattaaagaaaacttgaaagaaattgccaagttaatcacattggaacaagggaagaccctagctgatgctgaaggagatgtatttcgaggccttcaggtggttgagcatgcctgtagtgtgacatccctcatgatgggagagaccatgccatccatcaccaaagacatggacctttattcctaccgtctgcctctgggagtgtgtgcaggcattgctccattcaattttcctgccatgatccccctttggatgtttcccatggccatggtgtgtggaaataccttcctaatgaaaccatctgagcgagtccctggagcaactatgcttcttgctaagttgctccaggattctggtgcccctgatggaacattaaacatcatccatggacagcatgaagctgtaaattttatttgcgatcatccggacatcaaagcaatcagctttgtgggatccaacaaggcaggagagtatatcttcgagagaggatcaagacatggcaagagggttcaagccaatatgggagccaagaaccatggggtagtcatgccagatgccaataaggaaaataccctgaaccagctggttggggcagcatttggagctgctggtcagcgctgcatggctctttcaacagcagtccttgtgggagaagccaagaagtggctgccagagctggtggagcatgccaaaaacctgagagtcaatgcaggagatcagcctggagctgatcttggccctctgatcactccccaggccaaagagcgagtctgtaatctgattgatagtggaacaaaggagggagcttccatccttcttgatggacgaaaaattaaagtgaaaggctatgaaaatggcaactttgttggaccaaccatcatctcgaatgtcaagccaaatatgacctgttacaaagaggagatttttggtccagttcttgtggttctggagacagaaacattggatgaagccatccagattgtaaataacaacccatatggaaatggaactgccatcttcaccaccaatggagccactgctcggaaatatgcccacttggtggatgttggacaggtgggagtgaatgtccccattccagtgcctttgccaatgttctcattcaccggctctcgatcctccttcaggggagacaccaatttctatggcaaacagggcatccaattctacactcagttaaagaccattacttctcagtggaaagaagaagatgctactctttcctcacctgctgttgtcatgcctaccatgggccgttagaaacaagtttgtttaagactgactccatcctgagtaatctccctttatttttgaccagcttcatttgtcagctttgctcagatcagatcgatgggattggaatacattgtaactaaaatcttcctcaggactattaacccctgcaaagtttctatagggaactgcctagtgtaacaatgaaaccagatttctcacttgctcttcatacttctattttgaggtaactgttgtaactatgaaatgcttatctgaaagtagtgcttaaacctgatttctaaaaattatcccattttctgatgatttgaaggggagaaaagccagtgtatgtaaagaaaatgttccagccaggcgcggtggctcacgcctgtgattccatcattttgggaggccacagtgggcagattgcttgagcccaggagttgaagaacgtggcgaaaccccgtatctattatttaaaaaaattgaaaaagtaaaaaaagaaaagggaaaaaaaattttttaaagaagatgttccaataattgcaagaagaactcttagatggggaaacaggacagaaataactcaccgcttttggttgatcctcaaacatagcgctacctaaatgccactgggagagacctcctgcaaagttttctttagcccctcttttatcccacaatacacaagatataatccatttttatatatcccaaagtgctgggattgcaggcgtgaaccaccgcacctggccctggtagtgatatttaatccaatccaacaactataggctgggttaaataaaaggtcattattgtctatattccaagtggaattaaatgtagtcacagagattcctaacattttccttatatttaagggaaatcacttctaaaaaaacacactaatcagaactgtgatgctctaattagaaacaactcatctggccaactatttgctgctcagagtttcttatttcttagatgaaaaaaactcatcagttatattcatgtgatcgcggctaaaaagtcagtattttctttttgttctaatgtggcttcatttgaaatttctcagattctacattgtactaattatgaataacaaattataaattaaaaactcttaaagagaaaaacttg

SEQ ID NO: 359983 - DNA, 2663 bp, Homo sapiens
caatgaggaagcctggcaggatggagggcgaggcctggcagctgtagtgcttctgggcagtagaggcgcggggtgcggagctagggcggccgagagccatggcggcgctattggcggcggcggcagtgcgagcccggatcctgcaggtttcttccaaggtgaaatccagtcccacctggtattcagcatcttccttctcttcttcagtgccaactgtaaagctcttcattggtgggaaattcgttgaatccaaaagtgacaaatggatcgatatccacaacccagccaccaatgaggtcattggtcgggtccctcaggccaccaaggcagaaatggatgcagccattgcttcctgcaaacgtgcttttcctgcatgggcagacacttcagtattaagccgccagcaggtcttgctccgctatcaacaacttattaaagaaaacttgaaagaaattgccaagttaatcacattggaacaagggaagaccctagctgatgctgaaggagatgtatttcgaggccttcaggtggttgagcatgcctgtagtgtgacatccctcatgatgggagagaccatgccatccatcaccaaagacatggacctttattcctaccgtctgcctctgggagtgtgtgcaggcattgctccattcaattttcctgccatgatccccctttggatgtttcccatggccatggtgtgtggaaataccttcctaatgaaaccatctgagcgagtccctggagcaactatgcttcttgctaagttgctccaggattctggtgcccctgatggaacattaaacatcatccatggacagcatgaagctgtaaattttatttgcgatcatccggacatcaaagcaatcagctttgtgggatccaacaaggcaggagagtatatcttcgagagaggatcaagacatggcaagagggttcaagccaatatgggagccaagaaccatggggtagtcatgccagatgccaataaggaaaataccctgaaccagctggttggggcagcatttggagctgctggtcagcgctgcatggctctttcaacagcagtccttgtgggagaagccaagaagtggctgccagagctggtggagcatgccaaaaacctgagagtcaatgcaggagatcagcctggagctgatcttggccctctgatcactccccaggccaaagagcgagtctgtaatctgattgatagtggaacaaaggagggagcttccatccttcttgatggacgaaaaattaaagtgaaaggctatgaaaatggcaactttgttggaccaaccatcatctcgaatgtcaagccaaatatgacctgttacaaagaggagatttttggtccagttcttgtggttctggagacagaaacattggatgaagccatccagattgtaaataacaacccatatggaaatggaactgccatcttcaccaccaatggagccactgctcggaaatatgcccacttggtggatgttggacaggtgggagtgaatgtccccattccagtgcctttgccaatgttctcattcaccggctctcgatcctccttcaggggagacaccaatttctatggcaaacagggcatccaattctacactcagttaaagaccattacttctcagtggaaagaagaagatgctactctttcctcacctgctgttgtcatgcctaccatgggccgttagaaacaagtttgtttaagactgactccatcctgagtaatctccctttatttttgaccagcttcatttgtcagctttgctcagatcagatcgatgggattggaatacattgtaactaaaatcttcctcaggactattaacccctgcaaagtttctatagggaactgcctagtgtaacaatgaaaccagatttctcacttgctcttcatacttctattttgaggtaactgttgtaactatgaaatgcttatctgaaagtagtgcttaaacctgatttctaaaaattatcccattttctgatgatttgaaggggagaaaagccagtgtatgtaaagaaaatgtgagccaccacccccagccgcctctatgctttttgtttctttgatatatctaaacttaaggtcagaacagaaattcatgtgctgaacagaatggattctttttgcagtaccaatccaattgaatcctctttttattttcctgcgtccttaccagtcactttgatagtgctaactaacctacactatgggggttattcatgaattaagtatgataaaaaaaaaaaaagaccttgaaaatgttgtgtaccctgtggatttgaggcttattactaccacctggctggataaaatgtcaaaaccttcaatcacttaaggtgactggaacttttgtaaaatacacttatgatcctacggggccttttttttttttttttctgctttcctaaatatgaggcaatagaaatttataatttgagactacagtaccccttgttttagctcttatcacagctggcaactggtagtgattttttttgttgttgttttgttttgttttgagatggagtctcgctctgttgcccagggtggagtgcagtggcacgatctcggctcactgcaacctccacctcctgggttcaagtaattctcctgcctcagtctcccgagtagctgggattac

SEQ ID NO: 359984 - DNA, 4096 bp, Homo sapiens
caatgaggaagcctggcaggatggagggcgaggcctggcagctgtagtgcttctgggcagtagaggcgcggggtgcggagctagggcggccgagagccatggcggcgctattggcggcggcggcagtgcgagcccggatcctgcaggtttcttccaaggtgaaatccagtcccacctggtattcagcatcttccttctcttcttcagtgccaactgtaaagctcttcattggtgggaaattcgttgaatccaaaagtgacaaatggatcgatatccacaacccagccaccaatgaggtcattggtcgggtccctcaggccaccaaggcagaaatggatgcagccattgcttcctgcaaacgtgcttttcctgcatgggcagacacttcagtattaagccgccagcaggtcttgctccgctatcaacaacttattaaagaaaacttgaaagaaattgccaagttaatcacattggaacaagggaagaccctagctgatgctgaaggagatgtatttcgaggccttcaggtggttgagcatgcctgtagtgtgacatccctcatgatgggagagaccatgccatccatcaccaaagacatggacctttattcctaccgtctgcctctgggagtgtgtgcaggcattgctccattcaattttcctgccatgatccccctttggatgtttcccatggccatggtgtgtggaaataccttcctaatgaaaccatctgagcgagtccctggagcaactatgcttcttgctaagttgctccaggattctggtgcccctgatggaacattaaacatcatccatggacagcatgaagctgtaaattttatttgcgatcatccggacatcaaagcaatcagctttgtgggatccaacaaggcaggagagtatatcttcgagagaggatcaagacatggcaagagggttcaagccaatatgggagccaagaaccatggggtagtcatgccagatgccaataaggaaaataccctgaaccagctggttggggcagcatttggagctgctggtcagcgctgcatggctctttcaacagcagtccttgtgggagaagccaagaagtggctgccagagctggtggagcatgccaaaaacctgagagtcaatgcaggagatcagcctggagctgatcttggccctctgatcactccccaggccaaagagcgagtctgtaatctgattgatagtggaacaaaggagggagcttccatccttcttgatggacgaaaaattaaagtgaaagccaaatatgacctgttacaaagaggagatttttggtccagttcttgtggttctggagacagaaacattggatgaagccatccagattgtaaataacaacccatatggaaatggaactgccatcttcaccaccaatggagccactgctcggaaatatgcccacttggtggatgttggacaggtgggagtgaatgtccccattccagtgcctttgccaatgttctcattcaccggctctcgatcctccttcaggggagacaccaatttctatggcaaacagggcatccaattctacactcagttaaagaccattacttctcagtggaaagaagaagatgctactctttcctcacctgctgttgtcatgcctaccatgggccgttagaaacaagtttgtttaagactgactccatcctgagtaatctccctttatttttgaccagcttcatttgtcagctttgctcagatcagatcgatgggattggaatacattgtaactaaaatcttcctcaggactattaacccctgcaaagtttctatagggaactgcctagtgtaacaatgaaaccagatttctcacttgctcttcatacttctattttgaggtaactgttgtaactatgaaatgcttatctgaaagtagtgcttaaacctgatttctaaaaattatcccattttctgatgatttgaaggggagaaaagccagtgtatgtaaagaaaatgttccagccaggcgcggtggctcacgcctgtgattccatcattttgggaggccacagtgggcagattgcttgagcccaggagttgaagaacgtggcgaaaccccgtatctattatttaaaaaaattgaaaaagtaaaaaaagaaaagggaaaaaaaattttttaaagaagatgttccaataattgcaagaagaactcttagatggggaaacaggacagaaataactcaccgcttttggttgatcctcaaacatagcgctacctaaatgccactgggagagacctcctgcaaagttttctttagcccctcttttatcccacaatacacaagatataatccatttttatatatcccaaagttgtggcaacagcttctttcttttctgctcaatgccactttgtttcctagtaattcatgaccactattaattctatcattgtcactgctcctgcttaagatcacttctcaaggatacctcagtaagcaatggataaatcaactttttgttatatgtgccaagtactaagtttcagggttctcttcagcaatcattaattaatacttcagccattaattcagatgcaaataattttcttttttcttttttttgagatggagtttcactcttgttgcccaggctggagtgcaatggcgtgatctcagctcaccgcaacctccgcctcccaggttcaagcgattctcctgcctcagcccccctagtagctgggattacaggcatgcgccaccacacccagctaattttgtatttttagtagagacggggtttctccgtgttggtcaggctggtcttgaactcctcacctcaggtgatccgcctgcctcggcctcccaaagtgctgggattacaggcatgagccaccacacccagccagatgcaaataattttcttagaaaattatttcaaaagttattttaggcccagaaatcaaggattgttccaaccatgaaaatgggtaagacacctgccttaagcaaatctaacctgctattacttgccaaattttatatattcttttctcttgcctgtatttctaattagtgatttgtttaatgaagaactcttcatgtagagcaattaactgggcctaagaaatttcgaagctttccatgacataaagtggttaaaaaaaaatgctttgacagtcttcttctgccattagttcaactgcctttacgcttttttttttttttttttttttgagatggagtttcactcttgttgcccaggctagagtgcaatgggcgtgatctgggctcactgcaacctctgcctcccgggttcaagcaattctcctgcctcagcctcctgagtagctgggatttcaggcatacgccaccatgcctggctaatttggtatttttagtagagacagggtttctccatgttggtcaggctggtctcgaactcccgacctcaggtgatctgcctgccttggcctcccaaagtgctgggattacaggtgtgagccaccacccccagccgcctctatgctttttgtttctttgatatatctaaacttaaggtcagaacagaaattcatgtgctgaacagaatggattctttttgcagtaccaatccaattgaatcctctttttattttcctgcgtccttaccagtcactttgatagtgctaactaacctacactatgggggttattcatgaattaagtatgataaaaaaaaaaaaagaccttgaaaatgttgtgtaccctgtggatttgaggcttattactaccacctggctggataaaatgtcaaaaccttcaatcacttaaggtgactggaacttttgtaaaatacacttatgatcctacggggccttttttttttttttttctgctttcctaaatatgaggcaatagaaatttataatttgagactacagtaccccttgttttagctcttatcacagctggcaactggtagtgattttttttgttgttgttttgttttgttttgagatggagtctcgctctgttgcccagggtggagtgcagtggcacgatctcggctcactgcaacctccacctcctgggttcaagtaattctcctgcctcagtctcccgagtagctgggattac

SEQ ID NO: 359985 - DNA, 3059 bp, Homo sapiens
caatgaggaagcctggcaggatggagggcgaggcctggcagctgtagtgcttctgggcagtagaggcgcggggtgcggagctagggcggccgagagccatggcggcgctattggcggcggcggcagtgcgagcccggatcctgcaggtttcttccaaggtgaaatccagtcccacctggtattcagcatcttccttctcttcttcagtgccaactgtaaagctcttcattggtgggaaattcgttgaatccaaaagtgacaaatggatcgatatccacaacccagccaccaatgaggtcattggtcgggtccctcaggccaccaaggcagaaatggatgcagccattgcttcctgcaaacgtgcttttcctgcatgggcagacacttcagtattaagccgccagcaggtcttgctccgctatcaacaacttattaaagaaaacttgtgccaatgttctcattcaccggctctcgatcctccttcaggggagacaccaatttctatggcaaacagggcatccaattctacactcagttaaagaccattacttctcagtggaaagaagaagatgctactctttcctcacctgctgttgtcatgcctaccatgggccgttagaaacaagtttgtttaagactgactccatcctgagtaatctccctttatttttgaccagcttcatttgtcagctttgctcagatcagatcgatgggattggaatacattgtaactaaaatcttcctcaggactattaacccctgcaaagtttctatagggaactgcctagtgtaacaatgaaaccagatttctcacttgctcttcatacttctattttgaggtaactgttgtaactatgaaatgcttatctgaaagtagtgcttaaacctgatttctaaaaattatcccattttctgatgatttgaaggggagaaaagccagtgtatgtaaagaaaatgttccagccaggcgcggtggctcacgcctgtgattccatcattttgggaggccacagtgggcagattgcttgagcccaggagttgaagaacgtggcgaaaccccgtatctattatttaaaaaaattgaaaaagtaaaaaaagaaaagggaaaaaaaattttttaaagaagatgttccaataattgcaagaagaactcttagatggggaaacaggacagaaataactcaccgcttttggttgatcctcaaacatagcgctacctaaatgccactgggagagacctcctgcaaagttttctttagcccctcttttatcccacaatacacaagatataatccatttttatatatcccaaagttgtggcaacagcttctttcttttctgctcaatgccactttgtttcctagtaattcatgaccactattaattctatcattgtcactgctcctgcttaagatcacttctcaaggatacctcagtaagcaatggataaatcaactttttgttatatgtgccaagtactaagtttcagggttctcttcagcaatcattaattaatacttcagccattaattcagatgcaaataattttcttttttcttttttttgagatggagtttcactcttgttgcccaggctggagtgcaatggcgtgatctcagctcaccgcaacctccgcctcccaggttcaagcgattctcctgcctcagcccccctagtagctgggattacaggcatgcgccaccacacccagctaattttgtatttttagtagagacggggtttctccgtgttggtcaggctggtcttgaactcctcacctcaggtgatccgcctgcctcggcctcccaaagtgctgggattacaggcatgagccaccacacccagccagatgcaaataattttcttagaaaattatttcaaaagttattttaggcccagaaatcaaggattgttccaaccatgaaaatgggtaagacacctgccttaagcaaatctaacctgctattacttgccaaattttatatattcttttctcttgcctgtatttctaattagtgatttgtttaatgaagaactcttcatgtagagcaattaactgggcctaagaaatttcgaagctttccatgacataaagtggttaaaaaaaaatgctttgacagtcttcttctgccattagttcaactgcctttacgcttttttttttttttttttttttgagatggagtttcactcttgttgcccaggctagagtgcaatgggcgtgatctgggctcactgcaacctctgcctcccgggttcaagcaattctcctgcctcagcctcctgagtagctgggatttcaggcatacgccaccatgcctggctaatttggtatttttagtagagacagggtttctccatgttggtcaggctggtctcgaactcccgacctcaggtgatctgcctgccttggcctcccaaagtgctgggattacaggtgtgagccaccacccccagccgcctctatgctttttgtttctttgatatatctaaacttaaggtcagaacagaaattcatgtgctgaacagaatggattctttttgcagtaccaatccaattgaatcctctttttattttcctgcgtccttaccagtcactttgatagtgctaactaacctacactatgggggttattcatgaattaagtatgataaaaaaaaaaaaagaccttgaaaatgttgtgtaccctgtggatttgaggcttattactaccacctggctggataaaatgtcaaaaccttcaatcacttaaggtgactggaacttttgtaaaatacacttatgatcctacggggccttttttttttttttttctgctttcctaaatatgaggcaatagaaatttataatttgagactacagtaccccttgttttagctcttatcacagctggcaactggtagtgattttttttgttgttgttttgttttgttttgagatggagtctcgctctgttgcccagggtggagtgcagtggcacgatctcggctcactgcaacctccacctcctgggttcaagtaattctcctgcctcagtctcccgagtagctgggattac

SEQ ID NO: 359986 - DNA, 446 bp, Homo sapiens
gccgagcacagcttgaggttagaaggaaaacaaggtgcccagatatctccacacctccaagtgggtaagtgacaggaaccagccttccttctagagcggtttgtgaacccagatggatttcaaattgagtgcactcgaggtattgtgtaagagaggacagattttcggccgggcacggtggctcacgcctgtaatcccagcactttgggaggctgaggtgggtggatcacgaggtcaggagattgagaccatcctggctaacatggtgaaaccccgtctctactaaaaatacaaaaaattagccaggtgtggtggcaggtgcctgtagtcccagctactcgggaggctgaggcaggagaatggcatgaacctgggaggcagagcttgcagtgagccgagattgcactactgcactccagcctgggtgacacagcgagactccatct

SEQ ID NO: 359987 - DNA, 914 bp, Homo sapiens
cacgcccgtaatcacaaccctctgagaagccgaggcgggcggatcacgaggtcaaaagatcgagaccgtcctggccaacgtggtgaaaccccgtctctactaaaaataaaaaaattagctgggcgtggtggcgcgcgcctctagtcgggaggctgaggcaggagaatcgcttgaacccggaaggcggaggttgcagtgagccgagatcgcgccactgcaccccagcctggcaacagagcgagactctggctcaaaaaaaaaaaaaaaaaaaaaaaaaattggagagggacgctcttccgcctgcctgtacccggaagtgacgttatgtacgtccccccccggaggaagtgacgacaggcgtgcccttgacaggcagggagggctaggctgtgcatccctccgctcgcattgcagggagatggctcagcgacttcttctgaggaggttcctggcctctgtcatctccaggaagccctctcagggtcagtggccacccctcacttccagagccctgcagaccccacaatgcagtcctggtggcctgactgtaacacccaacccagcccggacaatatacaccacgaggatctccttgacaacctttaatatccaggatggacctgactttcaagaccgagtggtcaacagtgagacaccagtggttgtggatttccacgcacagtggtgtggaccctgcaagatcctggggccgaggttagagaagatggtggccaagcagcacgggaaggtggtgatggccaaggtggatattgatgaccacacagacctcgccattgagtatgagcgtcagcggtgcccacttggctggccatgacagatgtcgcccgtgcctccaaggttccgcccatcggctctggctccagtcccgcccttcttgactcgcctctcgccct

SEQ ID NO: 359988 - DNA, 438 bp, Homo sapiens
cacgcccgtaatcacaaccctctgagaagccgaggcgggcggatcacgaggtcaaaagatcgagaccgtcctggccaacgtggtgaaaccccgtctctactaaaaataaaaaaattagctgggcgtggtggcgcgcgcctctagtcgggaggctgaggcaggagaatcgcttgaacccggaaggcggaggttgcagtgagccgagatcgcgccactgcaccccagcctggcaacagagcgagactctggctcaaaaaaaaaaaaaaaaaaaaaaaaaattggagagggacgctcttccgcctgcctgtacccggaagtgacgttatgtacgtccccccccggaggaagtgacgacaggcgtgcccttgacaggcagggagggctaggctgtgcatccctccgctcgcattgcagggaggtaggagccctgtgggggtg

SEQ ID NO: 359989 - DNA, 1991 bp, Homo sapiens
cacgcccgtaatcacaaccctctgagaagccgaggcgggcggatcacgaggtcaaaagatcgagaccgtcctggccaacgtggtgaaaccccgtctctactaaaaataaaaaaattagctgggcgtggtggcgcgcgcctctagtcgggaggctgaggcaggagaatcgcttgaacccggaaggcggaggttgcagtgagccgagatcgcgccactgcaccccagcctggcaacagagcgagactctggctcaaaaaaaaaaaaaaaaaaaaaaaaaattggagagggacgctcttccgcctgcctgtacccggaagtgacgttatgtacgtccccccccggaggaagtgacgacaggcgtgcccttgacaggcagggagggctaggctgtgcatccctccgctcgcattgcagggagatggctcagcgacttcttctgaggaggttcctggcctctgtcatctccaggaagccctctcagggtcagtggccacccctcacttccagagccctgcagaccccacaatgcagtcctggtggcctgactgtaacacccaacccagcccggacaatatacaccacgaggatctccttgacaacctttaatatccaggatggacctgactttcaagaccgagtggtcaacagtgagacaccagtggttgtggatttccacgcacagtggtgtggaccctgcaagatcctggggccgaggttagagaagatggtggccaagcagcacgggaaggtggtgatggccaaggtggatattgatgaccacacagacctcgccattgagtatgaggtgtcagcggtgcccactgtgctggccatgaagaatggggacgtggtggacaagtttgtgggcatcaaggatgaggatcagttggaggccttcctgaagaagctgattggctgacaagcagggatgagtcctggttcccttgcccgcgtgggaccccaatagaactcagcccttccatgccagcccttcctgctgcctccctcctgtctggctcctggggcccatgcttagagcccaggctccagccctgagtgcttccgagctggcggactgcccaggggccatcagaggatggtggtgctgctgctgatccggggaccgctgtcttccctcccatacgcctttcatccctccttctagggcctatggcagttctcccaggatgtgtggcgagagcctgggccagcccacagcgttcctagtcaggcagccacaccttggtcctcatcttggtcccttccaatctgaaacctcgtgcctggctcgtctgccacctacatttctctttccagctgctgttttgtaaaaagaaaaagaaaaaagaagcccaaactagtgagagtaatatctaattatctcattttttgtaggtctgtgataaagaacttagtcatcccttccacctcctactgtgaagaacagaccctgggtcccacactgaaatcccctctagtcacccattcccaccccccagggagctgcctcccaggcagggggtgcagaaaatgattgatgggctggggaaccctggagagcctcgactccggaagtctcaaggtgcctcctcctctccttagctggcccgttggttttctgagcagggggctgaactgtgaacaagtcagacaaataaagcaagggtctgcaccatctgcaatgtcaaaaaagaacaaagcacaaaaccacacacaaacaaacacaaccaaacccccccacacccaaaacacagaaacaaacacaaacacaaacagcacagaaggagcaaaaaagaggggggcgccgccccactaataaagaaacaccgagggagacgagcccaatcgcggagcgccacggttgtgcacacggacggccccaatgagagcggccgtcagaaacagaggcgggcaccgcgcggacacaacacacaggaggggagacaaccacgcagcgcggcgcgaacggggcaagaccacatcgcggcgag

SEQ ID NO: 359990 - DNA, 1742 bp, Homo sapiens
tttcagacgaccctgggttccagtgttggctgtcatttaatagcggggttactttgggcatgtcacttaacttacttgagcctcgtattccttcccttactcgcagtgtgggcagtacaatagcaacttcctggaagttgctgtaggaagaccaataatgtgtgtaaggtacttggtccttacatacattattaaatctgttggtttcttcctcccattcttccgttataatctaaatcccgatttctttttggttgtgaagccagttttcctgtccttctggtttgcctagctgttccttccctttgattctcattgcttcctcacttccacgctacaaatcttacatatgatttccttgcattttgcttccaactctgcctcttcctgagccctgagtactccccaaatctttttctagtgtgtcgacttccttttgtgtgccccagttcttctgcctctttccctcacagatggctcagcgacttcttctgaggaggttcctggcctctgtcatctccaggaagccctctcagggtcagtggccacccctcacttccagagccctgcagaccccacaatgcagtcctggtggcctgactgtaacacccaacccagcccggacaatatacaccacgaggatctccttgacaacctttaatatccaggatggacctgactttcaagaccgagtggtcaacagtgagacaccagtggttgtggatttccacgcacagtggtgtggaccctgcaagatcctggggccgaggttagagaagatggtggccaagcagcacgggaaggtggtgatggccaaggtggatattgatgaccacacagacctcgccattgagtatgaggtgtcagcggtgcccactgtgctggccatgaagaatggggacgtggtggacaagtttgtgggcatcaaggatgaggatcagttggaggccttcctgaagaagctgattggctgacaagcagggatgagtcctggttcccttgcccgcgtgggaccccaatagaactcagcccttccatgccagcccttcctgctgcctccctcctgtctggctcctggggcccatgcttagagcccaggctccagccctgagtgcttccgagctggcggactgcccaggggccatcagaggatggtggtgctgctgctgatccggggaccgctgtcttccctcccatacgcctttcatccctccttctagggcctatggcagttctcccaggatgtgtggcgagagcctgggccagcccacagcgttcctagtcaggcagccacaccttggtcctcatcttggtcccttccaatctgaaacctcgtgcctggctcgtctgccacctacatttctctttccagctgctgttttgtaaaaagaaaaagaaaaaagaagcccaaactagtgagagtaatatctaattatctcattttttgtaggtctgtgataaagaacttagtcatcccttccacctcctactgtgaagaacagaccctgggtcccacactgaaatcccctctagtcacccattcccaccccccagggagctgcctcccaggcagggggtgcagaaaatgattgatgggctggggaaccctggagagcctcgactccggaagtctcaaggtgcctcctcctctccttagctggcccgttggttttctgagcagggggctgaactgtgaacaagtcagacaaataaagcaagggtctgcaccatctgcaatgtca

SEQ ID NO: 359991 - DNA, 1587 bp, Homo sapiens
cacgcccgtaatcacaaccctctgagaagccgaggcgggcggatcacgaggtcaaaagatcgagaccgtcctggccaacgtggtgaaaccccgtctctactaaaaataaaaaaattagctgggcgtggtggcgcgcgcctctagtcgggaggctgaggcaggagaatcgcttgaacccggaaggcggaggttgcagtgagccgagatcgcgccactgcaccccagcctggcaacagagcgagactctggctcaaaaaaaaaaaaaaaaaaaaaaaaaattggagagggacgctcttccgcctgcctgtacccggaagtgacgttatgtacgtccccccccggaggaagtgacgacaggcgtgcccttgacaggcagggagggctaggctgtgcatccctccgctcgcattgcagggagatggctcagcgacttcttctgaggaggttcctggcctctgtcatctccaggaagccctctcagggtcagtggccacccctcacttccagagccctgcagaccccacaatgcagtcctggtggcctgactgtaacacccaacccagcccggacaatatacaccacgaggatctccttgacaacctttaatatccaggatggacctgactttcaagaccgagtggtcaacagtgagacaccagtggttgtggatttccacgcacagtggtgtggaccctgcaagatcctggggccgaggttagagaagatggtggccaagcagcacgggaaggtggtgatggccaaggtggatattgatgaccacacagacctcgccattgagtatgaggtgtcagcggtgcccactgtgctggccatgaagaatggggacgtggtggacaagtttgtgggcatcaaggatgaggatcagttggaggccttcctgaagaagctgattggctgacaagcagggatgagtcctggttcccttgcccgcgtgggaccccaatagaactcagcccttccatgccagcccttcctgctgcctccctcctgtctggctcctggggcccatgcttagagcccaggctccagccctgagtgcttccgagctggcggactgcccaggggccatcagaggatggtggtgctgctgctgatccggggaccgctgtcttccctcccatacgcctttcatcttggtcccttccaatctgaaacctcgtgcctggctcgtctgccacctacatttctctttccagctgctgttttgtaaaaagaaaaagaaaaaagaagcccaaactagtgagagtaatatctaattatctcattttttgtaggtctgtgataaagaacttagtcatcccttccacctcctactgtgaagaacagaccctgggtcccacactgaaatcccctctagtcacccattcccaccccccagggagctgcctcccaggcagggggtgcagaaaatgattgatgggctggggaaccctggagagcctcgactccggaagtctcaaggtgcctcctcctctccttagctggcccgttggttttctgagcagggggctgaactgtgaacaagtcagacaaataaagcaagggtctgcaccatctgcaatgtca

SEQ ID NO: 359992 - DNA, 1563 bp, Homo sapiens
cacgcccgtaatcacaaccctctgagaagccgaggcgggcggatcacgaggtcaaaagatcgagaccgtcctggccaacgtggtgaaaccccgtctctactaaaaataaaaaaattagctgggcgtggtggcgcgcgcctctagtcgggaggctgaggcaggagaatcgcttgaacccggaaggcggaggttgcagtgagccgagatcgcgccactgcaccccagcctggcaacagagcgagactctggctcaaaaaaaaaaaaaaaaaaaaaaaaaattggagagggacgctcttccgcctgcctgtacccggaagtgacgttatgtacgtccccccccggaggaagtgacgacaggcgtgcccttgacaggcagggagggctaggctgtgcatccctccgctcgcattgcagggagatggctcagcgacttcttctgaggaggttcctggcctctgtcatctccaggaagccctctcagggtcagtggccacccctcacttccagagccctgcagaccccacaatgcagtcctggtggcctgactgtaacacccaacccagcccggacaatatacaccacgaggatctccttgacaacctttaatatccaggatggacctgactttcaagaccgagtggtcaacagtgagacaccagtggttgtggatttccacgcacagtgtcagcggtgcccactgtgctggccatgaagaatggggacgtggtggacaagtttgtgggcatcaaggatgaggatcagttggaggccttcctgaagaagctgattggctgacaagcagggatgagtcctggttcccttgcccgcgtgggaccccaatagaactcagcccttccatgccagcccttcctgctgcctccctcctgtctggctcctggggcccatgcttagagcccaggctccagccctgagtgcttccgagctggcggactgcccaggggccatcagaggatggtggtgctgctgctgatccggggaccgctgtcttccctcccatacgcctttcatccctccttctagggcctatggcagttctcccaggatgtgtggcgagagcctgggccagcccacagcgttcctagtcaggcagccacaccttggtcctcatcttggtcccttccaatctgaaacctcgtgcctggctcgtctgccacctacatttctctttccagctgctgttttgtaaaaagaaaaagaaaaaagaagcccaaactagtgagagtaatatctaattatctcattttttgtaggtctgtgataaagaacttagtcatcccttccacctcctactgtgaagaacagaccctgggtcccacactgaaatcccctctagtcacccattcccaccccccagggagctgcctcccaggcagggggtgcagaaaatgattgatgggctggggaaccctggagagcctcgactccggaagtctcaaggtgcctcctcctctccttagctggcccgttggttttctgagcagggggctgaactgtgaacaagtcagacaaataaagcaagggtctgcaccatctgcaatgtca

SEQ ID NO: 359993 - DNA, 1038 bp, Homo sapiens
cacgcccgtaatcacaaccctctgagaagccgaggcgggcggatcacgaggtcaaaagatcgagaccgtcctggccaacgtggtgaaaccccgtctctactaaaaataaaaaaattagctgggcgtggtggcgcgcgcctctagtcgggaggctgaggcaggagaatcgcttgaacccggaaggcggaggttgcagtgagccgagatcgcgccactgcaccccagcctggcaacagagcgagactctggctcaaaaaaaaaaaaaaaaaaaaaaaaaattggagagggacgctcttccgcctgcctgtacccggaagtgacgttatgtacgtccccccccggaggaagtgacgacaggcgtgcccttgacaggcagggagggctaggctgtgcatccctccgctcgcattgcagggagatggctcagcgacttcttctgaggaggttcctggcctctgtcatctccaggaagccctctcagggtcagtggccacccctcacttccagagccctgcagaccccacaatgcagtcctggtggcctgactgtaacacccaacccacccacagcgttcctagtcaggcagccacaccttggtcctcatcttggtcccttccaatctgaaacctcgtgcctggctcgtctgccacctacatttctctttccagctgctgttttgtaaaaagaaaaagaaaaaagaagcccaaactagtgagagtaatatctaattatctcattttttgtaggtctgtgataaagaacttagtcatcccttccacctcctactgtgaagaacagaccctgggtcccacactgaaatcccctctagtcacccattcccaccccccagggagctgcctcccaggcagggggtgcagaaaatgattgatgggctggggaaccctggagagcctcgactccggaagtctcaaggtgcctcctcctctccttagctggcccgttggttttctgagcagggggctgaactgtgaacaagtcagacaaataaagcaagggtctgcaccatctgcaatgtca

SEQ ID NO: 359994 - DNA, 1509 bp, Homo sapiens
cacgcccgtaatcacaaccctctgagaagccgaggcgggcggatcacgaggtcaaaagatcgagaccgtcctggccaacgtggtgaaaccccgtctctactaaaaataaaaaaattagctgggcgtggtggcgcgcgcctctagtcgggaggctgaggcaggagaatcgcttgaacccggaaggcggaggttgcagtgagccgagatcgcgccactgcaccccagcctggcaacagagcgagactctggctcaaaaaaaaaaaaaaaaaaaaaaaaaattggagagggacgctcttccgcctgcctgtacccggaagtgacgttatgtacgtccccccccggaggaagtgacgacaggcgtgcccttgacaggcagggagggctaggctgtgcatccctccgctcgcattgcagggagatggctcagcgacttcttctgaggaggttcctggcctctgtcatctccaggaagccctctcagggtcagtggccacccctcacttccagagccctgcagaccccacaatgcagtcctggtggcctgactgtaacacccaacccacccacagcgttcctagtcaggcagccacaccttggtcctcatcttggtcccttccaatctgaaacctcgtgcctggctcgtctgccacctacatttctctttccagctgctgttttgtaaaaagaaaaagaaaaaagaagcccaaactagtgagagtaatatctaattatctcattttttgtaggtctgtgataaagaacttagtcatcccttccacctcctactgtgaagaacagaccctgggtcccacactgaaatcccctctagtcacccattcccaccccccagggagctgcctcccaggcagggggtgcagaaaatgattgatgggctggggaaccctggagagcctcgactccggaagtctcaaggtgcctcctcctctccttagctggcccgttggttttctgagcagggggctgaactgtgaacaagtcagacaaataaagcaagggtctgcaccatctgcaatgtcaaaaaaaaaaaaaaaaaaaaaaaaaaaaaaaaaaaaaaaaaaaaaaaaaaaaaaaaaaaaaaagaacaaaaaaaaaaggggggcgccgacacagaaaccccaccagaggagcaccaaataagcgcacacacaaattacagtacaaaaaggagcacacagaggggagacacaaaaaacgaagaaagacgcccagcctaaacaaacagcgaccgcgaaagaaaaaaaaacgcagaccagagcacccgtggagaaaaagaaccaccatcactagcaggagaaaaaagaaacatagaagcggagaaaaaacaaccccgtaacaaaaaaatatataacaccctctagaggaaaaaaacaaaacagtaacacaaagcacaaaacaaatggaaaaaaacacaacaccgaataataaagccagcgataaaaaacattcgaaccccaaacgggatattcaatgacgacaaatattaccagg

SEQ ID NO: 359995 - DNA, 1687 bp, Homo sapiens
cacgcccgtaatcacaaccctctgagaagccgaggcgggcggatcacgaggtcaaaagatcgagaccgtcctggccaacgtggtgaaaccccgtctctactaaaaataaaaaaattagctgggcgtggtggcgcgcgcctctagtcgggaggctgaggcaggagaatcgcttgaacccggaaggcggaggttgcagtgagccgagatcgcgccactgcaccccagcctggcaacagagcgagactctggctcaaaaaaaaaaaaaaaaaaaaaaaaaattggagagggacgctcttccgcctgcctgtacccggaagtgacgttatgtacgtccccccccggaggaagtgacgacaggcgtgcccttgacaggcagggagggctaggctgtgcatccctccgctcgcattgcagggagatggctcagcgacttcttctgaggaggttcctggcctctgtcatctccaggaagccctctcagggtcagtggccacccctcacttccagagccctgcagaccccacaatgcagtcctggtggcctgactgtaacacccaacccagcccggacaatatacaccacgaggatctccttgacaacctttaatatccaggatggacctgactttcaagaccgagtggtcaacagtgagacaccagtggttgtggatttccacgcacagtggtgtggaccctgcaagatcctggggccgaggttagagaagatggtggccaagcagcacgggaaggtggtgatggccaaggtggatattgatgaccacacagacctcgccattgagtatgaggtgtcagcggtgcccactgtgctggccatgaagaatggggacgtggtggacaagtttgtgggcatcaaggatgaggatcagttggaggccttcctgaagaagctgattggctgacaagcagggatgagtcctggttcccttgcccgcgtgggaccccaatagaactcagcccttccatgccagcccttcctgctgcctccctcctgtctggctcctggggcccatgcttagagcccaggctccagccctgagtgcttccgagctggcggactgcccaggggccatcagaggatggtggtgctgctgctgatccggggaccgctgtcttccctcccatacgcctttcatccctccttctagggcctatggcagttctcccaggatgtgtggcgagagcctgggccagcccacagcgttcctagtcaggcagccacaccttggtcctcatcttggtcccttccaatctgaaacctcgtgcctggctcgtctgccacctacatttctctttccagctgctgttttgtaaaaagaaaaagaaaaaagaagcccaaactagtgagagtaatatctaattatctcattttttgtaggtctgtgataaagaacttagtcatcccttccacctcctactgtgaagaacagaccctgggtcccacactgaaatcccctctagtcacccattcccaccccccagggagctgcctcccaggcagggggtgcagaaaatgattgatgggctggggaaccctggagagcctcgactccggaagtctcaaggtgcctcctcctctccttagctggcccgttggttttctgagcagggggctgaactgtgaacaagtcagacaaataaagcaagggtctgcaccatctgcaatgtca

SEQ ID NO: 359996 - DNA, 1803 bp, Homo sapiens
cacgcccgtaatcacaaccctctgagaagccgaggcgggcggatcacgaggtcaaaagatcgagaccgtcctggccaacgtggtgaaaccccgtctctactaaaaataaaaaaattagctgggcgtggtggcgcgcgcctctagtcgggaggctgaggcaggagaatcgcttgaacccggaaggcggaggttgcagtgagccgagatcgcgccactgcaccccagcctggcaacagagcgagactctggctcaaaaaaaaaaaaaaaaaaaaaaaaaattggagagggacgctcttccgcctgcctgtacccggaagtgacgttatgtacgtccccccccggaggaagtgacgacaggcgtgcccttgacaggcagggagggctaggctgtgcatccctccgctcgcattgcagggagatggctcagcgacttcttctgaggaggttcctggcctctgtcatctccaggaagccctctcagggtcagtggccacccctcacttccagagccctgcagaccccacaatgcagtcctggtggcctgactgtaacacccaacccagcccggacaatatacaccacgaggatctccttgacaacctttaatatccaggatggacctgactttcaagaccgagtggtcaacagtgagacaccagtggttgtggatttccacgcacagtggtgtggaccctgcaagatcctggggccgaggttagagaagatggtggccaagcagcacgggaaggtggtgatggccaaggtggatattgatgaccacacagacctcgccattgagtatgaggcagggtctctgtcacccaggctggagtgcagtggcacaatcacagctcactgaagcctcagtctcccaggctcaagcgatcctcctgcctcagcctcccgagtatgggagtacaggtgtcagcggtgcccactgtgctggccatgaagaatggggacgtggtggacaagtttgtgggcatcaaggatgaggatcagttggaggccttcctgaagaagctgattggctgacaagcagggatgagtcctggttcccttgcccgcgtgggaccccaatagaactcagcccttccatgccagcccttcctgctgcctccctcctgtctggctcctggggcccatgcttagagcccaggctccagccctgagtgcttccgagctggcggactgcccaggggccatcagaggatggtggtgctgctgctgatccggggaccgctgtcttccctcccatacgcctttcatccctccttctagggcctatggcagttctcccaggatgtgtggcgagagcctgggccagcccacagcgttcctagtcaggcagccacaccttggtcctcatcttggtcccttccaatctgaaacctcgtgcctggctcgtctgccacctacatttctctttccagctgctgttttgtaaaaagaaaaagaaaaaagaagcccaaactagtgagagtaatatctaattatctcattttttgtaggtctgtgataaagaacttagtcatcccttccacctcctactgtgaagaacagaccctgggtcccacactgaaatcccctctagtcacccattcccaccccccagggagctgcctcccaggcagggggtgcagaaaatgattgatgggctggggaaccctggagagcctcgactccggaagtctcaaggtgcctcctcctctccttagctggcccgttggttttctgagcagggggctgaactgtgaacaagtcagacaaataaagcaagggtctgcaccatctgcaatgtca

SEQ ID NO: 359997 - DNA, 4709 bp, Homo sapiens
acccccgagaaagcaacccagcgcgccgcccgctcctcacgtgtccctcccggccccggggccacctcacgttctgcttccgtctgacccctccgacttccggtaaagagtccctatccgcacctccgctcccacccggcgcctcggcgcgcccgccctccgatgcgctcagcggccgcagctcctcggagtcccgcggtggccaccgagtctcgccgcttcgccgcagccaggtggcccgggtggcgctcgctccagcggccggcgcggcggagcgggcggggcggcggtggcgcggccccgggaccgtatccctccgccgcccctcccccgcccggccccggcccccctccctcccggcagagctcgcctccctccgcctcagactgttttggtagcaacggcaacggcggcggcgcgtttcggcccggctcccggcggctccttggtctcggcgggcctccccgccccttcgtcgtcgtccttctccccctcgccagcccgggcgcccctccggccgcgccaacccgcgcctccccgctcggcgcccgtgcgtccccgccgcgttccggcgtctccttggcgcgcccggctcccggctgtccccgcccggcgtgcgagccggtgtatgggcccctcaccatgtcgctgaagccccagcagcagcagcagcagcagcagcaacagcagcagcagcaacagcagcagcagcagcagcagcagccgccgcccgcggctgccaatgtccgcaagcccggcggcagcggccttctagcgtcgcccgccgccgcgccttcgccgtcctcgtcctcggtctcctcgtcctcggccacggctccctcctcggtggtcgcggcgacctccggcggcgggaggcccggcctgggcagaggtcgaaacagtaacaaaggactgcctcagtctacgatttcttttgatggaatctatgcaaatatgaggatggttcatatacttacatcagttgttggctccaaatgtgaagtacaagtgaaaaatggaggtatatatgaaggagtttttaaaacttacagtccgaagtgtgatttggtacttgatgccgcacatgagaaaagtacagaatccagttcggggccgaaacgtgaagaaataatggagagtattttgttcaaatgttcagactttgttgtggtacagtttaaagatatggactccagttatgcaaaaagagatgcttttactgactctgctatcagtgctaaagtgaatggcgaacacaaagagaaggacctggagccctgggatgcaggtgaactcacagccaatgaggaacttgaggctttggaaaatgacgtatctaatggatgggatcccaatgatatgtttcgatataatgaagaaaattatggtgtagtgtctacgtatgatagcagtttatcttcgtatacagtgcccttagaaagagataactcagaagaatttttaaaacgggaagcaagggcaaaccagttagcagaagaaattgagtcaagtgcccagtacaaagctcgagtggccctggaaaatgatgataggagtgaggaagaaaaatacacagcagttcagagaaattccagtgaacgtgaggggcacagcataaacactagggaaaataaatatattcctcctggacaaagaaatagagaagtcatatcctggggaagtgggagacagaattcaccgcgtatgggccagcctggatcgggctccatgccatcaagatccacttctcacacttcagatttcaacccgaattctggttcagaccaaagagtagttaatggaggtgttccctggccatcgccttgcccatctccttcctctcgcccaccttctcgctaccagtcaggtcccaactctcttccacctcgggcagccacccctacacggccgccctccaggcccccctcgcggccatccagacccccgtctcacccctctgctcatggttctccagctcctgtctctactatgcctaaacgcatgtcttcagaagggcctccaaggatgtccccaaaggcccagcgacatcctcgaaatcacagagtttctgctgggaggggttccatatccagtggcctagaatttgtatcccacaacccacccagtgaagcagctactcctccagtagcaaggaccagtccctcggggggaacgtggtcatcagtggtcagtggggttccaagattatcccctaaaactcatagacccaggtctcccagacagaacagtattggaaatacccccagtgggccagttcttgcttctccccaagctggtattattccaactgaagctgttgccatgcctattccagctgcatctcctacgcctgctagtcctgcatcgaacagagctgttaccccttctagtgaggctaaagattccaggcttcaagatcagaggcagaactctcctgcagggaataaagaaaatattaaacccaatgaaacatcacctagcttctcaaaagctgaaaacaaaggtatatcaccagttgtttctgaacatagaaaacagattgatgatttaaagaaatttaagaatgattttaggttacagccaagttctacttctgaatctatggatcaactactaaacaaaaatagagagggagaaaaatcaagagatttgatcaaagacaaaattgaaccaagtgctaaggattctttcattgaaaatagcagcagcaactgtaccagtggcagcagcaagccgaatagccccagcatttccccttcaatacttagtaacacggagcacaagaggggacctgaggtcacttcccaaggggttcagacttccagcccagcatgtaaacaagagaaagacgataaggaagagaagaaagacgcagctgagcaagttaggaaatcaacattgaatcccaatgcaaaggagttcaacccacgttccttctctcagccaaagccttctactaccccaacttcacctcggcctcaagcacaacctagcccatctatggtgggtcatcaacagccaactccagtttatactcagcctgtttgttttgcaccaaatatgatgtatccagtcccagtgagcccaggcgtgcaacctttatacccaatacctatgacgcccatgccagtgaatcaagccaagacatatagagcagtaccaaatatgccccaacagcggcaagaccagcatcatcagagtgccatgatgcacccagcgtcagcagcgggcccaccgattgcagccaccccaccagcttactccacgcaatatgttgcctacagtcctcagcagttcccaaatcagccccttgttcagcatgtgccacattatcagtctcagcatcctcatgtctatagtcctgtaatacagggtaatgctagaatgatggcaccaccaacacacgcccagcctggtttagtatcttcttcagcaactcagtacggggctcatgagcagacgcatgcgatgtatgcatgtcccaaattaccatacaacaaggagacaagcccttctttctactttgccatttccacgggctcccttgctcagcagtatgcgcaccctaacgctaccctgcacccacatactccacaccctcagccttcagctacccccactggacagcagcaaagccaacatggtggaagtcatcctgcacccagtcctgttcagcaccatcagcaccaggccgcccaggctctccatctggccagtccacagcagcagtcagccatttaccacgcggggcttgcgccaactccaccctccatgacacctgcctccaacacgcagtcgccacagaatagtttcccagcagcacaacagactgtctttacgatccatccttctcacgttcagccggcgtataccaacccaccccacatggcccacgtacctcaggctcatgtacagtcaggaatggttccttctcatccaactgcccatgcgccaatgatgctaatgacgacacagccacccggcggtccccaggccgccctcgctcaaagtgcactacagcccattccagtctcgacaacagcgcatttcccctatatgacgcacccttcagtacaagcccaccaccaacagcagttgtaaggctgccctggaggaaccgaaaggccaaattccctcctcccttctactgcttctaccaactggaagcacagaaaactagaatttcatttattttgtttttaaaatatatatgttgatttcttgtaacatccaataggaatgctaacagttcacttgcagtggaagatacttggaccgagtagaggcatttaggaacttgggggctattccataattccatatgctgtttcagagtcccgcaggtaccccagctctgcttgccgaaactggaagttatttattttttaataacccttgaaagtcatgaacacatcagctagcaaaagaagtaacaagagtgattcttgctgctattactgctaaaaaaaaaaaaaaaaaaaaatcaagacttggaacgcccttttactaaacttgacaaagtttcagtaaattcttaccgtcaaactgacggattattatttataaatcaagtttgatgaggtgatcactgtctacagtggttcaacttttaagttaagggaaaaacttttactttgtagataatataaaataaaaacttaaaaaaaatttaaaaaataaaaaaagttttaaaaactgaaaaagttagt

SEQ ID NO: 359998 - DNA, 875 bp, Homo sapiens
  misc_feature (37)..(37): n is a, c, g, or t
taacatatacgaactcgagctggtaccctatgcgtgnacaacccaccccacatggcccacgtacctcaggctcatgtacagtcaggaatggttccttctcatccaactgcccatgcgccaatgatgctaatgacgacacagccacccggcggtccccaggccgccctcgctcaaagtgcactacagcccattccagtctcgacaacagcgcatttcccctatatgacgcacccttcagtacaagcccaccaccaacagcagttgtaaggctgccctggaggaaccgaaaggccaaattccctcctcccttctactgcttctaccaactggaagcacagaaaactagaatttcatttattttgtttttaaaatatatatgttgatttcttgtaacatccaataggaatgctaacagttcacttgcagtggaagatacttggaccgagtagaggcatttaggaacttgggggctattccataattccatatgctgtttcagagtcccgcaggtaccccagctctgcttgccgaaactggaagttatttattttttaataacccttgaaagtcatgaacacatcagctagcaaaagaagtaacaagagtgattcttgctgctattactgctaaaaaaaaaaaaaaaaaaaaatcaagacttggaacgcccttttactaaacttgacaaagtttcagtaaattcttaccgtcaaactgacggattattatttataaatcaagtttgatgaggtgatcactgtctacagtggttcaacttttaagttaagggaaaaacttttactttgtagataatataaaataaaaacttaaaaaaaatttaaaaaataaaaaaagttttaaaaactgaaaaagttagt

SEQ ID NO: 359999 - DNA, 673 bp, Homo sapiens
tagatgtctctgctactttcataacagaactctctgaggcgggtctaagtgagacctgccacaatgaattccatttcctgttaaatagtgcgccagtgaggctctggcaaggtgtgggctagagatgcgactcagttggatctatctctcagaaggctaccttgtaagtagagttccacagctctgggaagtttgggcgtcctcaccctgcaaagtttaggttctgtggtgtagcgcactgcagttgatttgctttttgatagtggggagggaagccggtttggtccgtgtgggccagcgtggtttggtggagtcactctgcttgccgaaactggaagttatttattttttaataacccttgaaagtcatgaacacatcagctagcaaaagaagtaacaagagtgattcttgctgctattactgctaaaaaaaaaaaaaaaaaaaaatcaagacttggaacgcccttttactaaacttgacaaagtttcagtaaattcttaccgtcaaactgacggattattatttataaatcaagtttgatgaggtgatcactgtctacagtggttcaacttttaagttaagggaaaaacttttactttgtagataatataaaataaaaacttaaaaaaaatttaaaaaataaaaaaagttttaaaaactgaaaaagttagt

SEQ ID NO: 360000 - DNA, 1085 bp, Homo sapiens
  misc_feature (3)..(3): n is a, c, g, or t
  misc_feature (24)..(24): n is a, c, g, or t
  misc_feature (43)..(43): n is a, c, g, or t
atntttttaactggaaatttctangtgtggctgtaatccttgntattcagaagctgaattaggaggatcacatgaatctgggaaggcagaactgcagtgagccaacatctcaccactgcactgcagcctgggcaacagcgagacccatgtcgctgaagccccagcagcagcagcagcagcagcagcaacagcagcagcagcaacagcagcagcagcagcagcagcagccgccgcccgcggctgccaatgtccgcaagcccggcggcagcggccttctagcgtcgcccgccgccgcgccttcgccgtcctcgtcctcggtctcctcgtcctcggccacggctccctcctcggtggtcgcggcgacctccggcggcgggaggcccggcctgggcaggtgggtgtcggcaccccagccccctccgctccgggcccggcgtcccctcccccgcggcccgcgccgccgtccccgccccgtgacccgccgggctacccggggtgggctgggggccggcagcgcgggggagactcgctcgggcctgagccccgaggctcggccggtgggcgcaccggggtcctctgggattgtcaggcctgtccagcctcccgcagcatccccgccccctcccccggcggtcaagatggagggagcgggcggcctcccctccccacgcgtgttgggaggggttctcgggtagcggcgatggtcagccccggctcccccttccgcacgatcctccgcccgcagcgtggggatgctcgggcagctcctccactcccggtttaggtgtgaacgttggaggggtctggaggctgtggtggcgttttccggaacatgtccccctccatgggggacatctctggaggggagaagttagggccgcgtcccccgtgccggttaaaggggtaggcaccgggctcctccggaatcatcagggtctgtcggggctctctccccgccccctccgagtcctgggaaagatcggaggacggggtggagacaagtgggccttggcccccgcacccctctgcgttcgtgtccgaggcggcggcgggggctcccgaactcccctgaaatcgtggggctc

SEQ ID NO: 360001 - DNA, 1252 bp, Homo sapiens
caggttcaagcggtttttctgcctcagcctcccgagtaggtgggactacaggtgtgcgccaccacgaccggccaatttttgtatttttagtagagacggggtttcaccgtcttggccaggctgatctcgaacttctgaccttgtgatttgtctgcctaggcctcccaaagtgctgggattacagatgtgagccaccacgcccagcctcacatctactcttctaatccatctaattttgttttatggtgatgcttttacctttcagaaacagtaataatacaacttttccgactaactagagccattaggaagaattagatccagaatccttttttgatttgtttttggtagtttaatgcagataagtaagaaaatatagttaagttaaaaaaaaaaaaaatgaaaagcatccataatccctccacctgacaactgccttttaacattttgatgtgtatccttccaggtgtatttaaatacactcaaataccctacccctttatgtagacatgttttaataagaaataatattcatgtttatattcttgctatgatcctaaatttttggatccattactagataatctttcaggataatgacatttccattagtaatgtttttgcaaaattgtgtgtctattgaattaaacttgtaaaatagttttattttggtacatgatttatatcaaggttgttcagtagaatgccatgttggtgtttttattagataatgattttattccttttacttttaagcaagtcagcatgacaacttgacacctaagtacagaagaacagtgtcttccggtttagtcctttcttttaaaattctgtagcagtgtttaaagtgcttgtcatctcttatgaaaatgaattatgcatgaatacaaaaagaaattactaatatgtcaacctttccagaaaatttggaaaatgcacacctcaaaaggctaatttacctttctatttcccaaattcagcatgtcccaaattaccatacaacaaggagacaagcccttctttctactttgccagtgagttgggttttttatactaatttttaattgtacagtaaaacactttttaaaggatacatgttaagggagtagacttgttgaacaatattttccttgtgccagtcaaattattgaaagtacttatatatataaataattcagtttttaaaatggaaatacccaatttaagaaggctggagttaatgaaaaatggagttgtttcagaaatcaatttt

SEQ ID NO: 360002 - DNA, 1153 bp, Homo sapiens
  misc_feature (6)..(6): n is a, c, g, or t
  misc_feature (32)..(32): n is a, c, g, or t
  misc_feature (40)..(41): n is a, c, g, or t
  misc_feature (54)..(54): n is a, c, g, or t
  misc_feature (299)..(299): n is a, c, g, or t
  misc_feature (306)..(306): n is a, c, g, or t
ttatgnacgcgtgcatgtgtatctgtataagntacttctnngtaggatacttantatcaaagcaggtgtgctaagggtgcattttgaatatcccggaaggtagctgtgaaatgatttttcttcttcacccttagttctggttcaaggtatctctagaaaaagacaagactgagctattctctttggtggattagagatctgcttcaggaggaggaaggttggccagagttgggcagcactgaaattccacatcctcgggttgacaccgattctaaatgatcaaaggcagaagatttatnccagatnaagccatatggattgctggtctaaaattcaaggcagtttccacgggctcccttgctcagcagtatgcgcaccctaacgctaccctgcacccacatactccacaccctcagccttcagctacccccatccacagcagcagtcagccatttaccacgcggggcttgcgccaactccaccctccatgacacctgcctccaacacgcagtcgccacagaatagtttcccagcagcacaacagactgtctttacgatccatccttctcacgttcagccggcgtataccaacccaccccacatggcccacgtacctcaggctcatgtacagtcaggaatggttccttctcatccaactgcccatgcgccaatgatgctaatgacgacacagccacccggcggtccccaggccgccctcgctcaaagtgcactacagcccattccagtctcgacaacagcgcatttgagaactagcaagacccgtccaggagtgtgcacaggagggactgtgacgatcagttcagcatcagggcctgaggcttccgggagccgagtctgtgtgtgttctgatggtatacaggatttggcttgatgagaagcagcagcagcagcaacagcagcctgatgcatgcctaggactcagttggccttccttgttatgacaggctggacagggcagtgttttccttcctgagtcccaaaagtctctcttgttggactttatttccatgtaacattttccccatcccccttaacaaagatactgctccctatgcactgtgttctgcctctttttgactgccacgtcaacccctccccctctaacctgttattctgaaagcaatactggtgg

SEQ ID NO: 360003 - DNA, 520 bp, Homo sapiens
cggagtttcgctcttgttgcccaagctggagtgcaatggtgtgatgtcggttcactgcaacctccacctcccgggttcaagctattctccttccccactctccctagtagctgtgattacaggtgcctgccaccacgcccagctaatttttgtatttttagtagagacagggtttcgccgtgttggccaagctggtctcgaactcctaacctcaggtgatccgcccgcctcggcctcccaaaatgctgggattacaagcgtgagccaccgtgcccggctccatttctcccaatttcaaattcaaggaggaaaagaattcctgattaaggtacttctttcagatcttttgagctagaacaaaaaaacaaagggaaatatttctaattaactctttttaaattttgtttacaacgtatgatacatattttacacatcctttgtggtttttgttcgtcttgtttttaatcaatgccttgcaagtttaccggtatttaggtagggaaaggattttgtttttgtt

SEQ ID NO: 360004 - DNA, 3900 bp, Homo sapiens
taaaatatttcaaccatttttaagcattgtgagctaatagagggatgtggtggtttgttttttcctcttaaaaattattattaatgtacttaagacaaaccatagaaacaaaaaacatttagatatgaggatttttaaatgatggaatggataatagatcatatgcctgggaaaaagggtatgattctcttgagattatttttgtcaaaggcatataagaactggtaccttgatgagctaaagaattcctaacaaattttattttgtaaaggtttggagtacttacttgtgtttttcattttagtgtgatttggtacttgatgccgcacatgagaaaagtacagaatccagttcggggccgaaacgtgaagaaataatggagagtattttgttcaaatgttcagactttgttgtggtacagtttaaagatatggactccagttatgcaaaaagagatgcttttactgactctgctatcagtgctaaagtgaatggcgaacacaaagagaaggacctggagccctgggatgcaggtgaactcacagccaatgaggaacttgaggctttggaaaatgacgtatctaatggatgggatcccaatgatatgtttcgatataatgaagaaaattatggtgtagtgtctacgtatgatagcagtttatcttcgtatacagtgcccttagaaagagataactcagaagaatttttaaaacgggaagcaagggcaaaccagttagcagaagaaattgagtcaagtgcccagtacaaagctcgagtggccctggaaaatgatgataggagtgaggaagaaaaatacacagcagttcagagaaattccagtgaacgtgaggggcacagcataaacactagggaaaataaatatattcctcctggacaaagaaatagagaagtcatatcctggggaagtgggagacagaattcaccgcgtatgggccagcctggatcgggctccatgccatcaagatccacttctcacacttcagatttcaacccgaattctggttcagaccaaagagtagttaatggaggtgttccctggccatcgccttgcccatctccttcctctcgcccaccttctcgctaccagtcaggtcccaactctcttccacctcgggcagccacccctacacggccgccctccaggcccccctcgcggccatccagacccccgtctcacccctctgctcatggttctccagctcctgtctctactatgcctaaacgcatgtcttcagaagggcctccaaggatgtccccaaaggcccagcgacatcctcgaaatcacagagtttctgctgggaggggttccatatccagtggcctagaatttgtatcccacaacccacccagtgaagcagctactcctccagtagcaaggaccagtccctcggggggaacgtggtcatcagtggtcagtggggttccaagattatcccctaaaactcatagacccaggtctcccagacagaacagtattggaaatacccccagtgggccagttcttgcttctccccaagctggtattattccaactgaagctgttgccatgcctattccagctgcatctcctacgcctgctagtcctgcatcgaacagagctgttaccccttctagtgaggctaaagattccaggcttcaagatcagaggcagaactctcctgcagggaataaagaaaatattaaacccaatgaaacatcacctagcttctcaaaagctgaaaacaaaggtatatcaccagttgtttctgaacatagaaaacagattgatgatttaaagaaatttaagaatgattttaggttacagccaagttctacttctgaatctatggatcaactactaaacaaaaatagagagggagaaaaatcaagagatttgatcaaagacaaaattgaaccaagtgctaaggattctttcattgaaaatagcagcagcaactgtaccagtggcagcagcaagccgaatagccccagcatttccccttcaatacttagtaacacggagcacaagaggggacctgaggtcacttcccaaggggttcagacttccagcccagcatgtaaacaagagaaagacgataaggaagagaagaaagacgcagctgagcaagttaggaaatcaacattgaatcccaatgcaaaggagttcaacccacgttccttctctcagccaaagccttctactaccccaacttcacctcggcctcaagcacaacctagcccatctatggtgggtcatcaacagccaactccagtttatactcagcctgtttgttttgcaccaaatatgatgtatccagtcccagtgagcccaggcgtgcaacctttatacccaatacctatgacgcccatgccagtgaatcaagccaagacatatagagcagtaccaaatatgccccaacagcggcaagaccagcatcatcagagtgccatgatgcacccagcgtcagcagcgggcccaccgattgcagccaccccaccagcttactccacgcaatatgttgcctacagtcctcagcagttcccaaatcagccccttgttcagcatgtgccacattatcagtctcagcatcctcatgtctatagtcctgtaatacagggtaatgctagaatgatggcaccaccaacacacgcccagcctggtttagtatcttcttcagcaactcagtacggggctcatgagcagacgcatgcgatgtatgtttccacgggctcccttgctcagcagtatgcgcaccctaacgctaccctgcacccacatactccacaccctcagccttcagctacccccactggacagcagcaaagccaacatggtggaagtcatcctgcacccagtcctgttcagcaccatcagcaccaggccgcccaggctctccatctggccagtccacagcagcagtcagccatttaccacgcggggcttgcgccaactccaccctccatgacacctgcctccaacacgcagtcgccacagaatagtttcccagcagcacaacagactgtctttacgatccatccttctcacgttcagccggcgtataccaacccaccccacatggcccacgtacctcaggctcatgtacagtcaggaatggttccttctcatccaactgcccatgcgccaatgatgctaatgacgacacagccacccggcggtccccaggccgccctcgctcaaagtgcactacagcccattccagtctcgacaacagcgcatttcccctatatgacgcacccttcagtacaagcccaccaccaacagcagttgtaaggctgccctggaggaaccgaaaggccaaattccctcctcccttctactgcttctaccaactggaagcacagaaaactagaatttcatttattttgtttttaaaatatatatgttgatttcttgtaacatccaataggaatgctaacagttcacttgcagtggaagatacttggaccgagtagaggcatttaggaacttgggggctattccataattccatatgctgtttcagagtcccgcaggtaccccagctctgcttgccgaaactggaagttatttattttttaataacccttgaaagtcatgaacacatcagctagcaaaagaagtaacaagagtgattcttgctgctattactgctaaaaaaaaaaaaaaaaaaaaatcaagacttggaacgcccttttactaaacttgacaaagtttcagtaaattcttaccgtcaaactgacggattattatttataaatcaagtttgatgaggtgatcactgtctacagtggttcaacttttaagttaagggaaaaacttttactttgtagataatataaaataaaaacttaaaaaaaatttaaaaaataaaaaaagttttaaaaactgaaaaagttagt

SEQ ID NO: 360005 - DNA, 4690 bp, Homo sapiens
acccccgagaaagcaacccagcgcgccgcccgctcctcacgtgtccctcccggccccggggccacctcacgttctgcttccgtctgacccctccgacttccggtaaagagtccctatccgcacctccgctcccacccggcgcctcggcgcgcccgccctccgatgcgctcagcggccgcagctcctcggagtcccgcggtggccaccgagtctcgccgcttcgccgcagccaggtggcccgggtggcgctcgctccagcggccggcgcggcggagcgggcggggcggcggtggcgcggccccgggaccgtatccctccgccgcccctcccccgcccggccccggcccccctccctcccggcagagctcgcctccctccgcctcagactgttttggtagcaacggcaacggcggcggcgcgtttcggcccggctcccggcggctccttggtctcggcgggcctccccgccccttcgtcgtcgtccttctccccctcgccagcccgggcgcccctccggccgcgccaacccgcgcctccccgctcggcgcccgtgcgtccccgccgcgttccggcgtctccttggcgcgcccggctcccggctgtccccgcccggcgtgcgagccggtgtatgggcccctcaccatgtcgctgaagccccagcagcagcagcagcagcagcagcaacagcagcagcagcaacagcagcagcagcagcagcagcagccgccgcccgcggctgccaatgtccgcaagcccggcggcagcggccttctagcgtcgcccgccgccgcgccttcgccgtcctcgtcctcggtctcctcgtcctcggccacggctccctcctcggtggtcgcggcgacctccggcggcgggaggcccggcctgggcagaggtcgaaacagtaacaaaggactgcctcagtctacgatttcttttgatggaatctatgcaaatatgaggatggttcatatacttacatcagttgttggctccaaatgtgaagtacaagtgaaaaatggaggtatatatgaaggagtttttaaaacttacagtccgaagtgtgatttggtacttgatgccgcacatgagaaaagtacagaatccagttcggggccgaaacgtgaagaaataatggagagtattttgttcaaatgttcagactttgttgtggtacagtttaaagatatggactccagttatgcaaaaagagatgcttttactgactctgctatcagtgctaaagtgaatggcgaacacaaagagaaggacctggagccctgggatgcaggtgaactcacagccaatgaggaacttgaggctttggaaaatgacgtatctaatggatgggatcccaatgatatgtttcgatataatgaagaaaattatggtgtagtgtctacgtatgatagcagtttatcttcgtatacagtgcccttagaaagagataactcagaagaatttttaaaacgggaagcaagggcaaaccagttagcagaagaaattgagtcaagtgcccagtacaaagctcgagtggccctggaaaatgatgataggagtgaggaagaaaaatacacagcagttcagagaaattccagtgaacgtgaggggcacagcataaacactagggaaaataaatatattcctcctggacaaagaaatagagaagtcatatcctggggaagtgggagacagaattcaccgcgtatgggccagcctggatcgggctccatgccatcaagatccacttctcacacttcagatttcaacccgaattctggttcagaccaaagagtagttaatggaggtgttccctggccatcgccttgcccatctccttcctctcgcccaccttctcgctaccagtcaggtcccaactctcttccacctcgggcagccacccctacacggccgccctccaggcccccctcgcggccatccagacccccgtctcacccctctgctcatggttctccagctcctgtctctactatgcctaaacgcatgtcttcagaagggcctccaaggatgtccccaaaggcccagcgacatcctcgaaatcacagagtttctgctgggaggggttccatatccagtggcctagaatttgtatcccacaacccacccagtgaagcagctactcctccagtagcaaggaccagtccctcggggggaacgtggtcatcagtggtcagtggggttccaagattatcccctaaaactcatagacccaggtctcccagacagaacagtattggaaatacccccagtgggccagttcttgcttctccccaagctggtattattccaactgaagctgttgccatgcctattccagctgcatctcctacgcctgctagtcctgcatcgaacagagctgttaccccttctagtgaggctaaagattccaggcttcaagatcagaggcagaactctcctgcagggaataaagaaaatattaaacccaatgaaacatcacctagcttctcaaaagctgaaaacaaaggtatatcaccagttgtttctgaacatagaaaacagattgatgatttaaagaaatttaagaatgattttaggttacagccaagttctacttctgaatctatggatcaactactaaacaaaaatagagagggagaaaaatcaagagatttgatcaaagacaaaattgaaccaagtgctaaggattctttcattgaaaatagcagcagcaactgtaccagtggcagcagcaagccgaatagccccagcatttccccttcaatacttagtaacacggagcacaagaggggacctgaggtcacttcccaaggggttcagacttccagcccagcatgtaaacaagagaaagacgataaggaagagaagaaagacgcagctgagcaagttaggaaatcaacattgaatcccaatgcaaaggagttcaacccacgttccttctctcagccaaagccttctactaccccaacttcacctcggcctcaagcacaacctagcccatctatggtgggtcatcaacagccaactccagtttatactcagcctgtttgttttgcaccaaatatgatgtatccagtcccagtgagcccaggcgtgcaacctttatacccaatacctatgacgcccatgccagtgaatcaagccaagacatatagagcagagttaaatacctagaattggaattgctgaggtatgtaccaaatatgccccaacagcggcaagaccagcatcatcagagtgccatgatgcacccagcgtcagcagcgggcccaccgattgcagccaccccaccagcttactccacgcaatatgttgcctacagtcctcagcagttcccaaatcagccccttgttcagcatgtgccacattatcagtctcagcatcctcatgtctatagtcctgtaatacagggtaatgctagaatgatggcaccaccaacacacgcccagcctggtttagtatcttcttcagcaactcagtacggggctcatgagcagacgcatgcgatgtatgtttccacgggctcccttgctcagcagtatgcgcaccctaacgctaccctgcacccacatactccacaccctcagccttcagctacccccactggacagcagcaaagccaacatggtggaagtcatcctgcacccagtcctgttcagcaccatcagcaccaggccgcccaggctctccatctggccagtccacagcagcagtcagccatttaccacgcggggcttgcgccaactccaccctccatgacacctgcctccaacacgcagtcgccacagaatagtttcccagcagcacaacagactgtctttacgatccatccttctcacgttcagccggcgtataccaacccaccccacatggcccacgtacctcaggctcatgtacagtcaggaatggttccttctcatccaactgcccatgcgccaatgatgctaatgacgacacagccacccggcggtccccaggccgccctcgctcaaagtgcactacagcccattccagtctcgacaacagcgcatttcccctatatgacgcacccttcagtacaagcccaccaccaacagcagttgtaaggctgccctggaggaaccgaaaggccaaattccctcctcccttctactgcttctaccaactggaagcacagaaaactagaatttcatttattttgtttttaaaatatatatgttgatttcttgtaacatccaataggaatgctaacagttcacttgcagtggaagatacttggaccgagtagaggcatttaggaacttgggggctattccataattccatatgctgtttcagagtcccgcaggtaccccagctctgcttgccgaaactggaagttatttattttttaataacccttgaaagtcatgaacacatcagctagcaaaagaagtaacaagagtgattcttgctgctattactgctaaaaaaaaaaaaaaaaaaaaatcaagacttggaacgcccttttactaaacttgacaaagtttcagtaaattcttaccgtcaaactgacggattattatttataaatcaagtttgatgaggtgatcactgtctacagtggttcaacttttaagttaagggaaaaacttttactttgtagataatataaaataaaaacttaaaaaaaatttaaaaaataaaaaaagttttaaaaactgaaaaagttagt

SEQ ID NO: 360006 - DNA, 2902 bp, Homo sapiens
ctgggcatggtggctcatgcctgtaatcccagcactttgggaggccaaggtaggcagatcacctgaggtcaggagtttgagaccagcctggccagcatggtgaaaccccgtctctactaaaaatacaaaaaaattagctggttgtggtggcgagtgcctttaatcccagctactccagaggctgaggcaggagaatcacttgatacatttagttaggagagaaaatcatacttatgttagtaattgctgctgttcttcatatacttgtggttttgattgccagcaaattcctaacattttggaaaagaaaacagtaatgggataaagggtaagggctagagaggacagttttatttacctagatcttcagagaagcctgaagcctcttttaggaagtaacatttgaactgagaatgtaataaatacattttccctttcttctagttccaagattatcccctaaaactcatagacccaggtctcccagacagaacagtattggaaatacccccagtgggccagttcttgcttctccccaagctggtattattccaactgaagctgttgccatgcctattccagctgcatctcctacgcctgctagtcctgcatcgaacagagctgttaccccttctagtgaggctaaagattccaggcttcaagatcagaggcagaactctcctgcagggaataaagaaaatattaaacccaatgaaacatcacctagcttctcaaaagctgaaaacaaaggtatatcaccagttgtttctgaacatagaaaacagattgatgatttaaagaaatttaagaatgattttaggttacagccaagttctacttctgaatctatggatcaactactaaacaaaaatagagagggagaaaaatcaagagatttgatcaaagacaaaattgaaccaagtgctaaggattctttcattgaaaatagcagcagcaactgtaccagtggcagcagcaagccgaatagccccagcatttccccttcaatacttagtaacacggagcacaagaggggacctgaggtcacttcccaaggggttcagacttccagcccagcatgtaaacaagagaaagacgataaggaagagaagaaagacgcagctgagcaagttaggaaatcaacattgaatcccaatgcaaaggagttcaacccacgttccttctctcagccaaagccttctactaccccaacttcacctcggcctcaagcacaacctagcccatctatggtgggtcatcaacagccaactccagtttatactcagcctgtttgttttgcaccaaatatgatgtatccagtcccagtgagcccaggcgtgcaacctttatacccaatacctatgacgcccatgccagtgaatcaagccaagacatatagagcagtaccaaatatgccccaacagcggcaagaccagcatcatcagagtgccatgatgcacccagcgtcagcagcgggcccaccgattgcagccaccccaccagcttactccacgcaatatgttgcctacagtcctcagcagttcccaaatcagccccttgttcagcatgtgccacattatcagtctcagcatcctcatgtctatagtcctgtaatacagggtaatgctagaatgatggcaccaccaacacacgcccagcctggtttagtatcttcttcagcaactcagtacggggctcatgagcagacgcatgcgatgtatgtttccacgggctcccttgctcagcagtatgcgcaccctaacgctaccctgcacccacatactccacaccctcagccttcagctacccccactggacagcagcaaagccaacatggtggaagtcatcctgcacccagtcctgttcagcaccatcagcaccaggccgcccaggctctccatctggccagtccacagcagcagtcagccatttaccacgcggggcttgcgccaactccaccctccatgacacctgcctccaacacgcagtcgccacagaatagtttcccagcagcacaacagactgtctttacgatccatccttctcacgttcagccggcgtataccaacccaccccacatggcccacgtacctcaggctcatgtacagtcaggaatggttccttctcatccaactgcccatgcgccaatgatgctaatgacgacacagccacccggcggtccccaggccgccctcgctcaaagtgcactacagcccattccagtctcgacaacagcgcatttcccctatatgacgcacccttcagtacaagcccaccaccaacagcagttgtaaggctgccctggaggaaccgaaaggccaaattccctcctcccttctactgcttctaccaactggaagcacagaaaactagaatttcatttattttgtttttaaaatatatatgttgatttcttgtaacatccaataggaatgctaacagttcacttgcagtggaagatacttggaccgagtagaggcatttaggaacttgggggctattccataattccatatgctgtttcagagtcccgcaggtaccccagctctgcttgccgaaactggaagttatttattttttaataacccttgaaagtcatgaacacatcagctagcaaaagaagtaacaagagtgattcttgctgctattactgctaaaaaaaaaaaaaaaaaaaaatcaagacttggaacgcccttttactaaacttgacaaagtttcagtaaattcttaccgtcaaactgacggattattatttataaatcaagtttgatgaggtgatcactgtctacagtggttcaacttttaagttaagggaaaaacttttactttgtagataatataaaataaaaacttaaaaaaaatttaaaaaataaaaaaagttttaaaaactgaaaaagttagt

SEQ ID NO: 360007 - DNA, 4457 bp, Homo sapiens
acccccgagaaagcaacccagcgcgccgcccgctcctcacgtgtccctcccggccccggggccacctcacgttctgcttccgtctgacccctccgacttccggtaaagagtccctatccgcacctccgctcccacccggcgcctcggcgcgcccgccctccgatgcgctcagcggccgcagctcctcggagtcccgcggtggccaccgagtctcgccgcttcgccgcagccaggtggcccgggtggcgctcgctccagcggccggcgcggcggagcgggcggggcggcggtggcgcggccccgggaccgtatccctccgccgcccctcccccgcccggccccggcccccctccctcccggcagagctcgcctccctccgcctcagactgttttggtagcaacggcaacggcggcggcgcgtttcggcccggctcccggcggctccttggtctcggcgggcctccccgccccttcgtcgtcgtccttctccccctcgccagcccgggcgcccctccggccgcgccaacccgcgcctccccgctcggcgcccgtgcgtccccgccgcgttccggcgtctccttggcgcgcccggctcccggctgtccccgcccggcgtgcgagccggtgtatgggcccctcaccatgtcgctgaagccccagcagcagcagcagcagcagcagcaacagcagcagcagcaacagcagcagcagcagcagcagcagccgccgcccgcggctgccaatgtccgcaagcccggcggcagcggccttctagcgtcgcccgccgccgcgccttcgccgtcctcgtcctcggtctcctcgtcctcggccacggctccctcctcggtggtcgcggcgacctccggcggcgggaggcccggcctgggcagaggtcgaaacagtaacaaaggactgcctcagtctacgatttcttttgatggaatctatgcaaatatgaggatggttcatatacttacatcagttgttggctccaaatgtgaagtacaagtgaaaaatggaggtatatatgaaggagtttttaaaacttacagtccgaagtgtgatttggtacttgatgccgcacatgagaaaagtacagaatccagttcggggccgaaacgtgaagaaataatggagagtattttgttcaaatgttcagactttgttgtggtacagtttaaagatatggactccagttatgcaaaaagagatgcttttactgactctgctatcagtgctaaagtgaatggcgaacacaaagagaaggacctggagccctgggatgcaggtgaactcacagccaatgaggaacttgaggctttggaaaatgacgtatctaatggatgggatcccaatgatatgtttcgatataatgaagaaaattatggtgtagtgtctacgtatgatagcagtttatcttcgtatacagtgcccttagaaagagataactcagaagaatttttaaaacgggaagcaagggcaaaccagttagcagaagaaattgagtcaagtgcccagtacaaagctcgagtggccctggaaaatgatgataggagtgaggaagaaaaatacacagcagttcagagaaattccagtgaacgtgaggggcacagcataaacactagggaaaataaatatattcctcctggacaaagaaatagagaagtcatatcctggggaagtgggagacagaattcaccgcgtatgggccagcctggatcgggctccatgccatcaagatccacttctcacacttcagatttcaacccgaattctggttcagaccaaagagtagttaatggaggtgttccctggccatcgccttgcccatctccttcctctcgcccaccttctcgctaccagtcaggtcccaactctcttccacctcgggcagccacccctacacggccgccctccaggcccccctcgcggccatccagacccccgtctcacccctctgctcatggttctccagctcctgtctctactatgcctaaacgcatgtcttcagaagggcctccaaggatgtccccaaaggcccagcgacatcctcgaaatcacagagtttctgctgggaggggttccatatccagtggcctagaatttgtatcccacaacccacccagtgaagcagctactcctccagtagcaaggaccagtccctcggggggaacgtggtcatcagtggtcagtggggctaaagattccaggcttcaagatcagaggcagaactctcctgcagggaataaagaaaatattaaacccaatgaaacatcacctagcttctcaaaagctgaaaacaaaggtatatcaccagttgtttctgaacatagaaaacagattgatgatttaaagaaatttaagaatgattttaggttacagccaagttctacttctgaatctatggatcaactactaaacaaaaatagagagggagaaaaatcaagagatttgatcaaagacaaaattgaaccaagtgctaaggattctttcattgaaaatagcagcagcaactgtaccagtggcagcagcaagccgaatagccccagcatttccccttcaatacttagtaacacggagcacaagaggggacctgaggtcacttcccaaggggttcagacttccagcccagcatgtaaacaagagaaagacgataaggaagagaagaaagacgcagctgagcaagttaggaaatcaacattgaatcccaatgcaaaggagttcaacccacgttccttctctcagccaaagccttctactaccccaacttcacctcggcctcaagcacaacctagcccatctatggtgggtcatcaacagccaactccagtttatactcagcctgtttgttttgcaccaaatatgatgtatccagtcccagtgagcccaggcgtgcaacctttatacccaatacctatgacgcccatgccagtgaatcaagccaagacatatagagcagtaccaaatatgccccaacagcggcaagaccagcatcatcagagtgccatgatgcacccagcgtcagcagcgggcccaccgattgcagccaccccaccagcttactccacgcaatatgttgcctacagtcctcagcagttcccaaatcagccccttgttcagcatgtgccacattatcagtctcagcatcctcatgtctatagtcctgtaatacagggtaatgctagaatgatggcaccaccaacacacgcccagcctggtttagtatcttcttcagcaactcagtacggggctcatgagcagacgcatgcgatgtatgtttccacgggctcccttgctcagcagtatgcgcaccctaacgctaccctgcacccacatactccacaccctcagccttcagctacccccactggacagcagcaaagccaacatggtggaagtcatcctgcacccagtcctgttcagcaccatcagcaccaggccgcccaggctctccatctggccagtccacagcagcagtcagccatttaccacgcggggcttgcgccaactccaccctccatgacacctgcctccaacacgcagtcgccacagaatagtttcccagcagcacaacagactgtctttacgatccatccttctcacgttcagccggcgtataccaacccaccccacatggcccacgtacctcaggctcatgtacagtcaggaatggttccttctcatccaactgcccatgcgccaatgatgctaatgacgacacagccacccggcggtccccaggccgccctcgctcaaagtgcactacagcccattccagtctcgacaacagcgcatttcccctatatgacgcacccttcagtacaagcccaccaccaacagcagttgtaaggctgccctggaggaaccgaaaggccaaattccctcctcccttctactgcttctaccaactggaagcacagaaaactagaatttcatttattttgtttttaaaatatatatgttgatttcttgtaacatccaataggaatgctaacagttcacttgcagtggaagatacttggaccgagtagaggcatttaggaacttgggggctattccataattccatatgctgtttcagagtcccgcaggtaccccagctctgcttgccgaaactggaagttatttattttttaataacccttgaaagtcatgaacacatcagctagcaaaagaagtaacaagagtgattcttgctgctattactgctaaaaaaaaaaaaaaaaaaaaatcaagacttggaacgcccttttactaaacttgacaaagtttcagtaaattcttaccgtcaaactgacggattattatttataaatcaagtttgatgaggtgatcactgtctacagtggttcaacttttaagttaagggaaaaacttttactttgtagataatataaaataaaaacttaaaaaaaatttaaaaaataaaaaaagttttaaaaactgaaaaagttagt

SEQ ID NO: 360008 - DNA, 5545 bp, Homo sapiens
acccccgagaaagcaacccagcgcgccgcccgctcctcacgtgtccctcccggccccggggccacctcacgttctgcttccgtctgacccctccgacttccggtaaagagtccctatccgcacctccgctcccacccggcgcctcggcgcgcccgccctccgatgcgctcagcggccgcagctcctcggagtcccgcggtggccaccgagtctcgccgcttcgccgcagccaggtggcccgggtggcgctcgctccagcggccggcgcggcggagcgggcggggcggcggtggcgcggccccgggaccgtatccctccgccgcccctcccccgcccggccccggcccccctccctcccggcagagctcgcctccctccgcctcagactgttttggtagcaacggcaacggcggcggcgcgtttcggcccggctcccggcggctccttggtctcggcgggcctccccgccccttcgtcgtcgtccttctccccctcgccagcccgggcgcccctccggccgcgccaacccgcgcctccccgctcggcgcccgtgcgtccccgccgcgttccggcgtctccttggcgcgcccggctcccggctgtccccgcccggcgtgcgagccggtgtatgggcccctcaccatgtcgctgaagccccagcagcagcagcagcagcagcagcaacagcagcagcagcaacagcagcagcagcagcagcagcagccgccgcccgcggctgccaatgtccgcaagcccggcggcagcggccttctagcgtcgcccgccgccgcgccttcgccgtcctcgtcctcggtctcctcgtcctcggccacggctccctcctcggtggtcgcggcgacctccggcggcgggaggcccggcctgggcagaggtcgaaacagtaacaaaggactgcctcagtctacgatttcttttgatggaatctatgcaaatatgaggatggttcatatacttacatcagttgttggctccaaatgtgaagtacaagtgaaaaatggaggtatatatgaaggagtttttaaaacttacagtccgaagtgtgatttggtacttgatgccgcacatgagaaaagtacagaatccagttcggggccgaaacgtgaagaaataatggagagtattttgttcaaatgttcagactttgttgtggtacagtttaaagatatggactccagttatgcaaaaagagatgcttttactgactctgctatcagtgctaaagtgaatggcgaacacaaagagaaggacctggagccctgggatgcaggtgaactcacagccaatgaggaacttgaggctttggaaaatgacgtatctaatggatgggatcccaatgatatgtttcgatataatgaagaaaattatggtgtagtgtctacgtatgatagcagtttatcttcgtatacagtgcccttagaaagagataactcagaagaatttttaaaacgggaagcaagggcaaaccagttagcagaagaaattgagtcaagtgcccagtacaaagctcgagtggccctggaaaatgatgataggagtgaggaagaaaaatacacagcagttcagagaaattccagtgaacgtgaggggcacagcataaacactagggaaaataaatatattcctcctggacaaagaaatagagaagtcatatcctggggaagtgggagacagaattcaccgcgtatgggccagcctggatcgggctccatgccatcaagatccacttctcacacttcagatttcaacccgaattctggttcagaccaaagagtagttaatggaggtgttccctggccatcgccttgcccatctccttcctctcgcccaccttctcgctaccagtcaggtcccaactctcttccacctcgggcagccacccctacacggccgccctccaggcccccctcgcggccatccagacccccgtctcacccctctgctcatggttctccagctcctgtctctactatgcctaaacgcatgtcttcagaagggcctccaaggatgtccccaaaggcccagcgacatcctcgaaatcacagagtttctgctgggaggggttccatatccagtggcctagaatttgtatcccacaacccacccagtgaagcagctactcctccagtagcaaggaccagtccctcggggggaacgtggtcatcagtggtcagtggggttccaagattatcccctaaaactcatagacccaggtctcccagacagaacagtattggaaatacccccagtgggccagttcttgcttctccccaagctggtattattccaactgaagctgttgccatgcctattccagctgcatctcctacgcctgctagtcctgcatcgaacagagctgttaccccttctagtgaggctaaagattccaggcttcaagatcagaggcagaactctcctgcagggaataaagaaaatattaaacccaatgaaacatcacctagcttctcaaaagctgaaaacaaaggtatatcaccagttgtttctgaacatagaaaacagattgatgatttaaagaaatttaagaatgattttaggttacagccaagttctacttctgaatctatggatcaactactaaacaaaaatagagagggagaaaaatcaagagatttgatcaaagacaaaattgaaccaagtgctaaggattctttcattgaaaatagcagcagcaactgtaccagtggcagcagcaagccgaatagccccagcatttccccttcaatacttagtaacacggagcacaagaggggacctgaggtcacttcccaaggggttcagacttccagcccagcatgtaaacaagagaaagacgataaggaagagaagaaagacgcagctgagcaagttaggaaatcaacattgaatcccaatgcaaaggagttcaacccacgttccttctctcagccaaagccttctactaccccaacttcacctcggcctcaagcacaacctagcccatctatggtgggtcatcaacagccaactccagtttatactcagcctgtttgttttgcaccaaatatgatgtatccagtcccagtgagcccaggcgtgcaacctttatacccaatacctatgacgcccatgccagtgaatcaagccaagacatatagagcagtaccaaatatgccccaacagcggcaagaccagcatcatcagagtgccatgatgcacccagcgtcagcagcgggcccaccgattgcagccaccccaccagcttactccacgcaatatgttgcctacagtcctcagcagttcccaaatcagccccttgttcagcatgtgccacattatcagtctcagcatcctcatgtctatagtcctgtaatacagggtaatgctagaatgatggcaccaccaacacacgcccagcctggtttagtatcttcttcagcaactcagtacggggctcatgagcagacgcatgcgatgtatgcatgtcccaaattaccatacaacaaggagacaagcccttctttctactttgccatttccacgggctcccttgctcagcagtatgcgcaccctaacgctaccctgcacccacatactccacaccctcagccttcagctacccccactggacagcagcaaagccaacatggtggaagtcatcctgcacccagtcctgttcagcaccatcagcaccaggccgcccaggctctccatctggccagtccacagcagcagtcagccatttaccacgcggggcttgcgccaactccaccctccatgacacctgcctccaacacgcagtcgccacagaatagtttcccagcagcacaacagactgtctttacgatccatccttctcacgttcagccggcgtataccaacccaccccacatggcccacgtacctcaggctcatgtacagtcaggaatggttccttctcatccaactgcccatgcgccaatgatgctaatgacgacacagccacccggcggtccccaggccgccctcgctcaaagtgcactacagcccattccagtctcgacaacagcgcatttcccctatatgacgcacccttcaggtgaggcgtgtgtgtgcaggggccgccggggcaccccaaagcattctgctcgcacaggtggaatggcaggcagggccagtgcttcaagccccgcatttgagaactagcaagacccgtccaggagtgtgcacaggagggactgtgacgatcagttcagcatcagggcctgaggcttccgggagccgagtctgtgtgtgttctgatggtatacaggatttggcttgatgagaagcagcagcagcagcaacagcagcctgatgcatgcctaggactcagttggccttccttgttatgacaggctggacagggcagtgttttccttcctgagtcccaaaagtctgacatgtggggggttattaccatggcagagtttgattgtagctctggagaagatactgctgagaaagcgctgtggatggactggctttgagtgtagcgttagccccagcccctgaacaggggagagcgccctgtgattgtgctctactacttgatggctgccatggcgatacttcacagtctgacctgttattctgaaagcaatactggtgcttggctaatatttggggagggggtttgttaaggcctttttttctaccccatgaacaagtcttctgggagttttatctgaagtggttttacgtctgactggtttgtttctacccacccacccaaccctccccactttggtgcagatgggagggggaaaagcgaattcaattttgagttttgttcagctagcacgaggatagtttacaatcatgtgctgcagagacactaggctgatgtgtggtgttgccagttttctgtttcaatgttcgcttttctttttacagtacaagcccaccaccaacagcagttgtaaggctgccctggaggaaccgaaaggccaaattccctcctcccttctactgcttctaccaactggaagcacagaaaactagaatttcatttattttgtttttaaaatatatatgttgatttcttgtaacatccaataggaatgctaacagttcacttgcagtggaagatacttggaccgagtagaggcatttaggaacttgggggctattccataattccatatgctgtttcagagtcccgcaggtaccccagctctgcttgccgaaactggaagttatttattttttaataacccttgaaagtcatgaacacatcagctagcaaaagaagtaacaagagtgattcttgctgctattactgctaaaaaaaaaaaaaaaaaaaaatcaagacttggaacgcccttttactaaacttgacaaagtttcagtaaattcttaccgtcaaactgacggattattatttataaatcaagtttgatgaggtgatcactgtctacagtggttcaacttttaagttaagggaaaaacttttactttgtagataatataaaataaaaacttaaaaaaaatttaaaaaataaaaaaagttttaaaaactgaaaaagttagt

SEQ ID NO: 360009 - DNA, 2231 bp, Homo sapiens
  misc_feature (172)..(172): n is a, c, g, or t
cccatctttactaaaaataaatattaaaaaaaattagctgggcgtggtggcagtctcctgtaatcccagctaatcaggaggctaaggcaagagaatggcttaaactcgggaggcagaggttgcagtgagccaagattgcactgctgcactccaacctgagcaacagagtggngactctgtgaaggaaaaaaaaaaagtattttttgattgcctttgagaggaacggttgtatattactcagatttttaaaaaattgttcttttatggctgtattctttaagggattaaggaatgggcaatataagtgtatatgtttcaataaaaacgattagtgatcttctagtgagaacagtttaaatctatatttagcaattttttttaaattgtcaggtatggaagattttagagcaacgtaaagtccatgtagatttcactggcctttatattttttttaggcaagttaggaaatcaacattgaatcccaatgcaaaggagttcaacccacgttccttctctcagccaaagccttctactaccccaacttcacctcggcctcaagcacaacctagcccatctatggtgggtcatcaacagccaactccagtttatactcagcctgtttgttttgcaccaaatatgatgtatccagtcccagtgagcccaggcgtgcaacctttatacccaatacctatgacgcccatgccagtgaatcaagccaagacatatagagcagtaccaaatatgccccaacagcggcaagaccagcatcatcagagtgccatgatgcacccagcgtcagcagcgggcccaccgattgcagccaccccaccagcttactccacgcaatatgttgcctacagtcctcagcagttcccaaatcagccccttgttcagcatgtgccacattatcagtctcagcatcctcatgtctatagtcctgtaatacagggtaatgctagaatgatggcaccaccaacacacgcccagcctggtttagtatcttcttcagcaactcagtacggggctcatgagcagacgcatgcgatgtatgtttccacgggctcccttgctcagcagtatgcgcaccctaacgctaccctgcacccacatactccacaccctcagccttcagctacccccactggacagcagcaaagccaacatggtggaagtcatcctgcacccagtcctgttcagcaccatcagcaccaggccgcccaggctctccatctggccagtccacagcagcagtcagccatttaccacgcggggcttgcgccaactccaccctccatgacacctgcctccaacacgcagtcgccacagaatagtttcccagcagcacaacagactgtctttacgatccatccttctcacgttcagccggcgtataccaacccaccccacatggcccacgtacctcaggctcatgtacagtcaggaatggttccttctcatccaactgcccatgcgccaatgatgctaatgacgacacagccacccggcggtccccaggccgccctcgctcaaagtgcactacagcccattccagtctcgacaacagcgcatttcccctatatgacgcacccttcagtacaagcccaccaccaacagcagttgtaaggctgccctggaggaaccgaaaggccaaattccctcctcccttctactgcttctaccaactggaagcacagaaaactagaatttcatttattttgtttttaaaatatatatgttgatttcttgtaacatccaataggaatgctaacagttcacttgcagtggaagatacttggaccgagtagaggcatttaggaacttgggggctattccataattccatatgctgtttcagagtcccgcaggtaccccagctctgcttgccgaaactggaagttatttattttttaataacccttgaaagtcatgaacacatcagctagcaaaagaagtaacaagagtgattcttgctgctattactgctaaaaaaaaaaaaaaaaaaaaatcaagacttggaacgcccttttactaaacttgacaaagtttcagtaaattcttaccgtcaaactgacggattattatttataaatcaagtttgatgaggtgatcactgtctacagtggttcaacttttaagttaagggaaaaacttttactttgtagataatataaaataaaaacttaaaaaaaatttaaaaaataaaaaaagttttaaaaactgaaaaagttagt

SEQ ID NO: 360010 - DNA, 1519 bp, Homo sapiens
agtctgcttttttttctgcagtaccaaatatgccccaacagcggcaagaccagcatcatcagagtgccatgatgcacccagcgtcagcagcgggcccaccgattgcagccaccccaccagcttactccacgcaatatgttgcctacagtcctcagcagttcccaaatcagccccttgttcagcatgtgccacattatcagtctcagcatcctcatgtctatagtcctgtaatacagggtaatgctagaatgatggcaccaccaacacacgcccagcctggtttagtatcttcttcagcaactcagtacggggctcatgagcagacgcatgcgatgtatgtttccacgggctcccttgctcagcagtatgcgcaccctaacgctaccctgcacccacatactccacaccctcagccttcagctacccccactggacagcagcaaagccaacatggtggaagtcatcctgcacccagtcctgttcagcaccatcagcaccaggccgcccaggctctccatctggccagtccacagcagcagtcagccatttaccacgcggggcttgcgccaactccaccctccatgacacctgcctccaacacgcagtcgccacagaatagtttcccagcagcacaacagactgtctttacgatccatccttctcacgttcagccggcgtataccaacccaccccacatggcccacgtacctcaggctcatgtacagtcaggaatggttccttctcatccaactgcccatgcgccaatgatgctaatgacgacacagccacccggcggtccccaggccgccctcgctcaaagtgcactacagcccattccagtctcgacaacagcgcatttcccctatatgacgcacccttcagtacaagcccaccaccaacagcagttgtaaggctgccctggaggaaccgaaaggccaaattccctcctcccttctactgcttctaccaactggaagcacagaaaactagaatttcatttattttgtttttaaaatatatatgttgatttcttgtaacatccaataggaatgctaacagttcacttgcagtggaagatacttggaccgagtagaggcatttaggaacttgggggctattccataattccatatgctgtttcagagtcccgcaggtaccccagctctgcttgccgaaactggaagttatttattttttaataacccttgaaagtcatgaacacatcagctagcaaaagaagtaacaagagtgattcttgctgctattactgctaaaaaaaaaaaaaaaaaaaaatcaagacttggaacgcccttttactaaacttgacaaagtttcagtaaattcttaccgtcaaactgacggattattatttataaatcaagtttgatgaggtgatcactgtctacagtggttcaacttttaagttaagggaaaaacttttactttgtagataatataaaataaaaacttaaaaaaaatttaaaaaataaaaaaagttttaaaaactgaaaaagttagt

SEQ ID NO: 360011 - DNA, 1716 bp, Homo sapiens
gccacgttccttctctcagccccaaagccttctactaccccaacttcacctcggcctcaagcacaacctagcccatctatggtgggtcatcaacagccaactccagtttatacctttatacccaatacctatgacgcccatgccagtgaatcaagccaagacatatagagcagccttggaacatatgaacctgttgaaagaactctgcctgaaataattaccaaatatgccccaacagcggcaagaccagcatcatcagagtgccatgatgcacccagcgtcagcagcgggcccaccgattgcagccaccccaccagcttactccacgcaatatgttgcctacagtcctcagcagttcccaaatcagccccttgttcagcatgtgccacattatcagtctcagcatcctcatgtctatagtcctgtaatacagggtaatgctagaatgatggcaccaccaacacacgcccagcctggtttagtatcttcttcagcaactcagtacggggctcatgagcagacgcatgcgatgtatgtttccacgggctcccttgctcagcagtatgcgcaccctaacgctaccctgcacccacatactccacaccctcagccttcagctacccccactggacagcagcaaagccaacatggtggaagtcatcctgcacccagtcctgttcagcaccatcagcaccaggccgcccaggctctccatctggccagtccacagcagcagtcagccatttaccacgcggggcttgcgccaactccaccctccatgacacctgcctccaacacgcagtcgccacagaatagtttcccagcagcacaacagactgtctttacgatccatccttctcacgttcagccggcgtataccaacccaccccacatggcccacgtacctcaggctcatgtacagtcaggaatggttccttctcatccaactgcccatgcgccaatgatgctaatgacgacacagccacccggcggtccccaggccgccctcgctcaaagtgcactacagcccattccagtctcgacaacagcgcatttcccctatatgacgcacccttcagtacaagcccaccaccaacagcagttgtaaggctgccctggaggaaccgaaaggccaaattccctcctcccttctactgcttctaccaactggaagcacagaaaactagaatttcatttattttgtttttaaaatatatatgttgatttcttgtaacatccaataggaatgctaacagttcacttgcagtggaagatacttggaccgagtagaggcatttaggaacttgggggctattccataattccatatgctgtttcagagtcccgcaggtaccccagctctgcttgccgaaactggaagttatttattttttaataacccttgaaagtcatgaacacatcagctagcaaaagaagtaacaagagtgattcttgctgctattactgctaaaaaaaaaaaaaaaaaaaaatcaagacttggaacgcccttttactaaacttgacaaagtttcagtaaattcttaccgtcaaactgacggattattatttataaatcaagtttgatgaggtgatcactgtctacagtggttcaacttttaagttaagggaaaaacttttactttgtagataatataaaataaaaacttaaaaaaaatttaaaaaataaaaaaagttttaaaaactgaaaaagttagt

SEQ ID NO: 360012 - DNA, 1780 bp, Homo sapiens
gggggcacaaggggctgtgaaagattcagaacaagtggaacctcttaggcttgggaaagtaaactgagtggcagaagggctcctgtgattagctgagagagactgtggtccttcggccctgatgatagatccctggccttgccacataccatacacagtgcccgcacccccatcccccaccacacccaatatagtctgtgccctcaggacattgctccagggcagtagcatggtgaggttagcctgatgatggccttgagctaaagagtgtgcacctaaaatgcacttgtgagtagtttctgcctatgccttcaagttgcctgggaaaacctagtgaccgttaagagtaaatgcaaactaatttgattttaatatcatatgtagagctgtattatatgaaccaaatgctagtctgttaagcaatagctacacttattttttcaagacaatggatggtttaaatggagtcatctatagaaattggtagtggcgtgagttatgcattgtaaccatcaagaaagttcagttgatgaagtgtagaggagcgatggaggttgtcacacatcggttgtgtacatgctcctttttctttcactttagtttccacgggctcccttgctcagcagtatgcgcaccctaacgctaccctgcacccacatactccacaccctcagccttcagctacccccactggacagcagcaaagccaacatggtggaagtcatcctgcacccagtcctgttcagcaccatcagcaccaggccgcccaggctctccatctggccagtccacagcagcagtcagccatttaccacgcggggcttgcgccaactccaccctccatgacacctgcctccaacacgcagtcgccacagaatagtttcccagcagcacaacagactgtctttacgatccatccttctcacgttcagccggcgtataccaacccaccccacatggcccacgtacctcaggctcatgtacagtcaggaatggttccttctcatccaactgcccatgcgccaatgatgctaatgacgacacagccacccggcggtccccaggccgccctcgctcaaagtgcactacagcccattccagtctcgacaacagcgcatttcccctatatgacgcacccttcagtacaagcccaccaccaacagcagttgtaaggctgccctggaggaaccgaaaggccaaattccctcctcccttctactgcttctaccaactggaagcacagaaaactagaatttcatttattttgtttttaaaatatatatgttgatttcttgtaacatccaataggaatgctaacagttcacttgcagtggaagatacttggaccgagtagaggcatttaggaacttgggggctattccataattccatatgctgtttcagagtcccgcaggtaccccagctctgcttgccgaaactggaagttatttattttttaataacccttgaaagtcatgaacacatcagctagcaaaagaagtaacaagagtgattcttgctgctattactgctaaaaaaaaaaaaaaaaaaaaatcaagacttggaacgcccttttactaaacttgacaaagtttcagtaaattcttaccgtcaaactgacggattattatttataaatcaagtttgatgaggtgatcactgtctacagtggttcaacttttaagttaagggaaaaacttttactttgtagataatataaaataaaaacttaaaaaaaatttaaaaaataaaaaaagttttaaaaactgaaaaagttagt

SEQ ID NO: 360013 - DNA, 2214 bp, Homo sapiens
caggttcaagcggtttttctgcctcagcctcccgagtaggtgggactacaggtgtgcgccaccacgaccggccaatttttgtatttttagtagagacggggtttcaccgtcttggccaggctgatctcgaacttctgaccttgtgatttgtctgcctaggcctcccaaagtgctgggattacagatgtgagccaccacgcccagcctcacatctactcttctaatccatctaattttgttttatggtgatgcttttacctttcagaaacagtaataatacaacttttccgactaactagagccattaggaagaattagatccagaatccttttttgatttgtttttggtagtttaatgcagataagtaagaaaatatagttaagttaaaaaaaaaaaaaatgaaaagcatccataatccctccacctgacaactgccttttaacattttgatgtgtatccttccaggtgtatttaaatacactcaaataccctacccctttatgtagacatgttttaataagaaataatattcatgtttatattcttgctatgatcctaaatttttggatccattactagataatctttcaggataatgacatttccattagtaatgtttttgcaaaattgtgtgtctattgaattaaacttgtaaaatagttttattttggtacatgatttatatcaaggttgttcagtagaatgccatgttggtgtttttattagataatgattttattccttttacttttaagcaagtcagcatgacaacttgacacctaagtacagaagaacagtgtcttccggtttagtcctttcttttaaaattctgtagcagtgtttaaagtgcttgtcatctcttatgaaaatgaattatgcatgaatacaaaaagaaattactaatatgtcaacctttccagaaaatttggaaaatgcacacctcaaaaggctaatttacctttctatttcccaaattcagcatgtcccaaattaccatacaacaaggagacaagcccttctttctactttgccatttccacgggctcccttgctcagcagtatgcgcaccctaacgctaccctgcacccacatactccacaccctcagccttcagctacccccactggacagcagcaaagccaacatggtggaagtcatcctgcacccagtcctgttcagcaccatcagcaccaggccgcccaggctctccatctggccagtccacagcagcagtcagccatttaccacgcggggcttgcgccaactccaccctccatgacacctgcctccaacacgcagtcgccacagaatagtttcccagcagcacaacagactgtctttacgatccatccttctcacgttcagccggcgtataccaacccaccccacatggcccacgtacctcaggctcatgtacagtcaggaatggttccttctcatccaactgcccatgcgccaatgatgctaatgacgacacagccacccggcggtccccaggccgccctcgctcaaagtgcactacagcccattccagtctcgacaacagcgcatttcccctatatgacgcacccttcagtacaagcccaccaccaacagcagttgtaaggctgccctggaggaaccgaaaggccaaattccctcctcccttctactgcttctaccaactggaagcacagaaaactagaatttcatttattttgtttttaaaatatatatgttgatttcttgtaacatccaataggaatgctaacagttcacttgcagtggaagatacttggaccgagtagaggcatttaggaacttgggggctattccataattccatatgctgtttcagagtcccgcaggtaccccagctctgcttgccgaaactggaagttatttattttttaataacccttgaaagtcatgaacacatcagctagcaaaagaagtaacaagagtgattcttgctgctattactgctaaaaaaaaaaaaaaaaaaaaatcaagacttggaacgcccttttactaaacttgacaaagtttcagtaaattcttaccgtcaaactgacggattattatttataaatcaagtttgatgaggtgatcactgtctacagtggttcaacttttaagttaagggaaaaacttttactttgtagataatataaaataaaaacttaaaaaaaatttaaaaaataaaaaaagttttaaaaactgaaaaagttagt

SEQ ID NO: 360014 - DNA, 4203 bp, Homo sapiens
acccccgagaaagcaacccagcgcgccgcccgctcctcacgtgtccctcccggccccggggccacctcacgttctgcttccgtctgacccctccgacttccggtaaagagtccctatccgcacctccgctcccacccggcgcctcggcgcgcccgccctccgatgcgctcagcggccgcagctcctcggagtcccgcggtggccaccgagtctcgccgcttcgccgcagccaggtggcccgggtggcgctcgctccagcggccggcgcggcggagcgggcggggcggcggtggcgcggccccgggaccgtatccctccgccgcccctcccccgcccggccccggcccccctccctcccggcagagctcgcctccctccgcctcagactgttttggtagcaacggcaacggcggcggcgcgtttcggcccggctcccggcggctccttggtctcggcgggcctccccgccccttcgtcgtcgtccttctccccctcgccagcccgggcgcccctccggccgcgccaacccgcgcctccccgctcggcgcccgtgcgtccccgccgcgttccggcgtctccttggcgcgcccggctcccggctgtccccgcccggcgtgcgagccggtgtatgggcccctcaccatgtcgctgaagccccagcagcagcagcagcagcagcagcaacagcagcagcagcaacagcagcagcagcagcagcagcagccgccgcccgcggctgccaatgtccgcaagcccggcggcagcggccttctagcgtcgcccgccgccgcgccttcgccgtcctcgtcctcggtctcctcgtcctcggccacggctccctcctcggtggtcgcggcgacctccggcggcgggaggcccggcctgggcagaggtcgaaacagtaacaaaggactgcctcagtctacgatttcttttgatggaatctatgcaaatatgaggatggttcatatacttacatcagttgttggctccaaatgtgaagtacaagtgaaaaatggaggtatatatgaaggagtttttaaaacttacagtccgaagtgtgatttggtacttgatgccgcacatgagaaaagtacagaatccagttcggggccgaaacgtgaagaaataatggagagtattttgttcaaatgttcagactttgttgtggtacagtttaaagatatggactccagttatgcaaaaagagatgcttttactgactctgctatcagtgctaaagtgaatggcgaacacaaagagaaggacctggagccctgggatgcaggtgaactcacagccaatgaggaacttgaggctttggaaaatgacgtatctaatggatgggatcccaatgatatgtttcgatataatgaagaaaattatggtgtagtgtctacgtatgatagcagtttatcttcgtatacagtgcccttagaaagagataactcagaagaatttttaaaacgggaagcaagggcaaaccagttagcagaagaaattgagtcaagtgcccagtacaaagctcgagtggccctggaaaatgatgataggagtgaggaagaaaaatacacagcagttcagagaaattccagtgaacgtgaggggcacagcataaacactagggaaaataaatatattcctcctggacaaagaaatagagaagtcatatcctggggaagtgggagacagaattcaccgcgtatgggccagcctggatcgggctccatgccatcaagatccacttctcacacttcagatttcaacccgaattctggttcagaccaaagagtagttaatggaggtgttccctggccatcgccttgcccatctccttcctctcgcccaccttctcgctaccagtcaggtcccaactctcttccacctcgggcagccacccctacacggccgccctccaggcccccctcgcggccatccagacccccgtctcacccctctgctcatggttctccagctcctgtctctactatgcctaaacgcatgtcttcagaagggcctccaaggatgtccccaaaggcccagcgacatcctcgaaatcacagagtttctgctgggaggggttccatatccagtggcctagaatttgtatcccacaacccacccagtgaagcagctactcctccagtagcaaggaccagtccctcggggggaacgtggtcatcagtggtcagtggggttccaagattatcccctaaaactcatagacccaggtctcccagacagaacagtattggaaatacccccagtgggccagttcttgcttctccccaagctggtattattccaactgaagctgttgccatgcctattccagctgcatctcctacgcctgctagtcctgcatcgaacagagctgttaccccttctagtgaggctaaagattccaggcttcaagatcagaggcagaactctcctgcagggaataaagaaaatattaaacccaatgaaacatcacctagcttctcaaaagctgaaaacaaaggtatatcaccagttgtttctgaacatagaaaacagattgatgatttaaagaaatttaagaatgattttaggttacagccaagttctacttctgaatctatggatcaactactaaacaaaaatagagagggagaaaaatcaagagatttgatcaaagacaaaattgaaccaagtgctaaggattctttcattgaaaatagcagcagcaactgtaccagtggcagcagcaagccgaatagccccagcatttccccttcaatacttagtaacacggagcacaagaggggacctgaggtcacttcccaaggggttcagacttccagcccagcatgtaaacaagagaaagacgataaggaagagaagaaagacgcagctgagcaagttaggaaatcaacattgaatcccaatgcaaaggagttcaacccacgttccttctctcagccaaagccttctactaccccaacttcacctcggcctcaagcacaacctagcccatctatggtgggtcatcaacagccaactccagtttatactcagcctgtttgttttgcaccaaatatgatgtatccagtcccagtgagcccaggcgtgcaacctttatacccaatacctatgacgcccatgccagtgaatcaagccaagacatatagagcagagttaaatacctagaattggaattgctgaggtatgtttccacgggctcccttgctcagcagtatgcgcaccctaacgctaccctgcacccacatactccacaccctcagccttcagctacccccactggacagcagcaaagccaacatggtggaagtcatcctgcacccagtcctgttcagcaccatcagcaccaggccgcccaggctctccatctggccagtccacagcagcagtcagccatttaccacgcggggcttgcgccaactccaccctccatgacacctgcctccaacacgcagtcgccacagaatagtttcccagcagcacaacagactgtctttacgatccatccttctcacgttcagccggcgtataccaacccaccccacatggcccacgtacctcagtacaagcccaccaccaacagcagttgtaaggctgccctggaggaaccgaaaggccaaattccctcctcccttctactgcttctaccaactggaagcacagaaaactagaatttcatttattttgtttttaaaatatatatgttgatttcttgtaacatccaataggaatgctaacagttcacttgcagtggaagatacttggaccgagtagaggcatttaggaacttgggggctattccataattccatatgctgtttcagagtcccgcaggtaccccagctctgcttgccgaaactggaagttatttattttttaataacccttgaaagtcatgaacacatcagctagcaaaagaagtaacaagagtgattcttgctgctattactgctaaaaaaaaaaaaaaaaaaaaatcaagacttggaacgcccttttactaaacttgacaaagtttcagtaaattcttaccgtcaaactgacggattattatttataaatcaagtttgatgaggtgatcactgtctacagtggttcaacttttaagttaagggaaaaacttttactttgtagataatataaaataaaaacttaaaaaaaatttaaaaaataaaaaaagttttaaaaactgaaaaagttagt

SEQ ID NO: 360015 - DNA, 2168 bp, Homo sapiens
tagatgtctctgctactttcataacagaactctctgaggcgggtctaagtgagacctgccacaatgaattccatttcctgttaaatagtgcgccagtgaggctctggcaaggtgtgggctagagatgcgactcagttggatctatctctcagaaggctaccttgtaagtagagttccacagctctgggaagtttgggcgtcctcaccctgcaaagtttaggttctgtggtgtagcgcactgcagttgatttgctttttgatagtggggagggaagccggtttggtccgtgtgggccagcgtggtttggtggagtcagcttcataagagctggggtcctgtaggtgtctaccagaggctggtggctaagtaggcatgtgaacttacatgtaagtcagggatccctaaaacctcactctgtttttgtgctgaaagggcaaaaaggttaacacagggaagctcaaatttgccatgtgcccgtttgaatatgtgagagtaaaaacggcatttcatccaaggcttatcgtagtctagaacagtgcacagtgtgggaaaaaggaaacaagggctcttcctggccctgccaaccccctgcagagctggaatccagctgtttgggctgactaaaatcacctttccaacttgacagtgagtgagaccaggttgaacttggtacagagacgctgggctggcccagatgacttcaggttactcctttccatctcactggagccattaaaaactccaactcctcctcctcctcctgctccatcagcatatctctgagagagtcacgggggcctaagagtctcttttcactgcctggtgagcagaccagaagcagagggagagaggcaaatgaacagaggtccaagtaattcacatacttgactgtgacagtctctgcttattaatgtaatctgttttcctatttgaaagggatgttatctgcaaaactacctcaggccccacatggcagcctgattctgaagcatcattgaatcttgtatgatattaagttgagaaagctgcccttggatccagtgtctaatctttgtgaagatcttaccccatacatagaatacaatgatcagaaatgtcaagggttaggacagcacagccctgacttctacccaggctcacttgttgcctgctccctgacccttgcaggatctgcccaaaggtgaagcgcgtcttcaggtcaatagataatctactagagattgtccccagagaacagaactgggccctgaggcccaccgttgccctttcctgagagtcccagcccagtgaaaggaacacagttgacatgttgttgaagccggagatgttgcctgtatgcgtaaaagagctctctgtttcaggctcatgtacagtcaggaatggttccttctcatccaactgcccatgcgccaatgatgctaatgacgacacagccacccggcggtccccaggccgccctcgctcaaagtgcactacagcccattccagtctcgacaacagcgcatttcccctatatgacgcacccttcagtacaagcccaccaccaacagcagttgtaaggctgccctggaggaaccgaaaggccaaattccctcctcccttctactgcttctaccaactggaagcacagaaaactagaatttcatttattttgtttttaaaatatatatgttgatttcttgtaacatccaataggaatgctaacagttcacttgcagtggaagatacttggaccgagtagaggcatttaggaacttgggggctattccataattccatatgctgtttcagagtcccgcaggtaccccagctctgcttgccgaaactggaagttatttattttttaataacccttgaaagtcatgaacacatcagctagcaaaagaagtaacaagagtgattcttgctgctattactgctaaaaaaaaaaaaaaaaaaaaatcaagacttggaacgcccttttactaaacttgacaaagtttcagtaaattcttaccgtcaaactgacggattattatttataaatcaagtttgatgaggtgatcactgtctacagtggttcaacttttaagttaagggaaaaacttttactttgtagataatataaaataaaaacttaaaaaaaatttaaaaaataaaaaaagttttaaaaactgaaaaagttagt

SEQ ID NO: 360016 - DNA, 2083 bp, Homo sapiens
tagatgtctctgctactttcataacagaactctctgaggcgggtctaagtgagacctgccacaatgaattccatttcctgttaaatagtgcgccagtgaggctctggcaaggtgtgggctagagatgcgactcagttggatctatctctcagaaggctaccttgtaagtagagttccacagctctgggaaccggtttggtccgtgtgggccagcgtggtttggtggagtcagcttcataagagctggggtcctgtaggtgtctaccagaggctggtggctaagtaggcatgtgaacttacatgtaagtcagggatccctaaaacctcactctgtttttgtgctgaaagggcaaaaaggttaacacagggaagctcaaatttgccatgtgcccgtttgaatatgtgagagtaaaaacggcatttcatccaaggcttatcgtagtctagaacagtgcacagtgtgggaaaaaggaaacaagggctcttcctggccctgccaaccccctgcagagctggaatccagctgtttgggctgactaaaatcacctttccaacttgacagtgagtgagaccaggttgaacttggtacagagacgctgggctggcccagatgacttcaggttactcctttccatctcactggagccattaaaaactccaactcctcctcctcctcctgctccatcagcatatctctgagagagtcacgggggcctaagagtctcttttcactgcctggtgagcagaccagaagcagagggagagaggcaaatgaacagaggtccaagtaattcacatacttgactgtgacagtctctgcttattaatgtaatctgttttcctatttgaaagggatgttatctgcaaaactacctcaggccccacatggcagcctgattctgaagcatcattgaatcttgtatgatattaagttgagaaagctgcccttggatccagtgtctaatctttgtgaagatcttaccccatacatagaatacaatgatcagaaatgtcaagggttaggacagcacagccctgacttctacccaggctcacttgttgcctgctccctgacccttgcaggatctgcccaaaggtgaagcgcgtcttcaggtcaatagataatctactagagattgtccccagagaacagaactgggccctgaggcccaccgttgccctttcctgagagtcccagcccagtgaaaggaacacagttgacatgttgttgaagccggagatgttgcctgtatgcgtaaaagagctctctgtttcaggctcatgtacagtcaggaatggttccttctcatccaactgcccatgcgccaatgatgctaatgacgacacagccacccggcggtccccaggccgccctcgctcaaagtgcactacagcccattccagtctcgacaacagcgcatttcccctatatgacgcacccttcagtacaagcccaccaccaacagcagttgtaaggctgccctggaggaaccgaaaggccaaattccctcctcccttctactgcttctaccaactggaagcacagaaaactagaatttcatttattttgtttttaaaatatatatgttgatttcttgtaacatccaataggaatgctaacagttcacttgcagtggaagatacttggaccgagtagaggcatttaggaacttgggggctattccataattccatatgctgtttcagagtcccgcaggtaccccagctctgcttgccgaaactggaagttatttattttttaataacccttgaaagtcatgaacacatcagctagcaaaagaagtaacaagagtgattcttgctgctattactgctaaaaaaaaaaaaaaaaaaaaatcaagacttggaacgcccttttactaaacttgacaaagtttcagtaaattcttaccgtcaaactgacggattattatttataaatcaagtttgatgaggtgatcactgtctacagtggttcaacttttaagttaagggaaaaacttttactttgtagataatataaaataaaaacttaaaaaaaatttaaaaaataaaaaaagttttaaaaactgaaaaagttagt

SEQ ID NO: 360017 - DNA, 3764 bp, Homo sapiens
acccccgagaaagcaacccagcgcgccgcccgctcctcacgtgtccctcccggccccggggccacctcacgttctgcttccgtctgacccctccgacttccggtaaagagtccctatccgcacctccgctcccacccggcgcctcggcgcgcccgccctccgatgcgctcagcggccgcagctcctcggagtcccgcggtggccaccgagtctcgccgcttcgccgcagccaggtggcccgggtggcgctcgctccagcggccggcgcggcggagcgggcggggcggcggtggcgcggccccgggaccgtatccctccgccgcccctcccccgcccggccccggcccccctccctcccggcagagctcgcctccctccgcctcagactgttttggtagcaacggcaacggcggcggcgcgtttcggcccggctcccggcggctccttggtctcggcgggcctccccgccccttcgtcgtcgtccttctccccctcgccagcccgggcgcccctccggccgcgccaacccgcgcctccccgctcggcgcccgtgcgtccccgccgcgttccggcgtctccttggcgcgcccggctcccggctgtccccgcccggcgtgcgagccggtgtatgggcccctcaccatgtcgctgaagccccagcagcagcagcagcagcagcagcaacagcagcagcagcaacagcagcagcagcagcagcagcagccgccgcccgcggctgccaatgtccgcaagcccggcggcagcggccttctagcgtcgcccgccgccgcgccttcgccgtcctcgtcctcggtctcctcgtcctcggccacggctccctcctcggtggtcgcggcgacctccggcggcgggaggcccggcctgggcagaggtcgaaacagtaacaaaggactgcctcagtctacgatttcttttgatggaatctatgcaaatatgaggatggttcatatacttacatcagttgttggctccaaatgtgaagtacaagtgaaaaatggaggtatatatgaaggagtttttaaaacttacagtccgaagtgtgatttggtacttgatgccgcacatgagaaaagtacagaatccagttcggggccgaaacgtgaagaaataatggagagtattttgttcaaatgttcagactttgttgtggtacagtttaaagatatggactccagttatgcaaaaagagatgcttttactgactctgctatcagtgctaaagtgaatggcgaacacaaagagaaggacctggagccctgggatgcaggtgaactcacagccaatgaggaacttgaggctttggaaaatgacgtatctaatggatgggatcccaatgatatgtttcgatataatgaagaaaattatggtgtagtgtctacgtatgatagcagtttatcttcgtatacagtgcccttagaaagagataactcagaagaatttttaaaacgggaagcaagggcaaaccagttagcagaagaaattgagtcaagtgcccagtacaaagctcgagtggccctggaaaatgatgataggagtgaggaagaaaaatacacagcagttcagagaaattccagtgaacgtgaggggcacagcataaacactagggaaaataaatatattcctcctggacaaagaaatagagaagtcatatcctggggaagtgggagacagaattcaccgcgtatgggccagcctggatcgggctccatgccatcaagatccacttctcacacttcagatttcaacccgaattctggttcagaccaaagagtagttaatggaggtgttccctggccatcgccttgcccatctccttcctctcgcccaccttctcgctaccagtcaggtcccaactctcttccacctcgggcagccacccctacacggccgccctccaggcccccctcgcggccatccagacccccgtctcacccctctgctcatggttctccagctcctgtctctactatgcctaaacgcatgtcttcagaagggcctccaaggatgtccccaaaggcccagcgacatcctcgaaatcacagagtttctgctgggaggggttccatatccagtggcctagaatttgtatcccacaacccacccagtgaagcagctactcctccagtagcaaggaccagtccctcggggggaacgtggtcatcagtggtcagtggggttccaagattatcccctaaaactcatagacccaggtctcccagacagaacagtattggaaatacccccagtgggccagttcttgcttctccccaagctggtattattccaactgaagctgttgccatgcctattccagctgcatctcctacgcctgctagtcctgcatcgaacagagctgttaccccttctagtgaggctaaagattccaggcttcaagatcagaggcagaactctcctgcagggaataaagaaaatattaaacccaatgaaacatcacctagcttctcaaaagctgaaaacaaaggtatatcaccagttgtttctgaacatagaaaacagattgatgatttaaagaaatttaagaatgattttaggttacagccaagttctacttctgaatctatggatcaactactaaacaaaaatagagagggagaaaaatcaagagatttgatcaaagacaaaattgaaccaagtgctaaggattctttcattgaaaatagcagcagcaactgtaccagtggcagcagcaagccgaatagccccagcatttccccttcaatacttagtaacacggagcacaagaggggacctgaggtcacttcccaaggggttcagacttccagcccagcatgtaaacaagagaaagacgataaggaagagaagaaagacgcagctgagcaagttaggaaatcaacattgaatcccaatgcaaaggagttcaacccacgttccttctctcagccaaagccttctactaccccaacttcacctcggcctcaagcacaacctagcccatctatggtgggtcatcaacagccaactccagtttatactcagcctgtttgttttgcaccaaatatgatgtatccagtcccagtgagcccaggcgtgcaacctttatacccaatacctatgacgcccatgccagtgaatcaagccaagacatatagagcagtaccaaatatgccccaacagcggcaagaccagcatcatcagagtgccatgatgcacccagcgtcagcagcgggcccaccgattgcagccaccccaccagcttactccacgcaatatgttgcctacagtcctcagcagttcccaaatcagccccttgttcagcatgtgccacattatcagtctcagcatcctcatgtctatagtcctgtaatacagggtaatgctagaatgatggcaccaccaacacacgcccagcctggtttagtatcttcttcagcaactcagtacggggctcatgagcagacgcatgcgatgtatggtaggaagcactttgtttgtctcttccagtgtgtgtgactcttcttaatttaagtttctgaaaacatactctatctaagaataacctgaccttttatgacattgagggtcaagaatctgaaggaaaagatgaacccatttctttgcctgacttgctttataacttttggcaaatagtttctacttctgtacctggtcttcagatctctttcctgctttaactaaaatgtaatgatgtatataatggcaaagcatctttgtggagaaaggtacctttctcctcttcctca

SEQ ID NO: 360018 - DNA, 2601 bp, Homo sapiens
acccccgagaaagcaacccagcgcgccgcccgctcctcacgtgtccctcccggccccggggccacctcacgttctgcttccgtctgacccctccgacttccggtaaagagtccctatccgcacctccgctcccacccggcgcctcggcgcgcccgccctccgatgcgctcagcggccgcagctcctcggagtcccgcggtggccaccgagtctcgccgcttcgccgcagccaggtggcccgggtggcgctcgctccagcggccggcgcggcggagcgggcggggcggcggtggcgcggccccgggaccgtatccctccgccgcccctcccccgcccggccccggcccccctccctcccggcagagctcgcctccctccgcctcagactgttttggtagcaacggcaacggcggcggcgcgtttcggcccggctcccggcggctccttggtctcggcgggcctccccgccccttcgtcgtcgtccttctccccctcgccagcccgggcgcccctccggccgcgccaacccgcgcctccccgctcggcgcccgtgcgtccccgccgcgttccggcgtctccttggcgcgcccggctcccggctgtccccgcccggcgtgcgagccggtgtatgggcccctcaccatgtcgctgaagccccagcagcagcagcagcagcagcagcaacagcagcagcagcaacagcagcagcagcagcagcagcagccgccgcccgcggctgccaatgtccgcaagcccggcggcagcggccttctagcgtcgcccgccgccgcgccttcgccgtcctcgtcctcggtctcctcgtcctcggccacggctccctcctcggtggtcgcggcgacctccggcggcgggaggcccggcctgggcagaggtcgaaacagtaacaaaggactgcctcagtctacgatttcttttgatggaatctatgcaaatatgaggatggttcatatacttacatcagttgttggctccaaatgtgaagtacaagtgaaaaatggaggtatatatgaaggagtttttaaaacttacagtccgaagtgtgatttggtacttgatgccgcacatgagaaaagtacagaatccagttcggggccgaaacgtgaagaaataatggagagtattttgttcaaatgttcagactttgttgtggtacagtttaaagatatggactccagttatgcaaaaagagatgcttttactgactctgctatcagtgctaaagtgaatggcgaacacaaagagaaggacctggagccctgggatgcaggtgaactcacagccaatgaggaacttgaggctttggaaaatgacgtatctaatggatgggatcccaatgatatgtttcgatataatgaagaaaattatggtgtagtgtctacgtatgatagcagtttatcttcgtatacagtgcccttagaaagagataactcagaagaatttttaaaacgggaagcaagggcaaaccagttagcagaagaaattgagtcaagtgcccagtacaaagctcgagtggccctggaaaatgatgataggagtgaggaagaaaaatacacagcagttcagagaaattccagtgaacgtgaggggcacagcataaacactagggaaaataaatatattcctcctggacaaagaaatagagaagtcatatcctggggaagtgggagacagaattcaccgcgtatgggccagcctggatcgggctccatgccatcaagatccacttctcacacttcagatttcaacccgaattctggttcagaccaaagagtagttaatggaggtgttccctggccatcgccttgcccatctccttcctctcgcccaccttctcgctaccagtcaggtcccaactctcttccacctcgggcagccacccctacacggccgccctccaggcccccctcgcggccatccagacccccgtctcacccctctgctcatggttctccagctcctgtctctactatgcctaaacgcatgtcttcagaagggcctccaaggatgtccccaaaggcccagcgacatcctcgaaatcacagagtttctgctgggaggggttccatatccagtggcctagaatttgtatcccacaacccacccagtgaagcagctactcctccagtagcaaggaccagtccctcggggggaacgtggtcatcagtggtcagtgggggtaggtaacacttgggcataatgatggtactcattttgtcattacactagatataaagagggctgagctacaactctgtttgaggaagtgtaagtatgtatatgttaaaaatagtagaatcaccaggaattgggaaacccatatttttattctgggctctaccacttattcatcatatattaaagcaagtcagacactcattctgaagttgagatttcgcagtgagtaaagtgttaataattcttgcctagtctacattatgggattgtgatgagattcctataaggttcataaatacagatatattgtaaaactataaagttttgtaaagtacctctctaatatgaggcaaacacagtatgtaacactatttggagggaccgtatttccttatctttttagca

SEQ ID NO: 360019 - DNA, 1581 bp, Homo sapiens
acccccgagaaagcaacccagcgcgccgcccgctcctcacgtgtccctcccggccccggggccacctcacgttctgcttccgtctgacccctccgacttccggtaaagagtccctatccgcacctccgctcccacccggcgcctcggcgcgcccgccctccgatgcgctcagcggccgcagctcctcggagtcccgcggtggccaccgagtctcgccgcttcgccgcagccaggtggcccgggtggcgctcgctccagcggccggcgcggcggagcgggcggggcggcggtggcgcggccccgggaccgtatccctccgccgcccctcccccgcccggccccggcccccctccctcccggcagagctcgcctccctccgcctcagactgttttggtagcaacggcaacggcggcggcgcgtttcggcccggctcccggcggctccttggtctcggcgggcctccccgccccttcgtcgtcgtccttctccccctcgccagcccgggcgcccctccggccgcgccaacccgcgcctccccgctcggcgcccgtgcgtccccgccgcgttccggcgtctccttggcgcgcccggctcccggctgtccccgcccggcgtgcgagccggtgtatgggcccctcaccatgtcgctgaagccccagcagcagcagcagcagcagcagcaacagcagcagcagcaacagcagcagcagcagcagcagcagccgccgcccgcggctgccaatgtccgcaagcccggcggcagcggccttctagcgtcgcccgccgccgcgccttcgccgtcctcgtcctcggtctcctcgtcctcggccacggctccctcctcggtggtcgcggcgacctccggcggcgggaggcccggcctgggcaggtgggtgtcggcaccccagccccctccgctccgggcccggcgtcccctcccccgcggcccgcgccgccgtccccgccccgtgacccgccgggctacccggggtgggctgggggccggcagcgcgggggagactcgctcgggcctgagccccgaggctcggccggtgggcgcaccggggtcctctgggattgtcaggcctgtccagcctcccgcagcatccccgccccctcccccggcggtcaagatggagggagcgggcggcctcccctccccacgcgtgttgggaggggttctcgggtagcggcgatggtcagccccggctcccccttccgcacgatcctccgcccgcagcgtggggatgctcgggcagctcctccactcccggtttaggtgtgaacgttggaggggtctggaggctgtggtggcgttttccggaacatgtccccctccatgggggacatctctggaggggagaagttagggccgcgtcccccgtgccggttaaaggggtaggcaccgggctcctccggaatcatcagggtctgtcggggctctctccccgccccctccgagtcctgggaaagatcggaggacggggtggagacaagtgggccttggcccccgcacccctctgcgttcgtgtccgaggcggcggcgggggctcccgaactcccctgaaatcgtggggctc

SEQ ID NO: 360020 - DNA, 588 bp, Homo sapiens
attaagagaatcgtttcaacatgaaaactaaaataactttggagaagtttggatcacctctgcaaaaatgctatactatttactatagcattatatagagagaaataaaataactgtgccagtgtggagaaacacgcagtcgccacagaatagtttcccagcagcacaacagactgtctttacgatccatccttctcacgttcagccggcgtataccaacccaccccacatggcccacgtacctcaggtaataccagctttagccaactttctgtgaaggccaagtagaatgtgaaggttatcagtaagcagctagaggctctcccagctaggaaaccctgtgtgtcatgccatttgcctgtctccctttccctctcaaatacacgtgatctggcctaaaagaaaaaaaaaaaacaaaaaaaaaaaaggggggggggcaaaaaaccccggggggcaaagtacccgcccgtttctggaaagggccccaggacgaaaaaaagcagggcgacaggggggaagccgggctgaggacccccggggggaggaccccaaatagcgggaaaatggttggaacttcggggaagggta

SEQ ID NO: 360021 - DNA, 548 bp, Homo sapiens
ccttggaatcgttgaatatgagggaaagcgttggcttctcccttctttctcccaaacattggaagtatttttggctgttaaaaagcaccccttgttccatgtggaatcccttgtttaaaagaagtaaaatatgtacctcctgtcctccacagacctgaggaccagtgtgatctcaagaaggttacaggtaaatgtagatgtctctaactgaaaggtggcttttacaggttagagaaaagagagaaccctgatctgaaggctattttatgaagtaattaaaatgttctaaactttaaaaataactgctcaaataattgtgttgtatagttacttatcaactggaggggctgataagtatttttctaaaacatttttaaggaaattttttcctattttctaatttgctaattttgctcaagtagtttgttagatattgttaatatagatgttggttataactgaatgaaagggaacaactactttgacattttgaaaaacaagcttcattttcttctagtctaatggatgggatcccaatgatatgtttc

SEQ ID NO: 360022 - DNA, 532 bp, Homo sapiens
tggcgagtgcctttaatcccagctactccagaggctgaggcaggagaatcacttgatacatttagttaggagagaaaatcatacttatgttagtaattgctgctgttcttcatatacttgtggttttgattgccagcaaattcctaacattttggaaaagaaaacagtaatgggataaagggtaagggctagagaggacagttttatttacctagatcttcagagaagcctgaagcctcttttaggaagtaacatttgaactgagaatgtaataaatacattttccctttcttctagttccaagattatcccctaaaactcatagacccaggtctcccagacagaacagtattggaaatacccccagtgggccagttcttgcttctccccaagctggtattattccaactgaagctgttgccatgcctattccagctgcatctcctacgcctgctagtcctgcatcgaacagagctgttaccccttctagtgagggtatgtaacaaagggcttctggatccataatctcagc

SEQ ID NO: 360023 - DNA, 4648 bp, Homo sapiens
acccccgagaaagcaacccagcgcgccgcccgctcctcacgtgtccctcccggccccggggccacctcacgttctgcttccgtctgacccctccgacttccggtaaagagtccctatccgcacctccgctcccacccggcgcctcggcgcgcccgccctccgatgcgctcagcggccgcagctcctcggagtcccgcggtggccaccgagtctcgccgcttcgccgcagccaggtggcccgggtggcgctcgctccagcggccggcgcggcggagcgggcggggcggcggtggcgcggccccgggaccgtatccctccgccgcccctcccccgcccggccccggcccccctccctcccggcagagctcgcctccctccgcctcagactgttttggtagcaacggcaacggcggcggcgcgtttcggcccggctcccggcggctccttggtctcggcgggcctccccgccccttcgtcgtcgtccttctccccctcgccagcccgggcgcccctccggccgcgccaacccgcgcctccccgctcggcgcccgtgcgtccccgccgcgttccggcgtctccttggcgcgcccggctcccggctgtccccgcccggcgtgcgagccggtgtatgggcccctcaccatgtcgctgaagccccagcagcagcagcagcagcagcagcaacagcagcagcagcaacagcagcagcagcagcagcagcagccgccgcccgcggctgccaatgtccgcaagcccggcggcagcggccttctagcgtcgcccgccgccgcgccttcgccgtcctcgtcctcggtctcctcgtcctcggccacggctccctcctcggtggtcgcggcgacctccggcggcgggaggcccggcctgggcagaggtcgaaacagtaacaaaggactgcctcagtctacgatttcttttgatggaatctatgcaaatatgaggatggttcatatacttacatcagttgttggctccaaatgtgaagtacaagtgaaaaatggaggtatatatgaaggagtttttaaaacttacagtccgaagtgtgatttggtacttgatgccgcacatgagaaaagtacagaatccagttcggggccgaaacgtgaagaaataatggagagtattttgttcaaatgttcagactttgttgtggtacagtttaaagatatggactccagttatgcaaaaagagatgcttttactgactctgctatcagtgctaaagtgaatggcgaacacaaagagaaggacctggagccctgggatgcaggtgaactcacagccaatgaggaacttgaggctttggaaaatgacgtatctaatggatgggatcccaatgatatgtttcgatataatgaagaaaattatggtgtagtgtctacgtatgatagcagtttatcttcgtatacagtgcccttagaaagagataactcagaagaatttttaaaacgggaagcaagggcaaaccagttagcagaagaaattgagtcaagtgcccagtacaaagctcgagtggccctggaaaatgatgataggagtgaggaagaaaaatacacagcagttcagagaaattccagtgaacgtgaggggcacagcataaacactagggaaaataaatatattcctcctggacaaagaaatagagaagtcatatcctggggaagtgggagacagaattcaccgcgtatgggccagcctggatcgggctccatgccatcaagatccacttctcacacttcagatttcaacccgaattctggttcagaccaaagagtagttaatggaggtgttccctggccatcgccttgcccatctccttcctctcgcccaccttctcgctaccagtcaggtcccaactctcttccacctcgggcagccacccctacacggccgccctccaggcccccctcgcggccatccagacccccgtctcacccctctgctcatggttctccagctcctgtctctactatgcctaaacgcatgtcttcagaagggcctccaaggatgtccccaaaggcccagcgacatcctcgaaatcacagagtttctgctgggaggggttccatatccagtggcctagaatttgtatcccacaacccacccagtgaagcagctactcctccagtagcaaggaccagtccctcggggggaacgtggtcatcagtggtcagtggggttccaagattatcccctaaaactcatagacccaggtctcccagacagaacagtattggaaatacccccagtgggccagttcttgcttctccccaagctggtattattccaactgaagctgttgccatgcctattccagctgcatctcctacgcctgctagtcctgcatcgaacagagctgttaccccttctagtgaggctaaagattccaggcttcaagatcagaggcagaactctcctgcagggaataaagaaaatattaaacccaatgaaacatcacctagcttctcaaaagctgaaaacaaaggtatatcaccagttgtttctgaacatagaaaacagattgatgatttaaagaaatttaagaatgattttaggttacagccaagttctacttctgaatctatggatcaactactaaacaaaaatagagagggagaaaaatcaagagatttgatcaaagacaaaattgaaccaagtgctaaggattctttcattgaaaatagcagcagcaactgtaccagtggcagcagcaagccgaatagccccagcatttccccttcaatacttagtaacacggagcacaagaggggacctgaggtcacttcccaaggggttcagacttccagcccagcatgtaaacaagagaaagacgataaggaagagaagaaagacgcagctgagcaagttaggaaatcaacattgaatcccaatgcaaaggagttcaacccacgttccttctctcagccaaagccttctactaccccaacttcacctcggcctcaagcacaacctagcccatctatggtgggtcatcaacagccaactccagtttatactcagcctgtttgttttgcaccaaatatgatgtatccagtcccagtgagcccaggcgtgcaataccaaatatgccccaacagcggcaagaccagcatcatcagagtgccatgatgcacccagcgtcagcagcgggcccaccgattgcagccaccccaccagcttactccacgcaatatgttgcctacagtcctcagcagttcccaaatcagccccttgttcagcatgtgccacattatcagtctcagcatcctcatgtctatagtcctgtaatacagggtaatgctagaatgatggcaccaccaacacacgcccagcctggtttagtatcttcttcagcaactcagtacggggctcatgagcagacgcatgcgatgtatgcatgtcccaaattaccatacaacaaggagacaagcccttctttctactttgccatttccacgggctcccttgctcagcagtatgcgcaccctaacgctaccctgcacccacatactccacaccctcagccttcagctacccccactggacagcagcaaagccaacatggtggaagtcatcctgcacccagtcctgttcagcaccatcagcaccaggccgcccaggctctccatctggccagtccacagcagcagtcagccatttaccacgcggggcttgcgccaactccaccctccatgacacctgcctccaacacgcagtcgccacagaatagtttcccagcagcacaacagactgtctttacgatccatccttctcacgttcagccggcgtataccaacccaccccacatggcccacgtacctcaggctcatgtacagtcaggaatggttccttctcatccaactgcccatgcgccaatgatgctaatgacgacacagccacccggcggtccccaggccgccctcgctcaaagtgcactacagcccattccagtctcgacaacagcgcatttcccctatatgacgcacccttcagtacaagcccaccaccaacagcagttgtaaggctgccctggaggaaccgaaaggccaaattccctcctcccttctactgcttctaccaactggaagcacagaaaactagaatttcatttattttgtttttaaaatatatatgttgatttcttgtaacatccaataggaatgctaacagttcacttgcagtggaagatacttggaccgagtagaggcatttaggaacttgggggctattccataattccatatgctgtttcagagtcccgcaggtaccccagctctgcttgccgaaactggaagttatttattttttaataacccttgaaagtcatgaacacatcagctagcaaaagaagtaacaagagtgattcttgctgctattactgctaaaaaaaaaaaaaaaaaaaaatcaagacttggaacgcccttttactaaacttgacaaagtttcagtaaattcttaccgtcaaactgacggattattatttataaatcaagtttgatgaggtgatcactgtctacagtggttcaacttttaagttaagggaaaaacttttactttgtagataatataaaataaaaacttaaaaaaaatttaaaaaataaaaaaagttttaaaaactgaaaaagttagt

SEQ ID NO: 360024 - DNA, 912 bp, Homo sapiens
gccacgttccttctctcagccccaaagccttctactaccccaacttcacctcggcctcaagcacaacctagcccatctatggtgggtcatcaacagccaactccagtttatactcagcctgtttgttttgcaccaaatatgatgtatccagtcccagtgagcccaggcgtgcaacctttatacccaatacctatgacgcccatgccagtgaatcaagccaagacatatagagcagtaccaaatatgccccaacagcggcaagaccagcatcatcagagtgccatgatgcacccagcgtcagcagcgggcccaccgattgcagccaccccaccagcttactccacgcaatatgttgcctacagtcctcagcagttcccaaatcagccccttgttcagcatgtgccacattatcagtctcagcatcctcatgtctatagtcctgtaatacagggtaatgctagaatgatggcaccaccaacacacgcccagcctggtttagtatcttcttcagcaactcagtacggggctcatgagcagacgcatgcgatgtatgtagagacagggtttcgccgtgttggccaagctggtctcgaactcctaacctcaggtgatccgcccgcctcggcctcccaaaatgctgggattacaagcgtgagccaccgtgcccggctccatttctcccaatttcaaattcaaggaggaaaagaattcctgattaaggtacttctttcagatcttttgagctagaacaaaaaaacaaagggaaatatttctaattaactctttttaaattttgtttacaacgtatgatacatattttacacatcctttgtggtttttgttcgtcttgtttttaatcaatgccttgcaagtttaccggtatttaggtagggaaaggattttgtttttgtt

SEQ ID NO: 360025 - DNA, 4655 bp, Homo sapiens
acccccgagaaagcaacccagcgcgccgcccgctcctcacgtgtccctcccggccccggggccacctcacgttctgcttccgtctgacccctccgacttccggtaaagagtccctatccgcacctccgctcccacccggcgcctcggcgcgcccgccctccgatgcgctcagcggccgcagctcctcggagtcccgcggtggccaccgagtctcgccgcttcgccgcagccaggtggcccgggtggcgctcgctccagcggccggcgcggcggagcgggcggggcggcggtggcgcggccccgggaccgtatccctccgccgcccctcccccgcccggccccggcccccctccctcccggcagagctcgcctccctccgcctcagactgttttggtagcaacggcaacggcggcggcgcgtttcggcccggctcccggcggctccttggtctcggcgggcctccccgccccttcgtcgtcgtccttctccccctcgccagcccgggcgcccctccggccgcgccaacccgcgcctccccgctcggcgcccgtgcgtccccgccgcgttccggcgtctccttggcgcgcccggctcccggctgtccccgcccggcgtgcgagccggtgtatgggcccctcaccatgtcgctgaagccccagcagcagcagcagcagcagcagcaacagcagcagcagcaacagcagcagcagcagcagcagcagccgccgcccgcggctgccaatgtccgcaagcccggcggcagcggccttctagcgtcgcccgccgccgcgccttcgccgtcctcgtcctcggtctcctcgtcctcggccacggctccctcctcggtggtcgcggcgacctccggcggcgggaggcccggcctgggcagaggtcgaaacagtaacaaaggactgcctcagtctacgatttcttttgatggaatctatgcaaatatgaggatggttcatatacttacatcagttgttggctccaaatgtgaagtacaagtgaaaaatggaggtatatatgaaggagtttttaaaacttacagtccgaagtgtgatttggtacttgatgccgcacatgagaaaagtacagaatccagttcggggccgaaacgtgaagaaataatggagagtattttgttcaaatgttcagactttgttgtggtacagtttaaagatatggactccagttatgcaaaaagagatgcttttactgactctgctatcagtgctaaagtgaatggcgaacacaaagagaaggacctggagccctgggatgcaggtgaactcacagccaatgaggaacttgaggctttggaaaatgacgtatctaatggatgggatcccaatgatatgtttcgatataatgaagaaaattatggtgtagtgtctacgtatgatagcagtttatcttcgtatacagtgcccttagaaagagataactcagaagaatttttaaaacgggaagcaagggcaaaccagttagcagaagaaattgagtcaagtgcccagtacaaagctcgagtggccctggaaaatgatgataggagtgaggaagaaaaatacacagcagttcagagaaattccagtgaacgtgaggggcacagcataaacactagggaaaataaatatattcctcctggacaaagaaatagagaagtcatatcctggggaagtgggagacagaattcaccgcgtatgggccagcctggatcgggctccatgccatcaagatccacttctcacacttcagatttcaacccgaattctggttcagaccaaagagtagttaatggaggtgttccctggccatcgccttgcccatctccttcctctcgcccaccttctcgctaccagtcaggtcccaactctcttccacctcgggcagccacccctacacggccgccctccaggcccccctcgcggccatccagacccccgtctcacccctctgctcatggttctccagctcctgtctctactatgcctaaacgcatgtcttcagaagggcctccaaggatgtccccaaaggcccagcgacatcctcgaaatcacagagtttctgctgggaggggttccatatccagtggcctagaatttgtatcccacaacccacccagtgaagcagctactcctccagtagcaaggaccagtccctcggggggaacgtggtcatcagtggtcagtggggttccaagattatcccctaaaactcatagacccaggtctcccagacagaacagtattggaaatacccccagtgggccagttcttgcttctccccaagctggtattattccaactgaagctgttgccatgcctattccagctgcatctcctacgcctgctagtcctgcatcgaacagagctgttaccccttctagtgaggctaaagattccaggcttcaagatcagaggcagaactctcctgcagggaataaagaaaatattaaacccaatgaaacatcacctagcttctcaaaagctgaaaacaaaggtatatcaccagttgtttctgaacatagaaaacagattgatgatttaaagaaatttaagaatgattttaggttacagccaagttctacttctgaatctatggatcaactactaaacaaaaatagagagggagaaaaatcaagagatttgatcaaagacaaaattgaaccaagtgctaaggattctttcattgaaaatagcagcagcaactgtaccagtggcagcagcaagccgaatagccccagcatttccccttcaatacttagtaacacggagcacaagaggggacctgaggtcacttcccaaggggttcagacttccagcccagcatgtaaacaagagaaagacgataaggaagagaagaaagacgcagctgagcaagttaggaaatcaacattgaatcccaatgcaaaggagttcaacccacgttccttctctcagccaaagccttctactaccccaacttcacctcggcctcaagcacaacctagcccatctatggtgggtcatcaacagccaactccagtttatactcagcctgtttgttttgcaccaaatatgatgtatccagtcccagtgagcccaggcgtgcaacctttatacccaatacctatgacgcccatgccagtgaatcaagccaagacatatagagcagtaccaaatatgccccaacagcggcaagaccagcatcatcagagtgccatgatgcacccagcgtcagcagcgggcccaccgattgcagccaccccaccagcttactccacgcaatatgttgcctacagtcctcagcagttcccaaatcagccccttgttcagcatgtgccacattatcagtctcagcatcctcatgtctatagtcctgtaatacagggtaatgctagaatgatggcaccaccaacacacgcccagcctggtttagtatcttcttcagcaactcagtacggggctcatgagcagacgcatgcgatgtatgtttccacgggctcccttgctcagcagtatgcgcaccctaacgctaccctgcacccacatactccacaccctcagccttcagctacccccactggacagcagcaaagccaacatggtggaagtcatcctgcacccagtcctgttcagcaccatcagcaccaggccgcccaggctctccatctggccagtccacagcagcagtcagccatttaccacgcggggcttgcgccaactccaccctccatgacacctgcctccaacacgcagtcgccacagaatagtttcccagcagcacaacagactgtctttacgatccatccttctcacgttcagccggcgtataccaacccaccccacatggcccacgtacctcaggctcatgtacagtcaggaatggttccttctcatccaactgcccatgcgccaatgatgctaatgacgacacagccacccggcggtccccaggccgccctcgctcaaagtgcactacagcccattccagtctcgacaacagcgcatttcccctatatgacgcacccttcagtacaagcccaccaccaacagcagttgtaaggctgccctggaggaaccgaaaggccaaattccctcctcccttctactgcttctaccaactggaagcacagaaaactagaatttcatttattttgtttttaaaatatatatgttgatttcttgtaacatccaataggaatgctaacagttcacttgcagtggaagatacttggaccgagtagaggcatttaggaacttgggggctattccataattccatatgctgtttcagagtcccgcaggtaccccagctctgcttgccgaaactggaagttatttattttttaataacccttgaaagtcatgaacacatcagctagcaaaagaagtaacaagagtgattcttgctgctattactgctaaaaaaaaaaaaaaaaaaaaatcaagacttggaacgcccttttactaaacttgacaaagtttcagtaaattcttaccgtcaaactgacggattattatttataaatcaagtttgatgaggtgatcactgtctacagtggttcaacttttaagttaagggaaaaacttttactttgtagataatataaaataaaaacttaaaaaaaatttaaaaaataaaaaaagttttaaaaactgaaaaagttagt

SEQ ID NO: 360026 - DNA, 4445 bp, Homo sapiens
acccccgagaaagcaacccagcgcgccgcccgctcctcacgtgtccctcccggccccggggccacctcacgttctgcttccgtctgacccctccgacttccggtaaagagtccctatccgcacctccgctcccacccggcgcctcggcgcgcccgccctccgatgcgctcagcggccgcagctcctcggagtcccgcggtggccaccgagtctcgccgcttcgccgcagccaggtggcccgggtggcgctcgctccagcggccggcgcggcggagcgggcggggcggcggtggcgcggccccgggaccgtatccctccgccgcccctcccccgcccggccccggcccccctccctcccggcagagctcgcctccctccgcctcagactgttttggtagcaacggcaacggcggcggcgcgtttcggcccggctcccggcggctccttggtctcggcgggcctccccgccccttcgtcgtcgtccttctccccctcgccagcccgggcgcccctccggccgcgccaacccgcgcctccccgctcggcgcccgtgcgtccccgccgcgttccggcgtctccttggcgcgcccggctcccggctgtccccgcccggcgtgcgagccggtgtatgggcccctcaccatgtcgctgaagccccagcagcagcagcagcagcagcagcaacagcagcagcagcaacagcagcagcagcagcagcagcagccgccgcccgcggctgccaatgtccgcaagcccggcggcagcggccttctagcgtcgcccgccgccgcgccttcgccgtcctcgtcctcggtctcctcgtcctcggccacggctccctcctcggtggtcgcggcgacctccggcggcgggaggcccggcctgggcagaggtcgaaacagtaacaaaggactgcctcagtctacgatttcttttgatggaatctatgcaaatatgaggatggttcatatacttacatcagttgttggctccaaatgtgaagtacaagtgaaaaatggaggtatatatgaaggagtttttaaaacttacagtccgaagtgtgatttggtacttgatgccgcacatgagaaaagtacagaatccagttcggggccgaaacgtgaagaaataatggagagtattttgttcaaatgttcagactttgttgtggtacagtttaaagatatggactccagttatgcaaaaagagatgcttttactgactctgctatcagtgctaaagtgaatggcgaacacaaagagaaggacctggagccctgggatgcaggtgaactcacagccaatgaggaacttgaggctttggaaaatgacgtatctaatggatgggatcccaatgatatgtttcgatataatgaagaaaattatggtgtagtgtctacgtatgatagcagtttatcttcgtatacagtgcccttagaaagagataactcagaagaatttttaaaacgggaagcaagggcaaaccagttagcagaagaaattgagtcaagtgcccagtacaaagctcgagtggccctggaaaatgatgataggagtgaggaagaaaaatacacagcagttcagagaaattccagtgaacgtgaggggcacagcataaacactagggaaaataaatatattcctcctggacaaagaaatagagaagtcatatcctggggaagtgggagacagaattcaccgcgtatgggccagcctggatcgggctccatgccatcaagatccacttctcacacttcagatttcaacccgaattctggttcagaccaaagagtagttaatggagggcctccaaggatgtccccaaaggcccagcgacatcctcgaaatcacagagtttctgctgggaggggttccatatccagtggcctagaatttgtatcccacaacccacccagtgaagcagctactcctccagtagcaaggaccagtccctcggggggaacgtggtcatcagtggtcagtggggttccaagattatcccctaaaactcatagacccaggtctcccagacagaacagtattggaaatacccccagtgggccagttcttgcttctccccaagctggtattattccaactgaagctgttgccatgcctattccagctgcatctcctacgcctgctagtcctgcatcgaacagagctgttaccccttctagtgaggctaaagattccaggcttcaagatcagaggcagaactctcctgcagggaataaagaaaatattaaacccaatgaaacatcacctagcttctcaaaagctgaaaacaaaggtatatcaccagttgtttctgaacatagaaaacagattgatgatttaaagaaatttaagaatgattttaggttacagccaagttctacttctgaatctatggatcaactactaaacaaaaatagagagggagaaaaatcaagagatttgatcaaagacaaaattgaaccaagtgctaaggattctttcattgaaaatagcagcagcaactgtaccagtggcagcagcaagccgaatagccccagcatttccccttcaatacttagtaacacggagcacaagaggggacctgaggtcacttcccaaggggttcagacttccagcccagcatgtaaacaagagaaagacgataaggaagagaagaaagacgcagctgagcaagttaggaaatcaacattgaatcccaatgcaaaggagttcaacccacgttccttctctcagccaaagccttctactaccccaacttcacctcggcctcaagcacaacctagcccatctatggtgggtcatcaacagccaactccagtttatactcagcctgtttgttttgcaccaaatatgatgtatccagtcccagtgagcccaggcgtgcaacctttatacccaatacctatgacgcccatgccagtgaatcaagccaagacatatagagcagtaccaaatatgccccaacagcggcaagaccagcatcatcagagtgccatgatgcacccagcgtcagcagcgggcccaccgattgcagccaccccaccagcttactccacgcaatatgttgcctacagtcctcagcagttcccaaatcagccccttgttcagcatgtgccacattatcagtctcagcatcctcatgtctatagtcctgtaatacagggtaatgctagaatgatggcaccaccaacacacgcccagcctggtttagtatcttcttcagcaactcagtacggggctcatgagcagacgcatgcgatgtatgtttccacgggctcccttgctcagcagtatgcgcaccctaacgctaccctgcacccacatactccacaccctcagccttcagctacccccactggacagcagcaaagccaacatggtggaagtcatcctgcacccagtcctgttcagcaccatcagcaccaggccgcccaggctctccatctggccagtccacagcagcagtcagccatttaccacgcggggcttgcgccaactccaccctccatgacacctgcctccaacacgcagtcgccacagaatagtttcccagcagcacaacagactgtctttacgatccatccttctcacgttcagccggcgtataccaacccaccccacatggcccacgtacctcaggctcatgtacagtcaggaatggttccttctcatccaactgcccatgcgccaatgatgctaatgacgacacagccacccggcggtccccaggccgccctcgctcaaagtgcactacagcccattccagtctcgacaacagcgcatttcccctatatgacgcacccttcagtacaagcccaccaccaacagcagttgtaaggctgccctggaggaaccgaaaggccaaattccctcctcccttctactgcttctaccaactggaagcacagaaaactagaatttcatttattttgtttttaaaatatatatgttgatttcttgtaacatccaataggaatgctaacagttcacttgcagtggaagatacttggaccgagtagaggcatttaggaacttgggggctattccataattccatatgctgtttcagagtcccgcaggtaccccagctctgcttgccgaaactggaagttatttattttttaataacccttgaaagtcatgaacacatcagctagcaaaagaagtaacaagagtgattcttgctgctattactgctaaaaaaaaaaaaaaaaaaaaatcaagacttggaacgcccttttactaaacttgacaaagtttcagtaaattcttaccgtcaaactgacggattattatttataaatcaagtttgatgaggtgatcactgtctacagtggttcaacttttaagttaagggaaaaacttttactttgtagataatataaaataaaaacttaaaaaaaatttaaaaaataaaaaaagttttaaaaactgaaaaagttagt

SEQ ID NO: 360027 - DNA, 4700 bp, Homo sapiens
acccccgagaaagcaacccagcgcgccgcccgctcctcacgtgtccctcccggccccggggccacctcacgttctgcttccgtctgacccctccgacttccggtaaagagtccctatccgcacctccgctcccacccggcgcctcggcgcgcccgccctccgatgcgctcagcggccgcagctcctcggagtcccgcggtggccaccgagtctcgccgcttcgccgcagccaggtggcccgggtggcgctcgctccagcggccggcgcggcggagcgggcggggcggcggtggcgcggccccgggaccgtatccctccgccgcccctcccccgcccggccccggcccccctccctcccggcagagctcgcctccctccgcctcagactgttttggtagcaacggcaacggcggcggcgcgtttcggcccggctcccggcggctccttggtctcggcgggcctccccgccccttcgtcgtcgtccttctccccctcgccagcccgggcgcccctccggccgcgccaacccgcgcctccccgctcggcgcccgtgcgtccccgccgcgttccggcgtctccttggcgcgcccggctcccggctgtccccgcccggcgtgcgagccggtgtatgggcccctcaccatgtcgctgaagccccagcagcagcagcagcagcagcagcaacagcagcagcagcaacagcagcagcagcagcagcagcagccgccgcccgcggctgccaatgtccgcaagcccggcggcagcggccttctagcgtcgcccgccgccgcgccttcgccgtcctcgtcctcggtctcctcgtcctcggccacggctccctcctcggtggtcgcggcgacctccggcggcgggaggcccggcctgggcagaggtcgaaacagtaacaaaggactgcctcagtctacgatttcttttgatggaatctatgcaaatatgaggatggttcatatacttacatcagttgttggctccaaatgtgaagtacaagtgaaaaatggaggtatatatgaaggagtttttaaaacttacagtccgaagtgtgatttggtacttgatgccgcacatgagaaaagtacagaatccagttcggggccgaaacgtgaagaaataatggagagtattttgttcaaatgttcagactttgttgtggtacagtttaaagatatggactccagttatgcaaaaagagatgcttttactgactctgctatcagtgctaaagtgaatggcgaacacaaagagaaggacctggagccctgggatgcaggtgaactcacagccaatgaggaacttgaggctttggaaaatgacgtatctaatggatgggatcccaatgatatgtttcgatataatgaagaaaattatggtgtagtgtctacgtatgatagcagtttatcttcgtatacagtgcccttagaaagagataactcagaagaatttttaaaacgggaagcaagggcaaaccagttagcagaagaaattgagtcaagtgcccagtacaaagctcgagtggccctggaaaatgatgataggagtgaggaagaaaaatacacagcagttcagagaaattccagtgaacgtgaggggcacagcataaacactagggaaaataaatatattcctcctggacaaagaaatagagaagtcatatcctggggaagtgggagacagaattcaccgcgtatgggccagcctggatcgggctccatgccatcaagatccacttctcacacttcagatttcaacccgaattctggttcagaccaaagagtagttaatggaggtgttccctggccatcgccttgcccatctccttcctctcgcccaccttctcgctaccagtcaggtcccaactctcttccacctcgggcagccacccctacacggccgccctccaggcccccctcgcggccatccagacccccgtctcacccctctgctcatggttctccagctcctgtctctactatgcctaaacgcatgtcttcagaagggcctccaaggatgtccccaaaggcccagcgacatcctcgaaatcacagagtttctgctgggaggggttccatatccagtggcctagaatttgtatcccacaacccacccagtgaagcagctactcctccagtagcaaggaccagtccctcggggggaacgtggtcatcagtggtcagtggggttccaagattatcccctaaaactcatagacccaggtctcccagacagaacagtattggaaatacccccagtgggccagttcttgcttctccccaagctggtattattccaactgaagctgttgccatgcctattccagctgcatctcctacgcctgctagtcctgcatcgaacagagctgttaccccttctagtgaggctaaagattccaggcttcaagatcagaggcagaactctcctgcagggaataaagaaaatattaaacccaatgaaacatcacctagcttctcaaaagctgaaaacaaaggtatatcaccagttgtttctgaacatagaaaacagattgatgatttaaagaaatttaagaatgattttaggttacagccaagttctacttctgaatctatggatcaactactaaacaaaaatagagagggagaaaaatcaagagatttgatcaaagacaaaattgaaccaagtgctaaggattctttcattgaaaatagcagcagcaactgtaccagtggcagcagcaagccgaatagccccagcatttccccttcaatacttagtaacacggagcacaagaggggacctgaggtcacttcccaaggggttcagacttccagcccagcatgtaaacaagagaaagacgataaggaagagaagaaagacgcagctgagcaagttaggaaatcaacattgaatcccaatgcaaaggagttcaacccacgttccttctctcagccaaagccttctactaccccaacttcacctcggcctcaagcacaacctagcccatctatggtgggtcatcaacagccaactccagtttatactcagcctgtttgttttgcaccaaatatgatgtatccagtcccagtgagcccaggcgtgcaacctttatacccaatacctatgacgcccatgccagtgaatcaagccaagacatatagagcagccttggaacatatgaacctgttgaaagaactctgcctgaaataattaccaaatatgccccaacagcggcaagaccagcatcatcagagtgccatgatgcacccagcgtcagcagcgggcccaccgattgcagccaccccaccagcttactccacgcaatatgttgcctacagtcctcagcagttcccaaatcagccccttgttcagcatgtgccacattatcagtctcagcatcctcatgtctatagtcctgtaatacagggtaatgctagaatgatggcaccaccaacacacgcccagcctggtttagtatcttcttcagcaactcagtacggggctcatgagcagacgcatgcgatgtatgtttccacgggctcccttgctcagcagtatgcgcaccctaacgctaccctgcacccacatactccacaccctcagccttcagctacccccactggacagcagcaaagccaacatggtggaagtcatcctgcacccagtcctgttcagcaccatcagcaccaggccgcccaggctctccatctggccagtccacagcagcagtcagccatttaccacgcggggcttgcgccaactccaccctccatgacacctgcctccaacacgcagtcgccacagaatagtttcccagcagcacaacagactgtctttacgatccatccttctcacgttcagccggcgtataccaacccaccccacatggcccacgtacctcaggctcatgtacagtcaggaatggttccttctcatccaactgcccatgcgccaatgatgctaatgacgacacagccacccggcggtccccaggccgccctcgctcaaagtgcactacagcccattccagtctcgacaacagcgcatttcccctatatgacgcacccttcagtacaagcccaccaccaacagcagttgtaaggctgccctggaggaaccgaaaggccaaattccctcctcccttctactgcttctaccaactggaagcacagaaaactagaatttcatttattttgtttttaaaatatatatgttgatttcttgtaacatccaataggaatgctaacagttcacttgcagtggaagatacttggaccgagtagaggcatttaggaacttgggggctattccataattccatatgctgtttcagagtcccgcaggtaccccagctctgcttgccgaaactggaagttatttattttttaataacccttgaaagtcatgaacacatcagctagcaaaagaagtaacaagagtgattcttgctgctattactgctaaaaaaaaaaaaaaaaaaaaatcaagacttggaacgcccttttactaaacttgacaaagtttcagtaaattcttaccgtcaaactgacggattattatttataaatcaagtttgatgaggtgatcactgtctacagtggttcaacttttaagttaagggaaaaacttttactttgtagataatataaaataaaaacttaaaaaaaatttaaaaaataaaaaaagttttaaaaactgaaaaagttagt

SEQ ID NO: 360028 - DNA, 4372 bp, Homo sapiens
acccccgagaaagcaacccagcgcgccgcccgctcctcacgtgtccctcccggccccggggccacctcacgttctgcttccgtctgacccctccgacttccggtaaagagtccctatccgcacctccgctcccacccggcgcctcggcgcgcccgccctccgatgcgctcagcggccgcagctcctcggagtcccgcggtggccaccgagtctcgccgcttcgccgcagccaggtggcccgggtggcgctcgctccagcggccggcgcggcggagcgggcggggcggcggtggcgcggccccgggaccgtatccctccgccgcccctcccccgcccggccccggcccccctccctcccggcagagctcgcctccctccgcctcagactgttttggtagcaacggcaacggcggcggcgcgtttcggcccggctcccggcggctccttggtctcggcgggcctccccgccccttcgtcgtcgtccttctccccctcgccagcccgggcgcccctccggccgcgccaacccgcgcctccccgctcggcgcccgtgcgtccccgccgcgttccggcgtctccttggcgcgcccggctcccggctgtccccgcccggcgtgcgagccggtgtatgggcccctcaccatgtcgctgaagccccagcagcagcagcagcagcagcagcaacagcagcagcagcaacagcagcagcagcagcagcagcagccgccgcccgcggctgccaatgtccgcaagcccggcggcagcggccttctagcgtcgcccgccgccgcgccttcgccgtcctcgtcctcggtctcctcgtcctcggccacggctccctcctcggtggtcgcggcgacctccggcggcgggaggcccggcctgggcagaggtcgaaacagtaacaaaggactgcctcagtctacgatttcttttgatggaatctatgcaaatatgaggatggttcatatacttacatcagttgttggctccaaatgtgaagtacaagtgaaaaatggaggtatatatgaaggagtttttaaaacttacagtccgaagtgtgatttggtacttgatgccgcacatgagaaaagtacagaatccagttcggggccgaaacgtgaagaaataatggagagtattttgttcaaatgttcagactttgttgtggtacagtttaaagatatggactccagttatgcaaaaagagatgcttttactgactctgctatcagtgctaaagtgaatggcgaacacaaagagaaggacctggagccctgggatgcaggtgaactcacagccaatgaggaacttgaggctttggaaaatgacgtatctaatggatgggatcccaatgatatgtttcgatataatgaagaaaattatggtgtagtgtctacgtatgatagcagtttatcttcgtatacagtgcccttagaaagagataactcagaagaatttttaaaacgggaagcaagggcaaaccagttagcagaagaaattgagtcaagtgcccagtacaaagctcgagtggccctggaaaatgatgataggagtgaggaagaaaaatacacagcagttcagagaaattccagtgaacgtgaggggcacagcataaacactagggaaaataaatatattcctcctggacaaagaaatagagaagtcatatcctggggaagtgggagacagaattcaccgcgtatgggccagcctggatcgggctccatgccatcaagatccacttctcacacttcagatttcaacccgaattctggttcagaccaaagagtagttaatggaggtgttccctggccatcgccttgcccatctccttcctctcgcccaccttctcgctaccagtcaggtcccaactctcttccacctcgggcagccacccctacacggccgccctccaggcccccctcgcggccatccagacccccgtctcacccctctgctcatggttctccagctcctgtctctactatgcctaaacgcatgtcttcagaagggcctccaaggatgtccccaaaggcccagcgacatcctcgaaatcacagagtttctgctgggaggggttccatatccagtggcctagaatttgtatcccacaacccacccagtgaagcagctactcctccagtagcaaggaccagtccctcggggggaacgtggtcatcagtggtcagtggggttccaagattatcccctaaaactcatagacccaggtctcccagacagaacagtattggaaatacccccagtgggccagttcttgcttctccccaagctggtattattccaactgaagctgttgccatgcctattccagctgcatctcctacgcctgctagtcctgcatcgaacagagctgttaccccttctagtgaggctaaagattccaggcttcaagatcagaggcagaactctcctgcagggaataaagaaaatattaaacccaatgaaacatcacctagcttctcaaaagctgaaaacaaaggtatatcaccagttgtttctgaacatagaaaacagattgatgatttaaagaaatttaagaatgattttaggttacagccaagttctacttctgaatctatggatcaactactaaacaaaaatagagagggagaaaaatcaagagatttgatcaaagacaaaattgaaccaagtgctaaggattctttcattgaaaatagcagcagcaactgtaccagtggcagcagcaagccgaatagccccagcatttccccttcaatacttagtaacacggagcacaagaggggacctgaggtcacttcccaaggggttcagacttccagcccagcatgtaaacaagagaaagacgataaggaagagaagaaagacgcagctgagcaagttaggaaatcaacattgaatcccaatgcaaaggagttcaacccacgttccttctctcagccaaagccttctactaccccaacttcacctcggcctcaagcacaacctagcccatctatggtgggtcatcaacagccaactccagtttatactcagcctgtttgttttgcaccaaatatgatgtatccagtcccagtgagcccaggcgtgcaacctttatacccaatacctatgacgcccatgccagtgaatcaagccaagacatatagagcagagttaaatacctagaattggaattgctgaggtatgtttccacgggctcccttgctcagcagtatgcgcaccctaacgctaccctgcacccacatactccacaccctcagccttcagctacccccactggacagcagcaaagccaacatggtggaagtcatcctgcacccagtcctgttcagcaccatcagcaccaggccgcccaggctctccatctggccagtccacagcagcagtcagccatttaccacgcggggcttgcgccaactccaccctccatgacacctgcctccaacacgcagtcgccacagaatagtttcccagcagcacaacagactgtctttacgatccatccttctcacgttcagccggcgtataccaacccaccccacatggcccacgtacctcaggctcatgtacagtcaggaatggttccttctcatccaactgcccatgcgccaatgatgctaatgacgacacagccacccggcggtccccaggccgccctcgctcaaagtgcactacagcccattccagtctcgacaacagcgcatttcccctatatgacgcacccttcagtacaagcccaccaccaacagcagttgtaaggctgccctggaggaaccgaaaggccaaattccctcctcccttctactgcttctaccaactggaagcacagaaaactagaatttcatttattttgtttttaaaatatatatgttgatttcttgtaacatccaataggaatgctaacagttcacttgcagtggaagatacttggaccgagtagaggcatttaggaacttgggggctattccataattccatatgctgtttcagagtcccgcaggtaccccagctctgcttgccgaaactggaagttatttattttttaataacccttgaaagtcatgaacacatcagctagcaaaagaagtaacaagagtgattcttgctgctattactgctaaaaaaaaaaaaaaaaaaaaatcaagacttggaacgcccttttactaaacttgacaaagtttcagtaaattcttaccgtcaaactgacggattattatttataaatcaagtttgatgaggtgatcactgtctacagtggttcaacttttaagttaagggaaaaacttttactttgtagataatataaaataaaaacttaaaaaaaatttaaaaaataaaaaaagttttaaaaactgaaaaagttagt

SEQ ID NO: 360029 - DNA, 4540 bp, Homo sapiens
acccccgagaaagcaacccagcgcgccgcccgctcctcacgtgtccctcccggccccggggccacctcacgttctgcttccgtctgacccctccgacttccggtaaagagtccctatccgcacctccgctcccacccggcgcctcggcgcgcccgccctccgatgcgctcagcggccgcagctcctcggagtcccgcggtggccaccgagtctcgccgcttcgccgcagccaggtggcccgggtggcgctcgctccagcggccggcgcggcggagcgggcggggcggcggtggcgcggccccgggaccgtatccctccgccgcccctcccccgcccggccccggcccccctccctcccggcagagctcgcctccctccgcctcagactgttttggtagcaacggcaacggcggcggcgcgtttcggcccggctcccggcggctccttggtctcggcgggcctccccgccccttcgtcgtcgtccttctccccctcgccagcccgggcgcccctccggccgcgccaacccgcgcctccccgctcggcgcccgtgcgtccccgccgcgttccggcgtctccttggcgcgcccggctcccggctgtccccgcccggcgtgcgagccggtgtatgggcccctcaccatgtcgctgaagccccagcagcagcagcagcagcagcagcaacagcagcagcagcaacagcagcagcagcagcagcagcagccgccgcccgcggctgccaatgtccgcaagcccggcggcagcggccttctagcgtcgcccgccgccgcgccttcgccgtcctcgtcctcggtctcctcgtcctcggccacggctccctcctcggtggtcgcggcgacctccggcggcgggaggcccggcctgggcagaggtcgaaacagtaacaaaggactgcctcagtctacgatttcttttgatggaatctatgcaaatatgaggatggttcatatacttacatcagttgttggctccaaatgtgaagtacaagtgaaaaatggaggtatatatgaaggagtttttaaaacttacagtccgaagtgtgatttggtacttgatgccgcacatgagaaaagtacagaatccagttcggggccgaaacgtgaagaaataatggagagtattttgttcaaatgttcagactttgttgtggtacagtttaaagatatggactccagttatgcaaaaagagatgcttttactgactctgctatcagtgctaaagtgaatggcgaacacaaagagaaggacctggagccctgggatgcaggtgaactcacagccaatgaggaacttgaggctttggaaaatgacgtatctaatggatgggatcccaatgatatgtttcgatataatgaagaaaattatggtgtagtgtctacgtatgatagcagtttatcttcgtatacagtgcccttagaaagagataactcagaagaatttttaaaacgggaagcaagggcaaaccagttagcagaagaaattgagtcaagtgcccagtacaaagctcgagtggccctggaaaatgatgataggagtgaggaagaaaaatacacagcagttcagagaaattccagtgaacgtgaggggcacagcataaacactagggaaaataaatatattcctcctggacaaagaaatagagaagtcatatcctggggaagtgggagacagaattcaccgcgtatgggccagcctggatcgggctccatgccatcaagatccacttctcacacttcagatttcaacccgaattctggttcagaccaaagagtagttaatggaggtgttccctggccatcgccttgcccatctccttcctctcgcccaccttctcgctaccagtcaggtcccaactctcttccacctcgggcagccacccctacacggccgccctccaggcccccctcgcggccatccagacccccgtctcacccctctgctcatggttctccagctcctgtctctactatgcctaaacgcatgtcttcagaagggcctccaaggatgtccccaaaggcccagcgacatcctcgaaatcacagagtttctgctgggaggggttccatatccagtggcctagaatttgtatcccacaacccacccagtgaagcagctactcctccagtagcaaggaccagtccctcggggggaacgtggtcatcagtggtcagtggggttccaagattatcccctaaaactcatagacccaggtctcccagacagaacagtattggaaatacccccagtgggccagttcttgcttctccccaagctggtattattccaactgaagctgttgccatgcctattccagctgcatctcctacgcctgctagtcctgcatcgaacagagctgttaccccttctagtgaggctaaagattccaggcttcaagatcagaggcagaactctcctgcagggaataaagaaaatattaaacccaatgaaacatcacctagcttctcaaaagctgaaaacaaaggtatatcaccagttgtttctgaacatagaaaacagattgatgatttaaagaaatttaagaatgattttaggttacagccaagttctacttctgaatctatggatcaactactaaacaaaaatagagagggagaaaaatcaagagatttgatcaaagacaaaattgaaccaagtgctaaggattctttcattgaaaatagcagcagcaactgtaccagtggcagcagcaagccgaatagccccagcatttccccttcaatacttagtaacacggagcacaagaggggacctgaggtcacttcccaaggggttcagacttccagcccagcatgtaaacaagagaaagacgataaggaagagaagaaagacgcagctgagcaagttaggaaatcaacattgaatcccaatgcaaaggagttcaacccacgttccttctctcagccaaagccttctactaccccaacttcacctcggcctcaagcacaacctagcccatctatggtgggtcatcaacagccaactccagtttatactcagcctgtttgttttgcaccaaatatgatgtatccagtcccagtgagcccaggcgtgcaacctttatacccaatacctatgacgcccatgccagtgaatcaagccaagacatatagagcagtaccaaatatgccccaacagcggcaagaccagcatcatcagagtgccatgatgcacccagcgtcagcagcgggcccaccgattgcagccaccccaccagcttactccacgcaatatgttgcctacagtcctcagcagttcccaaatcagccccttgttcagcatgtgccacattatcagtctcagcatcctcatgtctatagtcctgtaatacagggtaatgctagaatgatggcaccaccaacacacgcccagcctggtttagtatcttcttcagcaactcagtacggggctcatgagcagacgcatgcgatgtatgcatgtcccaaattaccatacaacaaggagacaagcccttctttctactttgccatttccacgggctcccttgctcagcagtatgcgcaccctaacgctaccctgcacccacatactccacaccctcagccttcagctacccccactggacagcagcaaagccaacatggtggaagtcatcctgcacccagtcctgttcagcaccatcagcaccaggccgcccaggctctccatctggccagtccacagcagcagtcagccatttaccacgcggggcttgcgccaactccaccctccatgacacctgcctccaacacgcagtcgccacagaatagtttcccagcagcacaacagactgtctttacgatccatccttctcacgttcagccggcgtataccaacccaccccacatggcccacgtacctcagtacaagcccaccaccaacagcagttgtaaggctgccctggaggaaccgaaaggccaaattccctcctcccttctactgcttctaccaactggaagcacagaaaactagaatttcatttattttgtttttaaaatatatatgttgatttcttgtaacatccaataggaatgctaacagttcacttgcagtggaagatacttggaccgagtagaggcatttaggaacttgggggctattccataattccatatgctgtttcagagtcccgcaggtaccccagctctgcttgccgaaactggaagttatttattttttaataacccttgaaagtcatgaacacatcagctagcaaaagaagtaacaagagtgattcttgctgctattactgctaaaaaaaaaaaaaaaaaaaaatcaagacttggaacgcccttttactaaacttgacaaagtttcagtaaattcttaccgtcaaactgacggattattatttataaatcaagtttgatgaggtgatcactgtctacagtggttcaacttttaagttaagggaaaaacttttactttgtagataatataaaataaaaacttaaaaaaaatttaaaaaataaaaaaagttttaaaaactgaaaaagttagt

SEQ ID NO: 360030 - DNA, 1927 bp, Homo sapiens
cccggaagccggccggctgaggcgcacgtcacccacttgttgttcacagaatcccttttctctaggatatagttggtgatttcagaacctccatcatcctttggaggagcccactttaaggtcatggcttctgctgtgacttcatcaaatttgattggtccagtggggatgccaggcttgccaacaacctttatggagatagttccttctctcagccaaagccttctactaccccaacttcacctcggcctcaagcacaacctagcccatctatggtgggtcatcaacagccaactccagtttatactcagcctgtttgttttgcaccaaatatgatgtatccagtcccagtgagcccaggcgtgcaacctttatacccaatacctatgacgcccatgccagtgaatcaagccaagacatatagagcagtaccaaatatgccccaacagcggcaagaccagcatcatcagagtgccatgatgcacccagcgtcagcagcgggcccaccgattgcagccaccccaccagcttactccacgcaatatgttgcctacagtcctcagcagttcccaaatcagccccttgttcagcatgtgccacattatcagtctcagcatcctcatgtctatagtcctgtaatacagggtaatgctagaatgatggcaccaccaacacacgcccagcctggtttagtatcttcttcagcaactcagtacggggctcatgagcagacgcatgcgatgtatgtttccacgggctcccttgctcagcagtatgcgcaccctaacgctaccctgcacccacatactccacaccctcagccttcagctacccccactggacagcagcaaagccaacatggtggaagtcatcctgcacccagtcctgttcagcaccatcagcaccaggccgcccaggctctccatctggccagtccacagcagcagtcagccatttaccacgcggggcttgcgccaactccaccctccatgacacctgcctccaacacgcagtcgccacagaatagtttcccagcagcacaacagactgtctttacgatccatccttctcacgttcagccggcgtataccaacccaccccacatggcccacgtacctcaggctcatgtacagtcaggaatggttccttctcatccaactgcccatgcgccaatgatgctaatgacgacacagccacccggcggtccccaggccgccctcgctcaaagtgcactacagcccattccagtctcgacaacagcgcatttcccctatatgacgcacccttcagtacaagcccaccaccaacagcagttgtaaggctgccctggaggaaccgaaaggccaaattccctcctcccttctactgcttctaccaactggaagcacagaaaactagaatttcatttattttgtttttaaaatatatatgttgatttcttgtaacatccaataggaatgctaacagttcacttgcagtggaagatacttggaccgagtagaggcatttaggaacttgggggctattccataattccatatgctgtttcagagtcccgcaggtaccccagctctgcttgccgaaactggaagttatttattttttaataacccttgaaagtcatgaacacatcagctagcaaaagaagtaacaagagtgattcttgctgctattactgctaaaaaaaaaaaaaaaaaaaaatcaagacttggaacgcccttttactaaacttgacaaagtttcagtaaattcttaccgtcaaactgacggattattatttataaatcaagtttgatgaggtgatcactgtctacagtggttcaacttttaagttaagggaaaaacttttactttgtagataatataaaataaaaacttaaaaaaaatttaaaaaataaaaaaagttttaaaaactgaaaaagttagt

SEQ ID NO: 360031 - DNA, 1405 bp, Homo sapiens
tcatcgagctcggtccctagttttagaagtttcaatagcagcacaacagactgtctttacgatccatccttctcacgttcagccggcgtataccaacacacgcccagcctggtttagtatcttcttcagcaactcagtacggggctcatgagcagacgcatgcgatgtatgcatgtcccaaattaccatacaacaaggagacaagcccttctttctactttgccatttccacgggctcccttgctcagcagtatgcgcaccctaacgctaccctgcacccacatactccacaccctcagccttcagctacccccactggacagcagcaaagccaacatggtggaagtcatcctgcacccagtcctgttcagcaccatcagcaccaggccgcccaggctctccatctggccagtccacagcagcagtcagccatttaccacgcggggcttgcgccaactccaccctccatgacacctgcctccaacacgcagtcgccacagaatagtttcccagcagcacaacagactgtctttacgatccatccttctcacgttcagccggcgtataccaacccaccccacatggcccacgtacctcaggctcatgtacagtcaggaatggttccttctcatccaactgcccatgcgccaatgatgctaatgacgacacagccacccggcggtccccaggccgccctcgctcaaagtgcactacagcccattccagtctcgacaacagcgcatttcccctatatgacgcacccttcagtacaagcccaccaccaacagcagttgtaaggctgccctggaggaaccgaaaggccaaattccctcctcccttctactgcttctaccaactggaagcacagaaaactagaatttcatttattttgtttttaaaatatatatgttgatttcttgtaacatccaataggaatgctaacagttcacttgcagtggaagatacttggaccgagtagaggcatttaggaacttgggggctattccataattccatatgctgtttcagagtcccgcaggtaccccagctctgcttgccgaaactggaagttatttattttttaataacccttgaaagtcatgaacacatcagctagcaaaagaagtaacaagagtgattcttgctgctattactgctaaaaaaaaaaaaaaaaaaaaatcaagacttggaacgcccttttactaaacttgacaaagtttcagtaaattcttaccgtcaaactgacggattattatttataaatcaagtttgatgaggtgatcactgtctacagtggttcaacttttaagttaagggaaaaacttttactttgtagataatataaaataaaaacttaaaaaaaatttaaaaaataaaaaaagttttaaaaactgaaaaagttagt

SEQ ID NO: 360032 - DNA, 4244 bp, Homo sapiens
acccccgagaaagcaacccagcgcgccgcccgctcctcacgtgtccctcccggccccggggccacctcacgttctgcttccgtctgacccctccgacttccggtaaagagtccctatccgcacctccgctcccacccggcgcctcggcgcgcccgccctccgatgcgctcagcggccgcagctcctcggagtcccgcggtggccaccgagtctcgccgcttcgccgcagccaggtggcccgggtggcgctcgctccagcggccggcgcggcggagcgggcggggcggcggtggcgcggccccgggaccgtatccctccgccgcccctcccccgcccggccccggcccccctccctcccggcagagctcgcctccctccgcctcagactgttttggtagcaacggcaacggcggcggcgcgtttcggcccggctcccggcggctccttggtctcggcgggcctccccgccccttcgtcgtcgtccttctccccctcgccagcccgggcgcccctccggccgcgccaacccgcgcctccccgctcggcgcccgtgcgtccccgccgcgttccggcgtctccttggcgcgcccggctcccggctgtccccgcccggcgtgcgagccggtgtatgggcccctcaccatgtcgctgaagccccagcagcagcagcagcagcagcagcaacagcagcagcagcaacagcagcagcagcagcagcagcagccgccgcccgcggctgccaatgtccgcaagcccggcggcagcggccttctagcgtcgcccgccgccgcgccttcgccgtcctcgtcctcggtctcctcgtcctcggccacggctccctcctcggtggtcgcggcgacctccggcggcgggaggcccggcctgggcagaggtcgaaacagtaacaaaggactgcctcagtctacgatttcttttgatggaatctatgcaaatatgaggatggttcatatacttacatcagttgttggctccaaatgtgaagtacaagtgaaaaatggaggtatatatgaaggagtttttaaaacttacagtccgaagtgtgatttggtacttgatgccgcacatgagaaaagtacagaatccagttcggggccgaaacgtgaagaaataatggagagtattttgttcaaatgttcagactttgttgtggtacagtttaaagatatggactccagttatgcaaaaagagatgcttttactgactctgctatcagtgctaaagtgaatggcgaacacaaagagaaggacctggagccctgggatgcaggtgaactcacagccaatgaggaacttgaggctttggaaaatgacgtatctaatggatgggatcccaatgatatgtttcgatataatgaagaaaattatggtgtagtgtctacgtatgatagcagtttatcttcgtatacagtgcccttagaaagagataactcagaagaatttttaaaacgggaagcaagggcaaaccagttagcagaagaaattgagtcaagtgcccagtacaaagctcgagtggccctggaaaatgatgataggagtgaggaagaaaaatacacagcagttcagagaaattccagtgaacgtgaggggcacagcataaacactagggaaaataaatatattcctcctggacaaagaaatagagaagtcatatcctggggaagtgggagacagaattcaccgcgtatgggccagcctggatcgggctccatgccatcaagatccacttctcacacttcagatttcaacccgaattctggttcagaccaaagagtagttaatggaggtgttccctggccatcgccttgcccatctccttcctctcgcccaccttctcgctaccagtcaggtcccaactctcttccacctcgggcagccacccctacacggccgccctccaggcccccctcgcggccatccagacccccgtctcacccctctgctcatggttctccagctcctgtctctactatgcctaaacgcatgtcttcagaagggcctccaaggatgtccccaaaggcccagcgacatcctcgaaatcacagagtttctgctgggaggggttccatatccagtggcctagaatttgtatcccacaacccacccagtgaagcagctactcctccagtagcaaggaccagtccctcggggggaacgtggtcatcagtggtcagtggggttccaagattatcccctaaaactcatagacccaggtctcccagacagaacagtattggaaatacccccagtgggccagttcttgcttctccccaagctggtattattccaactgaagctgttgccatgcctattccagctgcatctcctacgcctgctagtcctgcatcgaacagagctgttaccccttctagtgaggctaaagattccaggcttcaagatcagaggcagaactctcctgcagggaataaagaaaatattaaacccaatgaaacatcacctagcttctcaaaagctgaaaacaaaggtatatcaccagttgtttctgaacatagaaaacagattgatgatttaaagaaatttaagaatgattttaggttacagccaagttctacttctgaatctatggatcaactactaaacaaaaatagagagggagaaaaatcaagagatttgatcaaagacaaaattgaaccaagtgctaaggattctttcattgaaaatagcagcagcaactgtaccagtggcagcagcaagccgaatagccccagcatttccccttcaatacttagtaacacggagcacaagaggggacctgaggtcacttcccaaggggttcagacttccagcccagcatgtaaacaagagaaagacgataaggaagagaagaaagacgcagctgagcaagttaggaaatcaacattgaatcccaatgcaaaggagttcaacccacgttccttctctcagccaaagccttctactaccccaacttcacctcggcctcaagcacaacctagcccatctatggtgggtcatcaacagccaactccagtttatactcagcctgtttgttttgcaccaaatatgatgtatccagtcccagtgagcccaggcgtgcaacctttatacccaatacctatgacgcccatgccagtgaatcaagccaagacatatagagcagtaccaaatatgccccaacagcggcaagaccagcatcatcagagtgccatgatgcacccagcgtcagcagcgggcccaccgattgcagccaccccaccagcttactccacgcaatatgttgcctacagtcctcagcagttcccaaatcagccccttgttcagcatgtgccacattatcagtctcagcatcctcatgtctatagtcctgtaatacagggtaatgctagaatgatggcaccaccaacacacgcccagcctggtttagtatcttcttcagcaactcagtacggggctcatgagcagacgcatgcgatgtatgcatgtcccaaattaccatacaacaaggagacaagcccttctttctactttgccatttccacgggctcccttgctcagcagtatgcgcaccctaacgctaccctgcacccacatactccacaccctcagccttcagctacccccactggacagcagcaaagccaacatggtggaagtcatcctgcacccagtcctgttcagcaccatcagcaccaggccgcccaggctctccatctggccagtccacagcagcagtcagccatttaccacgcggggcttgcgccaactccaccctccatgacacctgcctccaacacgcagtcgccacagaatagtttcccagcagcacaacagactgtctttacgatccatccttctcacgttcagccggcgtataccaacccaccccacatggcccacgtacctcaggtaataccagctttagccaactttctgtgaaggccaagtagaatgtgaaggttatcagtaagcagctagaggctctcccagctaggaaaccctgtgtgtcatgccatttgcctgtctccctttccctctcaaatacacgtgatctggcctaaaagaaaaaaaaaaaacaaaaaaaaaaaaggggggggggcaaaaaaccccggggggcaaagtacccgcccgtttctggaaagggccccaggacgaaaaaaagcagggcgacaggggggaagccgggctgaggacccccggggggaggaccccaaatagcgggaaaatggttggaacttcggggaagggta

SEQ ID NO: 360033 - DNA, 3318 bp, Homo sapiens
acccccgagaaagcaacccagcgcgccgcccgctcctcacgtgtccctcccggccccggggccacctcacgttctgcttccgtctgacccctccgacttccggtaaagagtccctatccgcacctccgctcccacccggcgcctcggcgcgcccgccctccgatgcgctcagcggccgcagctcctcggagtcccgcggtggccaccgagtctcgccgcttcgccgcagccaggtggcccgggtggcgctcgctccagcggccggcgcggcggagcgggcggggcggcggtggcgcggccccgggaccgtatccctccgccgcccctcccccgcccggccccggcccccctccctcccggcagagctcgcctccctccgcctcagactgttttggtagcaacggcaacggcggcggcgcgtttcggcccggctcccggcggctccttggtctcggcgggcctccccgccccttcgtcgtcgtccttctccccctcgccagcccgggcgcccctccggccgcgccaacccgcgcctccccgctcggcgcccgtgcgtccccgccgcgttccggcgtctccttggcgcgcccggctcccggctgtccccgcccggcgtgcgagccggtgtatgggcccctcaccatgtcgctgaagccccagcagcagcagcagcagcagcagcaacagcagcagcagcaacagcagcagcagcagcagcagcagccgccgcccgcggctgccaatgtccgcaagcccggcggcagcggccttctagcgtcgcccgccgccgcgccttcgccgtcctcgtcctcggtctcctcgtcctcggccacggctccctcctcggtggtcgcggcgacctccggcggcgggaggcccggcctgggcagaggtcgaaacagtaacaaaggactgcctcagtctacgatttcttttgatggaatctatgcaaatatgaggatggttcatatacttacatcagttgttggctccaaatgtgaagtacaagtgaaaaatggaggtatatatgaaggagtttttaaaacttacagtccgaagtgtgatttggtacttgatgccgcacatgagaaaagtacagaatccagttcggggccgaaacgtgaagaaataatggagagtattttgttcaaatgttcagactttgttgtggtacagtttaaagatatggactccagttatgcaaaaagagatgcttttactgactctgctatcagtgctaaagtgaatggcgaacacaaagagaaggacctggagccctgggatgcaggtgaactcacagccaatgaggaacttgaggctttggaaaatgacgtatctaatggatgggatcccaatgatatgtttcgatataatgaagaaaattatggtgtagtgtctacgtatgatagcagtttatcttcgtatacagtgcccttagaaagagataactcagaagaatttttaaaacgggaagcaagggcaaaccagttagcagaagaaattgagtcaagtgcccagtacaaagctcgagtggccctggaaaatgatgataggagtgaggaagaaaaatacacagcagttcagagaaattccagtgaacgtgaggggcacagcataaacactagggaaaataaatatattcctcctggacaaagaaatagagaagtcatatcctggggaagtgggagacagaattcaccgcgtatgggccagcctggatcgggctccatgccatcaagatccacttctcacacttcagatttcaacccgaattctggttcagaccaaagagtagttaatggaggtgttccctggccatcgccttgcccatctccttcctctcgcccaccttctcgctaccagtcaggtcccaactctcttccacctcgggcagccacccctacacggccgccctccaggcccccctcgcggccatccagacccccgtctcacccctctgctcatggttctccagctcctgtctctactatgcctaaacgcatgtcttcagaagggcctccaaggatgtccccaaaggcccagcgacatcctcgaaatcacagagtttctgctgggaggggttccatatccagtggcctagaatttgtatcccacaacccacccagtgaagcagctactcctccagtagcaaggaccagtccctcggggggaacgtggtcatcagtggtcagtggggttccaagattatcccctaaaactcatagacccaggtctcccagacagaacagtattggaaatacccccagtgggccagttcttgcttctccccaagctggtattattccaactgaagctgttgccatgcctattccagctgcatctcctacgcctgctagtcctgcatcgaacagagctgttaccccttctagtgaggctaaagattccaggcttcaagatcagaggcagaactctcctgcagggaataaagaaaatattaaacccaatgaaacatcacctagcttctcaaaagctgaaaacaaaggtatatcaccagttgtttctgaacatagaaaacagattgatgatttaaagaaatttaagaatgattttaggttacagccaagttctacttctgaatctatggatcaactactaaacaaaaatagagagggagaaaaatcaagagatttgatcaaagacaaaattgaaccaagtgctaaggattctttcattgaaaatagcagcagcaactgtaccagtggcagcagcaagccgaatagccccagcatttccccttcaatacttagtaacacggagcacaagaggggacctgaggtcacttcccaaggggttcagacttccagcccagcatgtaaacaagagaaagacgataaggaagagaagaaagacgcagctgagcaagttaggaaatcaacattgaatcccaatgcaaaggagttcaacccacgttccttctctcagccaaagccttctactaccccaacttcacctcggcctcaagcacaacctagcccatctatggtgggtcatcaacagccaactccagtttatactcagcctgtttgttttgcaccaaatatgatgtatccagtcccagtgagcccaggcgtgcaacctttatacccaatacctatgacgcccatgccagtgaatcaagccaagacatatagagcagtaaaggtgagaataatcctgcctgtgtttgcttgtagtttgcatgctgcatgaattgagtaactaagtttataatgaataaatagttgtagtttagctctgactttttgatgaggctatgcattggcttttgatgaacaacattacatagatattcacatg

SEQ ID NO: 360034 - DNA, 1480 bp, Homo sapiens
acccccgagaaagcaacccagcgcgccgcccgctcctcacgtgtccctcccggccccggggccacctcacgttctgcttccgtctgacccctccgacttccggtaaagagtccctatccgcacctccgctcccacccggcgcctcggcgcgcccgccctccgatgcgctcagcggccgcagctcctcggagtcccgcggtggccaccgagtctcgccgcttcgccgcagccaggtggcccgggtggcgctcgctccagcggccggcgcggcggagcgggcggggcggcggtggcgcggccccgggaccgtatccctccgccgcccctcccccgcccggccccggcccccctccctcccggcagagctcgcctccctccgcctcagactgttttggtagcaacggcaacggcggcggcgcgtttcggcccggctcccggcggctccttggtctcggcgggcctccccgccccttcgtcgtcgtccttctccccctcgccagcccgggcgcccctccggccgcgccaacccgcgcctccccgctcggcgcccgtgcgtccccgccgcgttccggcgtctccttggcgcgcccggctcccggctgtccccgcccggcgtgcgagccggtgtatgggcccctcaccatgtcgctgaagccccagcagcagcagcagcagcagcagcaacagcagcagcagcaacagcagcagcagcagcagcagcagccgccgcccgcggctgccaatgtccgcaagcccggcggcagcggccttctagcgtcgcccgccgccgcgccttcgccgtcctcgtcctcggtctcctcgtcctcggccacggctccctcctcggtggtcgcggcgacctccggcggcgggaggcccggcctgggcagaggtcgaaacagtaacaaaggactgcctcagtctacgatttcttttgatggaatctatgcaaatatgaggatggttcatatacttacatcagttgttggctccaaatgtgaagtacaagtgaaaaatggaggtatatatgaaggagtttttaaaacttacagtccgaagtgtgatttggtacttgatgccgcacatgagaaaagtacagaatccagttcggggccgaaacgtgaagaaataatggagagtattttgttcaaatgttcagactttgttgtggtacagtttaaagatatggactccagttatgcaaaaagagatgcttttactgactctgctatcagtgctaaagtgaatggcgaacacaaagagaaggacctggagccctgggatgcaggtgaactcacagccaatgaggaacttgaggctttggaaaatgacgtatctaatggatgggatcccaatgatatgtttcgatataatgaagaaaattatggtgtagtgtctacgtatgatagcagtttatcttcgtatacagtgcccttagaaagagatactcagaagattttaaacggaaggtccggtgatg

SEQ ID NO: 360035 - DNA, 470 bp, Homo sapiens
atgatgtatcgtgtcttatctcattcttcagtaactcctggctcgctctctacacataaaatgaaactgcagtcatacaagtatagatttgaggattacctgaatagaagtgatcaatgaagctgtaataatgagatttcagaattaagaaggctaagaagtgagttggttatgccttttattagaagcaggtggaagaaaggaattgatggagtagaagagtggcttgggaaatatggacagtttctttcctgattagccaaaggagcttggaatgaagtgggggtatttggtcattaagagatcaccagtcacttcaaagaaagtacttttcagtaaactggaagctacaaccagatttcaagaggttaaggatgcatgggtgataaagggagaaagatattataaaactaccttttgaagttctcaaggtggaaagaagggaaggaaagaattgaggggtaataggg

SEQ ID NO: 360036 - DNA, 512 bp, Homo sapiens
tacagaatatacaattacctcatatagttaaccatctaagagtttgcatcttattgtatataaatcatacttcagtaaatccttgtctctctcaaaaaaaaaaggagagtttagtaatagaagtatagatttgaggattacctgaatagaagtgatcaatgaagctgtaataatgagatttcagaattaagaaggctaagaagtgagttggttatgccttttattagaagcaggtggaagaaaggaattgatggagtagaagagtggcttgggaaatatggacagtttctttcctgattagccaaaggagcttggaatgaagtgggggtatttggtcattaagagatcaccagtcacttcaaagaaagtacttttcagtaaactggaagctacaaccagatttcaagaggttaaggatgcatgggtgataaagggagaaagatattataaaactaccttttgaagttctcaaggtggaaagaagggaaggaaagaattgaggggtaataggg

SEQ ID NO: 360037 - DNA, 5207 bp, Homo sapiens
gaatttcatttcttccactaaagcgtttgcggagacttcaagatcgagcctgcgtgctgccgaagcagggcgccgagtccatgcgaactgccatctgatccgctcttatcaatgaagcagccgatcatggcggatggcccccggtgcaagaggcgcaaacaagccaatcccaggaggaaaaacgtggtgaactatgacaatgtagtggacacaggttctgaaacagatgaggaagacaagcttcatattgctgaggatgacggtattgccaaccctctggaccaggagacgagtccagctagtgtgcccaaccatgagtcctccccacacgtgagccaagctctgttgccaagagaggaagaggaagatgaaataagggagggtggagtggaacacccctggcacaacaacgagattctacaagcctctgtagatggtccagaagaaatgaaggaagactatgacactatggggccagaagccacgatccagaccgcaattaacaatggtacagtgaagaatgcaaattgcacatcagattttgaggaatactttgccaaaagaaaactggaggaacgcgatggtcatgcagtcagcatcgaggagtaccttcagcgcagtgacacagccattatttacccagaagcccctgaggagctgtctcgccttggcacgccagaggccaatgggcaagaagaaaatgacctgccacctggaactccagatgcttttgcccaactgctgacctgcccctactgcgaccggggctacaagcgcttgacatcactgaaggagcacatcaagtaccgccacgagaagaatgaagagaacttttcctgccctctctgtagctacacgtttgcctaccgcacccagctcgagcggcatatggtgacacacaagccagggacagatcagcaccaaatgctaacccaaggagcaggtaatcgcaagttcaaatgcacagagtgtggcaaggccttcaaatataaacaccatctgaaagaacacctgcgaattcacagtggtgaaaaaccttacgagtgcccaaactgcaagaaacgtttctcccattctggttcctacagttcgcacatcagcagcaagaaatgtattggtttaatctctgtaaatggccgaatgagaaacaatatcaagacgggttcttcccctaattctgtttcttcttctcctactaattcagccattacccagttaagaaacaagttggagaatggaaaaccacttagtatgtctgaacagacaggcttacttaaaattaaaacagaaccactagacttcaatgactataaagttcttatggctacacacgggtttagtggcactagtccctttatgaatggtgggcttggagccaccagccctttaggagttcatccatctgctcagagtccaatgcagcacttaggtgtagggatggaagcccctttacttgggtttcccaccatgaatagtaatttaagtgaggtacaaaaggttctacagattgtggacaatactgtttccaggcaaaaaatggactgcaaggctgaagaaatttcaaagttgaaaggttatcacatgaaggatccatgctctcaacctgaggaacaaggagttacttctcctaatattccgcctgtcggtcttccggtagtgagtcataatggtgccactaaaagtattattgactatacgttggaaaaagtcaatgaagccaaagcttgcctccagagcttgactactgactcaaggagacagatcagtaatataaagaaagagaagctacgtactttaatagatttggtcactgatgacaaaatgattgagaaccacaacatatccactccattttcatgccagttctgtaaagaaagttttcctggccccatccctttgcatcagcatgaacgttacctttgtaagatgaatgaagagatcaaggcggtcctgcagcctcatgaaaacatagtccccaacaaagccggagtttttgttgataataaagccctcctcttgtcatctgtactttctgagaaaggaatgacaagccccatcaacccatacaaggaccacatgtctgtactcaaagcatactatgctatgaacatggagcccaactccgatgaactgctgaaaatttccattgctgtgggccttcctcaggaatttgtgaaggaatggtttgaacaacgaaaagtctaccagtactcaaattccaggtccccatccctggaaagaagctccaagccgttagctcccaacagtaaccctcccacaaaagactctttattacccaggtctcctgtaaaacctatggactccataacatcaccatctatagcagaactccacaacagtgttacgaattgtgatcctcctctcaggctaacaaaaccttcccattttaccaatattaaaccagttgaaaaattggaccactccaggagtaatactccttctcccttaaatctttcctccacatcttctaaaaactcccacagtagttcatacactccaaacagcttctcttctgaggagctccaggctgagcctttagacttgtcattaccaaaacaaatgaaagaacccaaaagtattatagccacaaagaacaaaacaaaagctagtagcatcagtttagatcataacagtgtttcttcctcatctgaaaactcagatgagcctctgaacttgacttttatcaagaaggaattttcaaattcaaataatctggacaacaaaagcactaacccagtgttcagcatgaacccatttagtgccaaacctttatacacagctcttccacctcaaagcgcatttccccctgctactttcatgccaccagtccagaccagtattcctgggctacgaccatacccaggactggatcagatgagcttcctaccacatatggcctacacctacccaactggagcagctacttttgctgatatgcagcaaaggagaaagtaccagcggaaacaaggatttcagggagaattgcttgatggagcacaagactacatgtcaggcctagatgatatgacagactccgactcctgtctgtctcgcaaaaagatcaagaagacagagagtggcatgtatgcatgtgacttatgtgacaagacattccagaaaagcagttcccttctgcgacataaatacgaacacacaggaaaaagaccacatcagtgtcagatttgtaagaaagcgtttaaacacaagcaccaccttatcgagcactcaaggcttcactcgggcgagaagccctatcagtgtgataaatgtggcaagcgcttctcacactcgggctcgtactcgcagcacatgaatcacaggtattcctactgcaagcgggaggcggaggagcgggaagcggcggagcgcgaggcgcgcgagaaagggcacttggaacccaccgagctgctgatgaaccgggcttacttgcagagcattacccctcaggggtactctgactcggaggagagggagagtatgccgagggatggcgagagcgagaaggagcacgagaaagaaggcgaggatggctacgggaagctgggcagacaggatggcgacgaggagttcgaggaggaagaggaagaaagtgaaaataaaagtatggatacggatcccgaaacgatacgagatgaagaagagactggagatcactccatggacgatagttcggaggatgggaaaatggaaaccaaatcagaccacgaggaagacaatatggaagatggcatgtaataaactactgcattttaagcttcctatttttttttccagtagtattgttacctgcttgaaaacactgctgtgttaagctgttcatgcacgtgcctgacgcttccaggaagctgtagagagggacagaaggggcggttcagccaagacagatgtagacggagttggagctgggtattgttaaaaactgcattatgcaaaaattttgtacagtgttaaggcctaaaaactgtgtggttcagagactaattcctgtgtttaatagcatttatactttaagcacaactagaaaattgtaagaattgcactctacttatgtatcactacaaactttaaaaaactatgtctaatttatattaatacattttaaaaaggtgcccgcactaccatacatcagtatttttattattattattgttattcctttttaatttaatgtgctcgcactacaatgcatcagtattatgattcctctgtactttcctttcgctattcatcaatttcccatttttttttttcagcttaagtaaccacacaattttaggcctcaattttttttttttcctgtgaaggaacttgaagtgatgcatgtgtgaatttaagataccgaagtcttaaagtgacctggacgtgaaggaaaaagtaagatgagaaataaagaaagcctttgtaaggtggttttaaaagccttatatgcaaaccttttaatctgtgtttctgcaagtgccatccttgtacagtgttaagagggtaacatgggttacctttgcaccagcttcagtgttaagctcaccctgttctttgaagcacccatgtcagtattagaagaataggcagcagttccttagtttacatatgtttgtgcaattattttctgtacttttttgttcattaattttgtcagtattacaccaaactgtttttgcaacaaaaaaattttttttgcattcatttaattttaggtcaaataacattttatttatgtggctcattttatatttcctaattttatttatttcatactgtagtgtacagtattatagttcttcaatatatagatatattttagtaaaaaaggaacatgacgttgatcatttgggcaaattttacgtaaagagaagagcatttattgtgttttggaacattaattgtgagatgggatttttcaattttattattttatttttgtttttttccaattactggaaattccaaatttgggaacttttgatacgatcttgtgaaaacactgtattttcgactgaaaattccactttcttcatcttgttttttagctaaaaagagggactgttaaatacaatgtatgataccatgacaaaaatctttcctgaattgtctttgtaaaagtattattgaattttcaatttgtaatttcttttgaaaatgaccatgctcgaataaaaatgtagccaaactaagaatgtagttaatga

SEQ ID NO: 360038 - DNA, 1229 bp, Homo sapiens
gaatttcatttcttccactaaagcgtttgcggagacttcaaggtataatctatcccagatcctttcccagagagaaacttggcgatcacgttttcacatgatgctcacgctcagggcgcttcaattatccctccccacaaagataggtggcgcgtgtttcagggtctctcgtctctctcctacagaaaagaaaaagaaaaaaatgtcattagaagaggcgtaacacgtcagtccgtccccaggtttgtgtttcctggagtggccgaaagagatcagttctaacctgctctgcaggaataacggtcctgcctcccgacactcttggcgaggtttttgtacagtttgctccgggagctgtttcttcgcttccacctttttctcccccacacttcgcggcttcttcatgctttttcttctcaccatttctggccaaaactacaaacaagacttcgcagatcgagcctgcgtgctgccgaagcagggcgccgagtccatgcgaactgccatctgatccgctcttatcaatgaagcagccgatcatggcggatggcccccggtgcaagaggcgcaaacaagccaatcccaggaggaaaaacgccttggagtcagaaatgagcactcggagcgggagatgccctgctgctgcttgccaccggtgcggcccgtttgtaacttgcaaagtttgttgcttttgcccctgattcgggcagcgggtcctgggatgctcctgcttccctcctgcctcccacggagcccgggaagagggtctgcctccccatcccgccaccttccagcatcagcctctgaaaaatctcacagagacatgcacgttgtagcaaaaatcaaatccggaaactgcttgtttcagagaaagaaatgaagttgtcttttaaagaaaaactgaattaggaggagagaaaagggaaataggagaagaaaggaaaagttaaatttgatttttctccagagtttccactaaagggttggggacagtgtgaaggagaaggggagctttttacaaatgcctttggtctctgaacttcagtggcaaagaacagggatcaagttgaatgttctcagggctttggatcctagaggagaaacaatcagaagagcagaaatggttatccctgtttaaaataagccctcactctttaccacttccttaaaggagtggaggtgctggtagtgatggttagaggcaatgagggacggagaagttgctcccg

SEQ ID NO: 360039 - DNA, 5620 bp, Homo sapiens
gaatttcatttcttccactaaagcgtttgcggagacttcaaggtataatctatcccagatcctttcccagagagaaacttggcgatcacgttttcacatgatgctcacgctcagggcgcttcaattatccctccccacaaagataggtggcgcgtgtttcagggtctctcgtctctctcctacagaaaagaaaaagaaaaaaatgtcattagaagaggcgtaacacgtcagtccgtccccaggtttgtgtttcctggagtggccgaaagagatcagttctaacctgctctgcaggaataacggtcctgcctcccgacactcttggcgaggtttttgtacagtttgctccgggagctgtttcttcgcttccacctttttctcccccacacttcgcggcttcttcatgctttttcttctcaccatttctggccaaaactacaaacaagacttcgcagatcgagcctgcgtgctgccgaagcagggcgccgagtccatgcgaactgccatctgatccgctcttatcaatgaagcagccgatcatggcggatggcccccggtgcaagaggcgcaaacaagccaatcccaggaggaaaaacgtggtgaactatgacaatgtagtggacacaggttctgaaacagatgaggaagacaagcttcatattgctgaggatgacggtattgccaaccctctggaccaggagacgagtccagctagtgtgcccaaccatgagtcctccccacacgtgagccaagctctgttgccaagagaggaagaggaagatgaaataagggagggtggagtggaacacccctggcacaacaacgagattctacaagcctctgtagatggtccagaagaaatgaaggaagactatgacactatggggccagaagccacgatccagaccgcaattaacaatggtacagtgaagaatgcaaattgcacatcagattttgaggaatactttgccaaaagaaaactggaggaacgcgatggtcatgcagtcagcatcgaggagtaccttcagcgcagtgacacagccattatttacccagaagcccctgaggagctgtctcgccttggcacgccagaggccaatgggcaagaagaaaatgacctgccacctggaactccagatgcttttgcccaactgctgacctgcccctactgcgaccggggctacaagcgcttgacatcactgaaggagcacatcaagtaccgccacgagaagaatgaagagaacttttcctgccctctctgtagctacacgtttgcctaccgcacccagctcgagcggcatatggtgacacacaagccagggacagatcagcaccaaatgctaacccaaggagcaggtaatcgcaagttcaaatgcacagagtgtggcaaggccttcaaatataaacaccatctgaaagaacacctgcgaattcacagtggtgaaaaaccttacgagtgcccaaactgcaagaaacgtttctcccattctggttcctacagttcgcacatcagcagcaagaaatgtattggtttaatctctgtaaatggccgaatgagaaacaatatcaagacgggttcttcccctaattctgtttcttcttctcctactaattcagccattacccagttaagaaacaagttggagaatggaaaaccacttagtatgtctgaacagacaggcttacttaaaattaaaacagaaccactagacttcaatgactataaagttcttatggctacacacgggtttagtggcactagtccctttatgaatggtgggcttggagccaccagccctttaggagttcatccatctgctcagagtccaatgcagcacttaggtgtagggatggaagcccctttacttgggtttcccaccatgaatagtaatttaagtgaggtacaaaaggttctacagattgtggacaatactgtttccaggcaaaaaatggactgcaaggctgaagaaatttcaaagttgaaaggttatcacatgaaggatccatgctctcaacctgaggaacaaggagttacttctcctaatattccgcctgtcggtcttccggtagtgagtcataatggtgccactaaaagtattattgactatacgttggaaaaagtcaatgaagccaaagcttgcctccagagcttgactactgactcaaggagacagatcagtaatataaagaaagagaagctacgtactttaatagatttggtcactgatgacaaaatgattgagaaccacaacatatccactccattttcatgccagttctgtaaagaaagttttcctggccccatccctttgcatcagcatgaacgttacctttgtaagatgaatgaagagatcaaggcggtcctgcagcctcatgaaaacatagtccccaacaaagccggagtttttgttgataataaagccctcctcttgtcatctgtactttctgagaaaggaatgacaagccccatcaacccatacaaggaccacatgtctgtactcaaagcatactatgctatgaacatggagcccaactccgatgaactgctgaaaatttccattgctgtgggccttcctcaggaatttgtgaaggaatggtttgaacaacgaaaagtctaccagtactcaaattccaggtccccatccctggaaagaagctccaagccgttagctcccaacagtaaccctcccacaaaagactctttattacccaggtctcctgtaaaacctatggactccataacatcaccatctatagcagaactccacaacagtgttacgaattgtgatcctcctctcaggctaacaaaaccttcccattttaccaatattaaaccagttgaaaaattggaccactccaggagtaatactccttctcccttaaatctttcctccacatcttctaaaaactcccacagtagttcatacactccaaacagcttctcttctgaggagctccaggctgagcctttagacttgtcattaccaaaacaaatgaaagaacccaaaagtattatagccacaaagaacaaaacaaaagctagtagcatcagtttagatcataacagtgtttcttcctcatctgaaaactcagatgagcctctgaacttgacttttatcaagaaggaattttcaaattcaaataatctggacaacaaaagcactaacccagtgttcagcatgaacccatttagtgccaaacctttatacacagctcttccacctcaaagcgcatttccccctgctactttcatgccaccagtccagaccagtattcctgggctacgaccatacccaggactggatcagatgagcttcctaccacatatggcctacacctacccaactggagcagctacttttgctgatatgcagcaaaggagaaagtaccagcggaaacaaggatttcagggagaattgcttgatggagcacaagactacatgtcaggcctagatgatatgacagactccgactcctgtctgtctcgcaaaaagatcaagaagacagagagtggcatgtatgcatgtgacttatgtgacaagacattccagaaaagcagttcccttctgcgacataaatacgaacacacaggaaaaagaccacatcagtgtcagatttgtaagaaagcgtttaaacacaagcaccaccttatcgagcactcaaggcttcactcgggcgagaagccctatcagtgtgataaatgtggcaagcgcttctcacactcgggctcgtactcgcagcacatgaatcacaggtattcctactgcaagcgggaggcggaggagcgggaagcggcggagcgcgaggcgcgcgagaaagggcacttggaacccaccgagctgctgatgaaccgggcttacttgcagagcattacccctcaggggtactctgactcggaggagagggagagtatgccgagggatggcgagagcgagaaggagcacgagaaagaaggcgaggatggctacgggaagctgggcagacaggatggcgacgaggagttcgaggaggaagaggaagaaagtgaaaataaaagtatggatacggatcccgaaacgatacgagatgaagaagagactggagatcactccatggacgatagttcggaggatgggaaaatggaaaccaaatcagaccacgaggaagacaatatggaagatggcatgtaataaactactgcattttaagcttcctatttttttttccagtagtattgttacctgcttgaaaacactgctgtgttaagctgttcatgcacgtgcctgacgcttccaggaagctgtagagagggacagaaggggcggttcagccaagacagatgtagacggagttggagctgggtattgttaaaaactgcattatgcaaaaattttgtacagtgttaaggcctaaaaactgtgtggttcagagactaattcctgtgtttaatagcatttatactttaagcacaactagaaaattgtaagaattgcactctacttatgtatcactacaaactttaaaaaactatgtctaatttatattaatacattttaaaaaggtgcccgcactaccatacatcagtatttttattattattattgttattcctttttaatttaatgtgctcgcactacaatgcatcagtattatgattcctctgtactttcctttcgctattcatcaatttcccatttttttttttcagcttaagtaaccacacaattttaggcctcaattttttttttttcctgtgaaggaacttgaagtgatgcatgtgtgaatttaagataccgaagtcttaaagtgacctggacgtgaaggaaaaagtaagatgagaaataaagaaagcctttgtaaggtggttttaaaagccttatatgcaaaccttttaatctgtgtttctgcaagtgccatccttgtacagtgttaagagggtaacatgggttacctttgcaccagcttcagtgttaagctcaccctgttctttgaagcacccatgtcagtattagaagaataggcagcagttccttagtttacatatgtttgtgcaattattttctgtacttttttgttcattaattttgtcagtattacaccaaactgtttttgcaacaaaaaaattttttttgcattcatttaattttaggtcaaataacattttatttatgtggctcattttatatttcctaattttatttatttcatactgtagtgtacagtattatagttcttcaatatatagatatattttagtaaaaaaggaacatgacgttgatcatttgggcaaattttacgtaaagagaagagcatttattgtgttttggaacattaattgtgagatgggatttttcaattttattattttatttttgtttttttccaattactggaaattccaaatttgggaacttttgatacgatcttgtgaaaacactgtattttcgactgaaaattccactttcttcatcttgttttttagctaaaaagagggactgttaaatacaatgtatgataccatgacaaaaatctttcctgaattgtctttgtaaaagtattattgaattttcaatttgtaatttcttttgaaaatgaccatgctcgaataaaaatgtagccaaactaagaatgtagttaatga

SEQ ID NO: 360040 - DNA, 5569 bp, Homo sapiens
gaatttcatttcttccactaaagcgtttgcggagacttcaaggtataatctatcccagatcctttcccagagagaaacttggcgatcacgttttcacatgatgctcacgctcagggcgcttcaattatccctccccacaaagataggtggcgcgtgtttcagggtctctcgtctctctcctacagaaaagaaaaagaaaaaaatgtcattagaagaggcgtaacacgtcagtccgtccccaggtttgtgtttcctggagtggccgaaagagatcagttctaacctgctctgcaggaataacggtcctgcctcccgacactcttggcgaggtttttgtacagtttgctccgggagctgtttcttcgcttccacctttttctcccccacacttcgcggcttcttcatgctttttcttctcaccatttctggccaaaactacaaacaagacttcgcagatcgagcctgcgtgctgccgaagcagggcgccgagtccatgcgaactgccatctgatccgctcttatcaatgaagcagccgatcatggcggatggcccccggtgcaagaggcgcaaacaagccaatcccaggaggaaaaacgacaagcttcatattgctgaggatgacggtattgccaaccctctggaccaggagacgagtccagctagtgtgcccaaccatgagtcctccccacacgtgagccaagctctgttgccaagagaggaagaggaagatgaaataagggagggtggagtggaacacccctggcacaacaacgagattctacaagcctctgtagatggtccagaagaaatgaaggaagactatgacactatggggccagaagccacgatccagaccgcaattaacaatggtacagtgaagaatgcaaattgcacatcagattttgaggaatactttgccaaaagaaaactggaggaacgcgatggtcatgcagtcagcatcgaggagtaccttcagcgcagtgacacagccattatttacccagaagcccctgaggagctgtctcgccttggcacgccagaggccaatgggcaagaagaaaatgacctgccacctggaactccagatgcttttgcccaactgctgacctgcccctactgcgaccggggctacaagcgcttgacatcactgaaggagcacatcaagtaccgccacgagaagaatgaagagaacttttcctgccctctctgtagctacacgtttgcctaccgcacccagctcgagcggcatatggtgacacacaagccagggacagatcagcaccaaatgctaacccaaggagcaggtaatcgcaagttcaaatgcacagagtgtggcaaggccttcaaatataaacaccatctgaaagaacacctgcgaattcacagtggtgaaaaaccttacgagtgcccaaactgcaagaaacgtttctcccattctggttcctacagttcgcacatcagcagcaagaaatgtattggtttaatctctgtaaatggccgaatgagaaacaatatcaagacgggttcttcccctaattctgtttcttcttctcctactaattcagccattacccagttaagaaacaagttggagaatggaaaaccacttagtatgtctgaacagacaggcttacttaaaattaaaacagaaccactagacttcaatgactataaagttcttatggctacacacgggtttagtggcactagtccctttatgaatggtgggcttggagccaccagccctttaggagttcatccatctgctcagagtccaatgcagcacttaggtgtagggatggaagcccctttacttgggtttcccaccatgaatagtaatttaagtgaggtacaaaaggttctacagattgtggacaatactgtttccaggcaaaaaatggactgcaaggctgaagaaatttcaaagttgaaaggttatcacatgaaggatccatgctctcaacctgaggaacaaggagttacttctcctaatattccgcctgtcggtcttccggtagtgagtcataatggtgccactaaaagtattattgactatacgttggaaaaagtcaatgaagccaaagcttgcctccagagcttgactactgactcaaggagacagatcagtaatataaagaaagagaagctacgtactttaatagatttggtcactgatgacaaaatgattgagaaccacaacatatccactccattttcatgccagttctgtaaagaaagttttcctggccccatccctttgcatcagcatgaacgttacctttgtaagatgaatgaagagatcaaggcggtcctgcagcctcatgaaaacatagtccccaacaaagccggagtttttgttgataataaagccctcctcttgtcatctgtactttctgagaaaggaatgacaagccccatcaacccatacaaggaccacatgtctgtactcaaagcatactatgctatgaacatggagcccaactccgatgaactgctgaaaatttccattgctgtgggccttcctcaggaatttgtgaaggaatggtttgaacaacgaaaagtctaccagtactcaaattccaggtccccatccctggaaagaagctccaagccgttagctcccaacagtaaccctcccacaaaagactctttattacccaggtctcctgtaaaacctatggactccataacatcaccatctatagcagaactccacaacagtgttacgaattgtgatcctcctctcaggctaacaaaaccttcccattttaccaatattaaaccagttgaaaaattggaccactccaggagtaatactccttctcccttaaatctttcctccacatcttctaaaaactcccacagtagttcatacactccaaacagcttctcttctgaggagctccaggctgagcctttagacttgtcattaccaaaacaaatgaaagaacccaaaagtattatagccacaaagaacaaaacaaaagctagtagcatcagtttagatcataacagtgtttcttcctcatctgaaaactcagatgagcctctgaacttgacttttatcaagaaggaattttcaaattcaaataatctggacaacaaaagcactaacccagtgttcagcatgaacccatttagtgccaaacctttatacacagctcttccacctcaaagcgcatttccccctgctactttcatgccaccagtccagaccagtattcctgggctacgaccatacccaggactggatcagatgagcttcctaccacatatggcctacacctacccaactggagcagctacttttgctgatatgcagcaaaggagaaagtaccagcggaaacaaggatttcagggagaattgcttgatggagcacaagactacatgtcaggcctagatgatatgacagactccgactcctgtctgtctcgcaaaaagatcaagaagacagagagtggcatgtatgcatgtgacttatgtgacaagacattccagaaaagcagttcccttctgcgacataaatacgaacacacaggaaaaagaccacatcagtgtcagatttgtaagaaagcgtttaaacacaagcaccaccttatcgagcactcaaggcttcactcgggcgagaagccctatcagtgtgataaatgtggcaagcgcttctcacactcgggctcgtactcgcagcacatgaatcacaggtattcctactgcaagcgggaggcggaggagcgggaagcggcggagcgcgaggcgcgcgagaaagggcacttggaacccaccgagctgctgatgaaccgggcttacttgcagagcattacccctcaggggtactctgactcggaggagagggagagtatgccgagggatggcgagagcgagaaggagcacgagaaagaaggcgaggatggctacgggaagctgggcagacaggatggcgacgaggagttcgaggaggaagaggaagaaagtgaaaataaaagtatggatacggatcccgaaacgatacgagatgaagaagagactggagatcactccatggacgatagttcggaggatgggaaaatggaaaccaaatcagaccacgaggaagacaatatggaagatggcatgtaataaactactgcattttaagcttcctatttttttttccagtagtattgttacctgcttgaaaacactgctgtgttaagctgttcatgcacgtgcctgacgcttccaggaagctgtagagagggacagaaggggcggttcagccaagacagatgtagacggagttggagctgggtattgttaaaaactgcattatgcaaaaattttgtacagtgttaaggcctaaaaactgtgtggttcagagactaattcctgtgtttaatagcatttatactttaagcacaactagaaaattgtaagaattgcactctacttatgtatcactacaaactttaaaaaactatgtctaatttatattaatacattttaaaaaggtgcccgcactaccatacatcagtatttttattattattattgttattcctttttaatttaatgtgctcgcactacaatgcatcagtattatgattcctctgtactttcctttcgctattcatcaatttcccatttttttttttcagcttaagtaaccacacaattttaggcctcaattttttttttttcctgtgaaggaacttgaagtgatgcatgtgtgaatttaagataccgaagtcttaaagtgacctggacgtgaaggaaaaagtaagatgagaaataaagaaagcctttgtaaggtggttttaaaagccttatatgcaaaccttttaatctgtgtttctgcaagtgccatccttgtacagtgttaagagggtaacatgggttacctttgcaccagcttcagtgttaagctcaccctgttctttgaagcacccatgtcagtattagaagaataggcagcagttccttagtttacatatgtttgtgcaattattttctgtacttttttgttcattaattttgtcagtattacaccaaactgtttttgcaacaaaaaaattttttttgcattcatttaattttaggtcaaataacattttatttatgtggctcattttatatttcctaattttatttatttcatactgtagtgtacagtattatagttcttcaatatatagatatattttagtaaaaaaggaacatgacgttgatcatttgggcaaattttacgtaaagagaagagcatttattgtgttttggaacattaattgtgagatgggatttttcaattttattattttatttttgtttttttccaattactggaaattccaaatttgggaacttttgatacgatcttgtgaaaacactgtattttcgactgaaaattccactttcttcatcttgttttttagctaaaaagagggactgttaaatacaatgtatgataccatgacaaaaatctttcctgaattgtctttgtaaaagtattattgaattttcaatttgtaatttcttttgaaaatgaccatgctcgaataaaaatgtagccaaactaagaatgtagttaatga

SEQ ID NO: 360041 - DNA, 953 bp, Homo sapiens
acggagaaggggcggggccaaaactgcgcgcccaatcggggtgacgctctagccttgccggggactcgtgggtaacttgcttttgggagccagcggtatggcgtcgggctgcaagattggcccgtccatcctcaacagcgacctggccaatttaggggccgagtgcctccggatgctagactctggggccgattatctgcacctggacgtaatggacgggcattttgttcccaacatcacctttggtcaccctgtggtagaaagccttcgaaagcagctaggccaggaccctttctttgacatgcacatgatggtgtccaagccagaacagtgggtaaagccaatggctgtagcaggagccaatcagtacacctttcatctcgaggctactgagaacccaggggctttgattaaagacattcgggagaatgggatgaaggttggccttgccatcaaaccaggaacctcagttgagtatttggcaccatgggctaatcagatagatatggccttggttatgacagtggaaccggggtttggagggcagaaattcatggaagatatgatgccaaaggttcactggttgaggacccagttcccatctttggatatagaggtcgatggtggagtaggtcctgacactgtccataaatgtgcagaggcaggagctaacatgattgtgtctggcagtgctattatgaggagtgaagaccccagatctgtgatcaatctattaagaaatgtttgctcagaagctgctcagaaacgttctcttgatcggtgaaaccataaggagcccagtgttcctgttcatgaaatctcccttttactggaaaacaggaatattgactaccaaatcacaatgcaattgaagccgtactgcttttttgagcagttattcattccagtgattaaaactgattgtgcagaatattctaagaggtcagaaattg

SEQ ID NO: 360042 - DNA, 798 bp, Homo sapiens
  misc_feature (798)..(798): n is a, c, g, or t
acggagaaggggcggggccaaaactgcgcgcccaatcggggtgacgctctagccttgccggggactcgtgggtaacttgcttttgggagccagcggtatggcgtcgggctgcaagattggcccgtccatcctcaacagcgacctggccaatttaggggccgagtgcctccggatgctagactctggggccgattatctgcacctggacgtaatggacgggcattttgttcccaacatcacctttggtcaccctgtggtagaaagccttcgaaagcagctaggccaggaccctttctttgacatgcacatgatggtgtccaagccagaacagtgggtaaagccaatggctgtagcaggagccaatcagtacacctttcatctcgaggctactgagaacccaggggctttgattaaagacattcgggagaatgggatgaaggttggccttgccatcaaaccaggaacctcagttgagtatttggcaccatgggctaatcagatagatatggccttggttatgacagtggaaccggggtttggagggcagaaattcatggaagatatgatgccaaaggttcactggttgaggacccagttcccatctttggatatagaggtcgatggtggagtaggtcctgacactgtccataaatgtgcagaggcaggagctaacatgattgtgtctggcagtgctattatgaggagtgaagaccccagatctgtgatcaatctattaagaaatgtttgtccgctgttccgtctctggacggtgaacattagggcctgttctggtctgtn

SEQ ID NO: 360043 - DNA, 873 bp, Homo sapiens
acggagaaggggcggggccaaaactgcgcgcccaatcggggtgacgctctagccttgccggggactcgtgggtaacttgcttttgggagccagcggtatggcgtcgggctgcaagattggcccgtccatcctcaacagcgacctggccaatttaggggccgagtgcctccggatgctagactctggggccgattatctgcacctggacgtaatggacggacatgcacatgatggtgtccaagccagaacagtgggtaaagccaatggctgtagcaggagccaatcagtacacctttcatctcgaggctactgagaacccaggggctttgattaaagacattcgggagaatgggatgaaggttggccttgccatcaaaccaggaacctcagttgagtatttggcaccatgggctaatcagatagatatggccttggttatgacagtggaaccggggtttggagggcagaaattcatggaagatatgatgccaaaggttcactggttgaggacccagttcccatctttggatatagaggtcgatggtggagtaggtcctgacactgtccataaatgtgcagaggcaggagctaacatgattgtgtctggcagtgctattatgaggagtgaagaccccagatctgtgatcaatctattaagaaatgtttgctcagaagctgctcagaaacgttctcttgatcggtgaaaccataaggagcccagtgttcctgttcatgaaatctcccttttactggaaaacaggaatattgactaccaaatcacaatgcaattgaagccgtactgcttttttgagcagttattcattccagtgattaaaactgattgtgcagaatattctaagaggtcagaaattg

SEQ ID NO: 360044 - DNA, 1007 bp, Homo sapiens
acggagaaggggcggggccaaaactgcgcgcccaatcggggtgacgctctagccttgccggggactcgtgggtaacttgcttttgggagccagcggtatggcgtcgggctgcaagattggcccgtccatcctcaacagcgacctggccaatttaggggccgagtgcctccggatgctagactctggggccgattatctgcacctggacgtaatggacgggcattttgttcccaacatcacctttggtcaccctgtggtagaaagccttcgaaagcagctaggccaggaccctttctttgacatgcacatgatggtgtccaagccagaacagtgggtaaagccaatggctgtagcaggagccaatcagtacacctttcatctcgaggctactgagaacccaggggctttgattaaagacattcgggagaatgggatgaagtcttgctctgtcacccaggctgaagtgcagtggcacagtcagggcccattgcaggttggccttgccatcaaaccaggaacctcagttgagtatttggcaccatgggctaatcagatagatatggccttggttatgacagtggaaccggggtttggagggcagaaattcatggaagatatgatgccaaaggttcactggttgaggacccagttcccatctttggatatagaggtcgatggtggagtaggtcctgacactgtccataaatgtgcagagtgtgatgtatctacttccaggttcttgtataactgccacacgtttctgcttgatatatacctatcaaaagcttgacagtagtaaatacttatgcaggaggggctggccagatgatgagtgagctcttctccctctttgttctagcaatgaatcacaaaacagattgggtttccatccttgaatcagatcctaggaagatcagagttaaatttggacccaattttttagcttttctttttcaatttctttgcttccatatttaaatgtatcttaaaaacttttttaaagccac

SEQ ID NO: 360045 - DNA, 936 bp, Homo sapiens
ccatggaaagaaccattgaatgttacacattaaacaagtctaatatcattagaattactttcctaattagatgacagttgtgcagaagattctgaccttatttgaggcttacatataggtttggagatgtggaaaggagtggaaaaagaaatatgtaagctgaagtgccaaactcacactgaaataaagggcatggcctaccagctgacaaggagtgtctggtttcaagatggcaaatgaccctaaacatgatagacaaatatgttttacataggtacatgcacagataggcacatataaatccacatttgcaagcaaaaagtggaacctgtaaagcagaatttctgaggaatctctaaaagactaatactatatggaatttgaagaggaaacccagagcagaagcacatagtgaagtactgccacaaagatgtgtgacgccactaaaggtgctctagacccacaagaaaggaaaactgggagcaggacaactatctggatattgactgcacatgccaatatctcagtcagactaacagaatcagagctttaggcagagaaatgaatggttggagagagaaggcaatgcccaggtgccctgctttgaaatgtcccgcccatccccaaattagtctgaaaatttcaaatgttgtataaattcccttcccatcaaaagtgtcccataaacagcagtggtagaagagttttaactgagtatcacagcttcaatgatgagtatagaaaactccaaaaatctgaataccaacacaatcaaaaaagaggtacaaaccacaagtggaagaaccatctcaagaaataatgaagcattcatggaatacagattagcaactctttaaaacagtattgccaagagaaacaggtaagaggccctctggagaaatgtcagaaatagaaaatgtaattgttcaaatgtta

SEQ ID NO: 360046 - DNA, 1809 bp, Homo sapiens
acggagaaggggcggggccaaaactgcgcgcccaatcggggtgacgctctagccttgccggggactcgtgggtaacttgcttttgggagccagcggtatggcgtcgggctgcaagattggcccgtccatcctcaacagcgacctggccaatttaggggccgagtgcctccggatgctagactctggggccgattatctgcacctggacgtaatggacgggcattttgttcccaacatcacctttggtcaccctgtggtagaaagccttcgaaagcagctaggccaggaccctttctttgacatgcacatgatggtgtccaagccagaacagtgggtaaagccaatggctgtagcaggagccaatcagtacacctttcatctcgaggctactgagaacccaggggctttgattaaagacattcgggagaatgggatgaaggttggccttgccatcaaaccaggaacctcagttgagtatttggcaccatgggctaatcagatagatatggccttggttatgacagtggaaccggggtttggagggcagaaattcatggaagatatgatgccaaaggttcactggttgaggacccagttcccatctttggatatagaggtcgatggtggagtaggtcctgacactgtccataaatgtgcagaggcaggagctaacatgattgtgtctggcagtgctattatgaggagtgaagaccccagatctgtgatcaatctattaagaaatgtttgctcagaagctgctcagaaacgttctcttgatcggtgaaaccataaggagcccagtgttcctgttcatgaaatctcccttttactggaaaacaggaatattgactaccaaatcacaatgcaattgaagccgtactgcttttttgagcagttattcattccagtgattaaaactgattgtgcagaatattctaagaggtcagaaattggtgtgtataactacatttttagtgatgcaatttattgattagtgagtaagatactgtttttattgagagatttgatttttataaagtaaaaatacggctgcattagggttacaaacagaaaagtgtcttaatgtctaaggagggcatattagctacactacaaaaacaaattttgtctgtacttctgaaaagaattttgttgtttctcagctgttttccaaaagcaaaggaagtctttatggtttttttctatttcatgttattgtgatttgtttataagtttgggtggggtgcataccatattcttggttcttaaaatctatcacttttcaccttacacttgatgtgtgaaaactataaaaacaatgtgtgaaacccaggggttctaaaatacaagcatagattttatcagggtgttttgtcaaagcaggttattcagtgattcctccccaccattcttaagaacgttaaataatgctgttgtgttagctctgagtagaaaggaaaaagtaaaacctctgtttggaggtaatattgggttgaattctgactgcccctttctagctggacctttaacaaatcacccaatcttttttgtgtttctctaaagtcatttatacattaaatgtaattatagcaactgtggggttctgttgagaattaagagctaacactatatatgtaaagtttccagtactagtcccagaatttagaatatgctcaacacaaagtaaacagcattatataagtttatatttttgtgagttataaagtactttgatatattctcattaaatctgtaaatcacctctataagtaagtggtaataataaagcagatatttttgtccccattt

SEQ ID NO: 360047 - DNA, 3291 bp, Homo sapiens
acctcagttcctcccctccccccacgtaacgtgtggtcttccatcacttaggacccggaagcgacctaaatctttaggacatttcttcactttcagctagagaaactgaggcccaaggggagaagcatgacttgcccaagctcatatagctagttagtggcaaagctggggaaacagacttctctaacgatttaagttggcacctgcggttaggttcccgagttctgccacttgctgggttaccttggacaagccactaacctcattgagcttcagtttcataatttgaaaaatggaactactaacagaacctaccgcttaggcatcttggaagatgaaatgagcgagtacatgagaagtttacagtgcctggcgtatattaagttctctataattgttaattacatcattattacaattctgattttcctgtctattttctcttcaggcaccctgctcttcagggaggtcaggcattttgttcccaacatcacctttggtcaccctgtggtagaaagccttcgaaagcagctaggccaggaccctttctttgacatgcacatgatggtgtccaagccagaacagtgggtaaagccaatggctgtagcaggagccaatcagtacacctttcatctcgaggctactgagaacccaggggctttgattaaagacattcgggagaatgggatgaaggttggccttgccatcaaaccaggaacctcagttgagtatttggcaccatgggctaatcagatagatatggccttggttatgacagtggaaccggggtttggagggcagaaattcatggaagatatgatgccaaaggttcactggttgaggacccagttcccatctttggatatagaggtcgatggtggagtaggtcctgacactgtccataaatgtgcagaggcaggagctaacatgattgtgtctggcagtgctattatgaggagtgaagaccccagatctgtgatcaatctattaagaaatgtttgctcagaagctgctcagaaacgttctcttgatcggtgaaaccataaggagcccagtgttcctgttcatgaaatctcccttttactggaaaacaggaatattgactaccaaatcacaatgcaattgaagccgtactgcttttttgagcagttattcattccagtgattaaaactgattgtgcagaatattctaagaggtcagaaattggtgtgtataactacatttttagtgatgcaatttattgattagtgagtaagatactgtttttattgagagatttgatttttataaagtaaaaatacggctgcattagggttacaaacagaaaagtgtcttaatgtctaaggagggcatattagctacactacaaaaacaaattttgtctgtacttctgaaaagaattttgttgtttctcagctgttttccaaaagcaaaggaagtctttatggtttttttctatttcatgttattgtgatttgtttataagtttgggtggggtgcataccatattcttggttcttaaaatctatcacttttcaccttacacttgatgtgtgaaaactataaaaacaatgtgtgaaacccaggggttctaaaatacaagcatagattttatcagggtgttttgtcaaagcaggttattcagtgattcctccccaccattcttaagaacgttaaataatgctgttgtgttagctctgagtagaaaggaaaaagtaaaacctctgtttggaggtaatattgggttgaattctgactgcccctttctagctggacctttaacaaatcacccaatcttttttgtgtttctctaaagtcatttatacattaaatgtaattatagcaactgtggggttctgttgagaattaagagctaacactatatatgtaaagtttccagtactagtcccagaatttagaatatgctcaacacaaagtaaacagcattatataagtttatatttttgtgagttataaagtactttgatatattctcattaaatctgtaaatcacctctataagtaagtggtaataataaagcagatatttttgtccccatttaaaaaatgaagaaattaatgcttaatagggtggtaccctggaaaggatctgggaagtggtagaatttctggtctgtacttttacaaatggagcccttgggaggtgggttaggtaaaagaagctttttacttaacgttgtcttatttccagtctaattttacgctgtagcagaaccagatggctgagaaaattctggaactatggatcttgaccccaaggatatattattttattccaagaaagatcaggtaggcgaaaagatgacaggatacagagtcaatccataaactaaatatttataactgttctgaattatacagagtctaaaaatatgtgtcagctacttcattcctgtaaatactcttgctgtgttataaatatggcaagaaataaacatgaccaatatcaatagacttcttgaggctactataagttttgagaaataaggttcaaaaaataagaatgctaacacttaagcacagactagagcttgcttgggtttcttcctgcattacaaggtaaaaatttgttaatgtttgtttttattcagcttgggaaagctttgtgccatgaatacgtcgcatttaataacaagcaacacacggcatatagaaataactttaattaaaaaacttacatagaagattataatatcagacgtgacaaagatttgagtttatttgcctggacaacttgggtttgtctggcttttgttttctttttctttaaaaataaatgtacagtaaaactacaagcaaaagtttgtcagtattgaattgaattttttaccccttaaaaggactagtataatttccaatctctaacaaaaacttagtgtcaaatctcacagataaggccaaatggccaatattttcagttatgtgggtagtacaacttgagtaaccttttttacatgacaaaaagtgagttatataaattgtcctcaactttcacataggaaaaaaatggtttaatagcttcaaaaggaattttctttcatgtatactcttcagtatccaatattgaagctttgttctttgaaaaattttaatttccaatctaggatgcaagcaagaatatatgtttatttgaatagagtaagctatggcaaagaatgaccaaattagctagaaatagaaatcagccagaattaactaatttcttgctaatctagaaatacaatcatcttttttttttttttcaaattttatactgatagggctttact

SEQ ID NO: 360048 - DNA, 2957 bp, Homo sapiens
acggagaaggggcggggccaaaactgcgcgcccaatcggggtgacgctctagccttgccggggactcgtgggtaacttgcttttgggagccagcggtatggcgtcgggctgcaagattggcccgtccatcctcaacagcgacctggccaatttaggggccgagtgcctccggatgctagactctggggccgattatctgcacctggacgtaatggacggacatgcacatgatggtgtccaagccagaacagtgggtaaagccaatggctgtagcaggagccaatcagtacacctttcatctcgaggctactgagaacccaggggctttgattaaagacattcgggagaatgggatgaaggttggccttgccatcaaaccaggaacctcagttgagtatttggcaccatgggctaatcagatagatatggccttggttatgacagtggaaccggggtttggagggcagaaattcatggaagatatgatgccaaaggttcactggttgaggacccagttcccatctttggatatagaggtcgatggtggagtaggtcctgacactgtccataaatgtgcagaggcaggagctaacatgattgtgtctggcagtgctattatgaggagtgaagaccccagatctgtgatcaatctattaagaaatgtttgctcagaagctgctcagaaacgttctcttgatcggtgaaaccataaggagcccagtgttcctgttcatgaaatctcccttttactggaaaacaggaatattgactaccaaatcacaatgcaattgaagccgtactgcttttttgagcagttattcattccagtgattaaaactgattgtgcagaatattctaagaggtcagaaattggtgtgtataactacatttttagtgatgcaatttattgattagtgagtaagatactgtttttattgagagatttgatttttataaagtaaaaatacggctgcattagggttacaaacagaaaagtgtcttaatgtctaaggagggcatattagctacactacaaaaacaaattttgtctgtacttctgaaaagaattttgttgtttctcagctgttttccaaaagcaaaggaagtctttatggtttttttctatttcatgttattgtgatttgtttataagtttgggtggggtgcataccatattcttggttcttaaaatctatcacttttcaccttacacttgatgtgtgaaaactataaaaacaatgtgtgaaacccaggggttctaaaatacaagcatagattttatcagggtgttttgtcaaagcaggttattcagtgattcctccccaccattcttaagaacgttaaataatgctgttgtgttagctctgagtagaaaggaaaaagtaaaacctctgtttggaggtaatattgggttgaattctgactgcccctttctagctggacctttaacaaatcacccaatcttttttgtgtttctctaaagtcatttatacattaaatgtaattatagcaactgtggggttctgttgagaattaagagctaacactatatatgtaaagtttccagtactagtcccagaatttagaatatgctcaacacaaagtaaacagcattatataagtttatatttttgtgagttataaagtactttgatatattctcattaaatctgtaaatcacctctataagtaagtggtaataataaagcagatatttttgtccccatttaaaaaatgaagaaattaatgcttaatagggtggtaccctggaaaggatctgggaagtggtagaatttctggtctgtacttttacaaatggagcccttgggaggtgggttaggtaaaagaagctttttacttaacgttgtcttatttccagtctaattttacgctgtagcagaaccagatggctgagaaaattctggaactatggatcttgaccccaaggatatattattttattccaagaaagatcaggtaggcgaaaagatgacaggatacagagtcaatccataaactaaatatttataactgttctgaattatacagagtctaaaaatatgtgtcagctacttcattcctgtaaatactcttgctgtgttataaatatggcaagaaataaacatgaccaatatcaatagacttcttgaggctactataagttttgagaaataaggttcaaaaaataagaatgctaacacttaagcacagactagagcttgcttgggtttcttcctgcattacaaggtaaaaatttgttaatgtttgtttttattcagcttgggaaagctttgtgccatgaatacgtcgcatttaataacaagcaacacacggcatatagaaataactttaattaaaaaacttacatagaagattataatatcagacgtgacaaagatttgagtttatttgcctggacaacttgggtttgtctggcttttgttttctttttctttaaaaataaatgtacagtaaaactacaagcaaaagtttgtcagtattgaattgaattttttaccccttaaaaggactagtataatttccaatctctaacaaaaacttagtgtcaaatctcacagataaggccaaatggccaatattttcagttatgtgggtagtacaacttgagtaaccttttttacatgacaaaaagtgagttatataaattgtcctcaactttcacataggaaaaaaatggtttaatagcttcaaaaggaattttctttcatgtatactcttcagtatccaatattgaagctttgttctttgaaaaattttaatttccaatctaggatgcaagcaagaatatatgtttatttgaatagagtaagctatggcaaagaatgaccaaattagctagaaatagaaatcagccagaattaactaatttcttgctaatctagaaatacaatcatcttttttttttttttcaaattttatactgatagggctttact

SEQ ID NO: 360049 - DNA, 3091 bp, Homo sapiens
acggagaaggggcggggccaaaactgcgcgcccaatcggggtgacgctctagccttgccggggactcgtgggtaacttgcttttgggagccagcggtatggcgtcgggctgcaagattggcccgtccatcctcaacagcgacctggccaatttaggggccgagtgcctccggatgctagactctggggccgattatctgcacctggacgtaatggacgggcattttgttcccaacatcacctttggtcaccctgtggtagaaagccttcgaaagcagctaggccaggaccctttctttgacatgcacatgatggtgtccaagccagaacagtgggtaaagccaatggctgtagcaggagccaatcagtacacctttcatctcgaggctactgagaacccaggggctttgattaaagacattcgggagaatgggatgaagtcttgctctgtcacccaggctgaagtgcagtggcacagtcagggcccattgcaggttggccttgccatcaaaccaggaacctcagttgagtatttggcaccatgggctaatcagatagatatggccttggttatgacagtggaaccggggtttggagggcagaaattcatggaagatatgatgccaaaggttcactggttgaggacccagttcccatctttggatatagaggtcgatggtggagtaggtcctgacactgtccataaatgtgcagaggcaggagctaacatgattgtgtctggcagtgctattatgaggagtgaagaccccagatctgtgatcaatctattaagaaatgtttgctcagaagctgctcagaaacgttctcttgatcggtgaaaccataaggagcccagtgttcctgttcatgaaatctcccttttactggaaaacaggaatattgactaccaaatcacaatgcaattgaagccgtactgcttttttgagcagttattcattccagtgattaaaactgattgtgcagaatattctaagaggtcagaaattggtgtgtataactacatttttagtgatgcaatttattgattagtgagtaagatactgtttttattgagagatttgatttttataaagtaaaaatacggctgcattagggttacaaacagaaaagtgtcttaatgtctaaggagggcatattagctacactacaaaaacaaattttgtctgtacttctgaaaagaattttgttgtttctcagctgttttccaaaagcaaaggaagtctttatggtttttttctatttcatgttattgtgatttgtttataagtttgggtggggtgcataccatattcttggttcttaaaatctatcacttttcaccttacacttgatgtgtgaaaactataaaaacaatgtgtgaaacccaggggttctaaaatacaagcatagattttatcagggtgttttgtcaaagcaggttattcagtgattcctccccaccattcttaagaacgttaaataatgctgttgtgttagctctgagtagaaaggaaaaagtaaaacctctgtttggaggtaatattgggttgaattctgactgcccctttctagctggacctttaacaaatcacccaatcttttttgtgtttctctaaagtcatttatacattaaatgtaattatagcaactgtggggttctgttgagaattaagagctaacactatatatgtaaagtttccagtactagtcccagaatttagaatatgctcaacacaaagtaaacagcattatataagtttatatttttgtgagttataaagtactttgatatattctcattaaatctgtaaatcacctctataagtaagtggtaataataaagcagatatttttgtccccatttaaaaaatgaagaaattaatgcttaatagggtggtaccctggaaaggatctgggaagtggtagaatttctggtctgtacttttacaaatggagcccttgggaggtgggttaggtaaaagaagctttttacttaacgttgtcttatttccagtctaattttacgctgtagcagaaccagatggctgagaaaattctggaactatggatcttgaccccaaggatatattattttattccaagaaagatcaggtaggcgaaaagatgacaggatacagagtcaatccataaactaaatatttataactgttctgaattatacagagtctaaaaatatgtgtcagctacttcattcctgtaaatactcttgctgtgttataaatatggcaagaaataaacatgaccaatatcaatagacttcttgaggctactataagttttgagaaataaggttcaaaaaataagaatgctaacacttaagcacagactagagcttgcttgggtttcttcctgcattacaaggtaaaaatttgttaatgtttgtttttattcagcttgggaaagctttgtgccatgaatacgtcgcatttaataacaagcaacacacggcatatagaaataactttaattaaaaaacttacatagaagattataatatcagacgtgacaaagatttgagtttatttgcctggacaacttgggtttgtctggcttttgttttctttttctttaaaaataaatgtacagtaaaactacaagcaaaagtttgtcagtattgaattgaattttttaccccttaaaaggactagtataatttccaatctctaacaaaaacttagtgtcaaatctcacagataaggccaaatggccaatattttcagttatgtgggtagtacaacttgagtaaccttttttacatgacaaaaagtgagttatataaattgtcctcaactttcacataggaaaaaaatggtttaatagcttcaaaaggaattttctttcatgtatactcttcagtatccaatattgaagctttgttctttgaaaaattttaatttccaatctaggatgcaagcaagaatatatgtttatttgaatagagtaagctatggcaaagaatgaccaaattagctagaaatagaaatcagccagaattaactaatttcttgctaatctagaaatacaatcatcttttttttttttttcaaattttatactgatagggctttact

SEQ ID NO: 360050 - DNA, 3055 bp, Homo sapiens
acggagaaggggcggggccaaaactgcgcgcccaatcggggtgacgctctagccttgccggggactcgtgggtaacttgcttttgggagccagcggtatggcgtcgggctgcaagattggcccgtccatcctcaacagcgacctggccaatttaggggccgagtgcctccggatgctagactctggggccgattatctgcacctggacgtaatggacggacatgcacatgatggtgtccaagccagaacagtgggtaaagccaatggctgtagcaggagccaatcagtacacctttcatctcgaggctactgagaacccaggggctttgattaaagacattcgggagaatgggatgaaggttggccttgccatcaaaccaggaacctcagttgagtatttggcaccatgggctaatcagatagatatggccttggttatgacagtggaaccggggtttggagggcagaaattcatggaagatatgatgccaaaggttcactggttgaggacccagttcccatctttggatatagaggtcgatggtggagtaggtcctgacactgtccataaatgtgcagagattggagtgcagtggcgtgatctctgctcactgcaatctctgcctgccgggttcaagcgattctcctgcctcagcctcctgagtagctgggattacaggcaggagctaacatgattgtgtctggcagtgctattatgaggagtgaagaccccagatctgtgatcaatctattaagaaatgtttgctcagaagctgctcagaaacgttctcttgatcggtgaaaccataaggagcccagtgttcctgttcatgaaatctcccttttactggaaaacaggaatattgactaccaaatcacaatgcaattgaagccgtactgcttttttgagcagttattcattccagtgattaaaactgattgtgcagaatattctaagaggtcagaaattggtgtgtataactacatttttagtgatgcaatttattgattagtgagtaagatactgtttttattgagagatttgatttttataaagtaaaaatacggctgcattagggttacaaacagaaaagtgtcttaatgtctaaggagggcatattagctacactacaaaaacaaattttgtctgtacttctgaaaagaattttgttgtttctcagctgttttccaaaagcaaaggaagtctttatggtttttttctatttcatgttattgtgatttgtttataagtttgggtggggtgcataccatattcttggttcttaaaatctatcacttttcaccttacacttgatgtgtgaaaactataaaaacaatgtgtgaaacccaggggttctaaaatacaagcatagattttatcagggtgttttgtcaaagcaggttattcagtgattcctccccaccattcttaagaacgttaaataatgctgttgtgttagctctgagtagaaaggaaaaagtaaaacctctgtttggaggtaatattgggttgaattctgactgcccctttctagctggacctttaacaaatcacccaatcttttttgtgtttctctaaagtcatttatacattaaatgtaattatagcaactgtggggttctgttgagaattaagagctaacactatatatgtaaagtttccagtactagtcccagaatttagaatatgctcaacacaaagtaaacagcattatataagtttatatttttgtgagttataaagtactttgatatattctcattaaatctgtaaatcacctctataagtaagtggtaataataaagcagatatttttgtccccatttaaaaaatgaagaaattaatgcttaatagggtggtaccctggaaaggatctgggaagtggtagaatttctggtctgtacttttacaaatggagcccttgggaggtgggttaggtaaaagaagctttttacttaacgttgtcttatttccagtctaattttacgctgtagcagaaccagatggctgagaaaattctggaactatggatcttgaccccaaggatatattattttattccaagaaagatcaggtaggcgaaaagatgacaggatacagagtcaatccataaactaaatatttataactgttctgaattatacagagtctaaaaatatgtgtcagctacttcattcctgtaaatactcttgctgtgttataaatatggcaagaaataaacatgaccaatatcaatagacttcttgaggctactataagttttgagaaataaggttcaaaaaataagaatgctaacacttaagcacagactagagcttgcttgggtttcttcctgcattacaaggtaaaaatttgttaatgtttgtttttattcagcttgggaaagctttgtgccatgaatacgtcgcatttaataacaagcaacacacggcatatagaaataactttaattaaaaaacttacatagaagattataatatcagacgtgacaaagatttgagtttatttgcctggacaacttgggtttgtctggcttttgttttctttttctttaaaaataaatgtacagtaaaactacaagcaaaagtttgtcagtattgaattgaattttttaccccttaaaaggactagtataatttccaatctctaacaaaaacttagtgtcaaatctcacagataaggccaaatggccaatattttcagttatgtgggtagtacaacttgagtaaccttttttacatgacaaaaagtgagttatataaattgtcctcaactttcacataggaaaaaaatggtttaatagcttcaaaaggaattttctttcatgtatactcttcagtatccaatattgaagctttgttctttgaaaaattttaatttccaatctaggatgcaagcaagaatatatgtttatttgaatagagtaagctatggcaaagaatgaccaaattagctagaaatagaaatcagccagaattaactaatttcttgctaatctagaaatacaatcatcttttttttttttttcaaattttatactgatagggctttact

SEQ ID NO: 360051 - DNA, 2495 bp, Homo sapiens
aggaaggctgaagaaagttcttttttataaaagaatatgttgaatttcagccctttggaagatcattaagtttcacggccttggaagtgagaaatttttccaaaatacggaattaaaaggcaggagctaacatgattgtgtctggcagtgctattatgaggagtgaagaccccagatctgtgatcaatctattaagaaatgtttgctcagaagctgctcagaaacgttctcttgatcggtgaaaccataaggagcccagtgttcctgttcatgaaatctcccttttactggaaaacaggaatattgactaccaaatcacaatgcaattgaagccgtactgcttttttgagcagttattcattccagtgattaaaactgattgtgcagaatattctaagaggtcagaaattggtgtgtataactacatttttagtgatgcaatttattgattagtgagtaagatactgtttttattgagagatttgatttttataaagtaaaaatacggctgcattagggttacaaacagaaaagtgtcttaatgtctaaggagggcatattagctacactacaaaaacaaattttgtctgtacttctgaaaagaattttgttgtttctcagctgttttccaaaagcaaaggaagtctttatggtttttttctatttcatgttattgtgatttgtttataagtttgggtggggtgcataccatattcttggttcttaaaatctatcacttttcaccttacacttgatgtgtgaaaactataaaaacaatgtgtgaaacccaggggttctaaaatacaagcatagattttatcagggtgttttgtcaaagcaggttattcagtgattcctccccaccattcttaagaacgttaaataatgctgttgtgttagctctgagtagaaaggaaaaagtaaaacctctgtttggaggtaatattgggttgaattctgactgcccctttctagctggacctttaacaaatcacccaatcttttttgtgtttctctaaagtcatttatacattaaatgtaattatagcaactgtggggttctgttgagaattaagagctaacactatatatgtaaagtttccagtactagtcccagaatttagaatatgctcaacacaaagtaaacagcattatataagtttatatttttgtgagttataaagtactttgatatattctcattaaatctgtaaatcacctctataagtaagtggtaataataaagcagatatttttgtccccatttaaaaaatgaagaaattaatgcttaatagggtggtaccctggaaaggatctgggaagtggtagaatttctggtctgtacttttacaaatggagcccttgggaggtgggttaggtaaaagaagctttttacttaacgttgtcttatttccagtctaattttacgctgtagcagaaccagatggctgagaaaattctggaactatggatcttgaccccaaggatatattattttattccaagaaagatcaggtaggcgaaaagatgacaggatacagagtcaatccataaactaaatatttataactgttctgaattatacagagtctaaaaatatgtgtcagctacttcattcctgtaaatactcttgctgtgttataaatatggcaagaaataaacatgaccaatatcaatagacttcttgaggctactataagttttgagaaataaggttcaaaaaataagaatgctaacacttaagcacagactagagcttgcttgggtttcttcctgcattacaaggtaaaaatttgttaatgtttgtttttattcagcttgggaaagctttgtgccatgaatacgtcgcatttaataacaagcaacacacggcatatagaaataactttaattaaaaaacttacatagaagattataatatcagacgtgacaaagatttgagtttatttgcctggacaacttgggtttgtctggcttttgttttctttttctttaaaaataaatgtacagtaaaactacaagcaaaagtttgtcagtattgaattgaattttttaccccttaaaaggactagtataatttccaatctctaacaaaaacttagtgtcaaatctcacagataaggccaaatggccaatattttcagttatgtgggtagtacaacttgagtaaccttttttacatgacaaaaagtgagttatataaattgtcctcaactttcacataggaaaaaaatggtttaatagcttcaaaaggaattttctttcatgtatactcttcagtatccaatattgaagctttgttctttgaaaaattttaatttccaatctaggatgcaagcaagaatatatgtttatttgaatagagtaagctatggcaaagaatgaccaaattagctagaaatagaaatcagccagaattaactaatttcttgctaatctagaaatacaatcatcttttttttttttttcaaattttatactgatagggctttact

SEQ ID NO: 360052 - DNA, 2129 bp, Homo sapiens
acggagaaggggcggggccaaaactgcgcgcccaatcggggtgacgctctagccttgccggggactcgtgggtaacttgcttttgggagccagcggtatggcgtcgggctgcaagattggcccgtccatcctcaacagcgacctggccaatttaggggccgagtgcctccggatgctagactctggggccgattatctgcacctggacgtaatggacgggcattttgttcccaacatcacctttggtcaccctgtggtagaaagccttcgaaagcagctaggccaggaccctttctttgtcatgttattgtgatttgtttataagtttgggtggggtgcataccatattcttggttcttaaaatctatcacttttcaccttacacttgatgtgtgaaaactataaaaacaatgtgtgaaacccaggggttctaaaatacaagcatagattttatcagggtgttttgtcaaagcaggttattcagtgattcctccccaccattcttaagaacgttaaataatgctgttgtgttagctctgagtagaaaggaaaaagtaaaacctctgtttggaggtaatattgggttgaattctgactgcccctttctagctggacctttaacaaatcacccaatcttttttgtgtttctctaaagtcatttatacattaaatgtaattatagcaactgtggggttctgttgagaattaagagctaacactatatatgtaaagtttccagtactagtcccagaatttagaatatgctcaacacaaagtaaacagcattatataagtttatatttttgtgagttataaagtactttgatatattctcattaaatctgtaaatcacctctataagtaagtggtaataataaagcagatatttttgtccccatttaaaaaatgaagaaattaatgcttaatagggtggtaccctggaaaggatctgggaagtggtagaatttctggtctgtacttttacaaatggagcccttgggaggtgggttaggtaaaagaagctttttacttaacgttgtcttatttccagtctaattttacgctgtagcagaaccagatggctgagaaaattctggaactatggatcttgaccccaaggatatattattttattccaagaaagatcaggtaggcgaaaagatgacaggatacagagtcaatccataaactaaatatttataactgttctgaattatacagagtctaaaaatatgtgtcagctacttcattcctgtaaatactcttgctgtgttataaatatggcaagaaataaacatgaccaatatcaatagacttcttgaggctactataagttttgagaaataaggttcaaaaaataagaatgctaacacttaagcacagactagagcttgcttgggtttcttcctgcattacaaggtaaaaatttgttaatgtttgtttttattcagcttgggaaagctttgtgccatgaatacgtcgcatttaataacaagcaacacacggcatatagaaataactttaattaaaaaacttacatagaagattataatatcagacgtgacaaagatttgagtttatttgcctggacaacttgggtttgtctggcttttgttttctttttctttaaaaataaatgtacagtaaaactacaagcaaaagtttgtcagtattgaattgaattttttaccccttaaaaggactagtataatttccaatctctaacaaaaacttagtgtcaaatctcacagataaggccaaatggccaatattttcagttatgtgggtagtacaacttgagtaaccttttttacatgacaaaaagtgagttatataaattgtcctcaactttcacataggaaaaaaatggtttaatagcttcaaaaggaattttctttcatgtatactcttcagtatccaatattgaagctttgttctttgaaaaattttaatttccaatctaggatgcaagcaagaatatatgtttatttgaatagagtaagctatggcaaagaatgaccaaattagctagaaatagaaatcagccagaattaactaatttcttgctaatctagaaatacaatcatcttttttttttttttcaaattttatactgatagggctttact

SEQ ID NO: 360053 - DNA, 1288 bp, Homo sapiens
acggagaaggggcggggccaaaactgcgcgcccaatcggggtgacgctctagccttgccggggactcgtgggtaacttgcttttgggagccagcggtatggcgtcgggctgcaagattggcccgtccatcctcaacagcgacctggccaatttaggggccgagtgcctccggatgctagactctggggccgattatctgcacctggacgtaatggacgggcattttgttcccaacatcacctttggtcaccctgtggtagaaagccttcgaaagcagctaggccaggaccctttctttgacatgcacatgatggtgtccaagccagaacagtgggtaaagccaatggctgtagcaggagccaatcagtacacctttcatctcgaggctactgagaacccaggggctttgattaaagacattcgggagaatgggatgaaggttggccttgccatcaaaccaggaacctcagttgagtatttggcaccatgggctaatcagatagatatggccttggttatgacagtggaaccggggtttggagggcagaaattcatggaagatatgatgccaaaggttcactggttgaggacccagttcccatctttggatatagaggtcgatggtggagtaggtcctgacactgtccataaatgtgcagagtgtgatgtatctacttccaggttcttgtataactgccacacgtttctgcttgatatatacctatcaaaagcttgacagtagtaaatacttatgcaggaggggctggccagatgatgagtgagctcatatccttttgatcgcttgtggaattgctttgtactaaactgtgctttgccagtatactattcctgcttttatgccagaggtagcaaattttttgtgtgaaaaatcagaccttggcgatgaccttaaacagcaggatatgaagaactcccacaagcttagcgttccaataatggaacactaggcataaatgggttaactgaagagaatatttgcagtgttaaccctataaaactcacctttataatttctgtgaggaatattgttagaaatgttgtcatacatgaagtgacactatctgtctggaaaaattttcctcagcctgtggttctcccacttctccctctttgttctagcaatgaatcacaaaacagattgggtttccatccttgaatcagatcctaggaagatcagagttaaatttggacccaattttttagcttttctttttcaatttctttgcttccatatttaaatgtatcttaaaaacttttttaaagccac

SEQ ID NO: 360054 - DNA, 1033 bp, Homo sapiens
aggaaggctgaagaaagttcttttttataaaagaatatgttgaatttcagccctttggaagatcattaagtttcacggccttggaagtgagaaatttttccaaaatacggaattaaaaggtactaccaaggggggaaaatagataaatctaattgacctaattattacattattctttagaacctacatattatttagttgttccttgtaagaacttgctagaaccatttttgatgaaaatctaggcctgatacctctttggctatctgtatagaagtaaaaacttttttttacttttttttttttttcagatagctagtctagcatagtcaggctcctgaggatgccagcccttctggtagcactgcaagtgattaaagcttacatgactgcttttcttccacagtgtgatgtatctacttccaggttcttgtataactgccacacgtttctgcttgatatatacctatcaaaagcttgacagtagtaaatacttatgcaggaggggctggccagatgatgagtgagctcatatccttttgatcgcttgtggaattgctttgtactaaactgtgctttgccagtatactattcctgcttttatgccagaggtagcaaattttttgtgtgaaaaatcagaccttggcgatgaccttaaacagcaggatatgaagaactcccacaagcttagcgttccaataatggaacactaggcataaatgggttaactgaagagaatatttgcagtgttaaccctataaaactcacctttataatttctgtgaggaatattgttagaaatgttgtcatacatgaagtgacactatctgtctggaaaaattttcctcagcctgtggttctcccacttctccctctttgttctagcaatgaatcacaaaacagattgggtttccatccttgaatcagatcctaggaagatcagagttaaatttggacccaattttttagcttttctttttcaatttctttgcttccatatttaaatgtatcttaaaaacttttttaaagccac

SEQ ID NO: 360055 - DNA, 509 bp, Homo sapiens
ctggacctagatttcctgatttttagatgttaactttttatatacagcactgtatgctttttgtgggaaaatagtgttttttgtaaatgaatttaaataaatccttgtcttcaaaataagaggaaactacctatactgaattagaactatttaaataatgatttgtgtgatggccaaagagttcttatcagaagtggcaaaaactacatacaggttggcttccaataacatgagccaggtatttttcagtaatattttgaagtgtcttttctttctagacatgcacatgatggtgtccaagccagaacagtgggtaaagccaatggctgtagcaggagccaatcagtacacctttcatctcgaggctactgagaacccaggggctttgattaaagacattcgggagaatgggatgaaggtaagaaatcgtgatgagagtgttttgtaacattcactctcagttgggaagatttgcgggaaacaggaaattttctctttttttgatacag

SEQ ID NO: 360056 - DNA, 2559 bp, Homo sapiens
acggagaaggggcggggccaaaactgcgcgcccaatcggggtgacgctctagccttgccggggactcgtgggtaacttgcttttgggagccagcggtatggcgtcgggctgcaagattggcccgtccatcctcaacagcgacctggccaatttaggggccgagtgcctccggatgctagactctggggccgattatctgcacctggacgtaatggacgggcattttgttcccaacatcacctttggtcaccctgtggtagaaagccttcgaaagcagctaggccaggaccctttctttgacatgcacatgatggtgtccaagccagaacagtgggtaaagccaatggctgtagcaggagccaatcagtacacctttcatctcgaggctactgagaacccaggggctttgattaaagacattcgggagaatgggatgaaggttggccttgccatcaaaccaggaacctcagttgagtatttggcaccatgggctaatcagatagatatggccttggttatgacagtggaaccggggtttggagggcagaaattcatggaagatatgatgccaaaggttcactggttgaggacccagttcccatctttggatatagaggtcgatggtggagtaggtcctgacactgtccataaatgtgcagaggcaggagctaacatgattgtgtctggcagtgctattatgaggagtgaagaccccagatctgtgatcaatctattaagaaatgtttgctcagaagctgctcagaaacgttctcttgatcggtgaaaccataaggagcccagtgttcctgttcatgaaatctcccttttactggaaaacaggaatattgactaccaaatcacaatgcaattgaagccgtactgcttttttgagcagttattcattccagtgattaaaactgattgtgcagaatattctaagaggtcagaaattggtgtgtataactacatttttagtgatgcaatttattgattagtgagtaagatactgtttttattgagagatttgatttttataaagtaaaaatacggctgcattagggttacaaacagaaaagtgtcttaatgtctaaggagggcatattagctacactacaaaaacaaattttgtctgtacttctgaaaagaattttgttgtttctcagctgttttccaaaagcaaaggaagtctttatggtttttttctatttcatgttattgtgatttgtttataagtttgggtggggtgcataccatattcttggttcttaaaatctatcacttttcaccttacacttgatgtgtgaaaactataaaaacaatgtgtgaaacccaggggttctaaaatacaagcatagattttatcagggtgttttgtcaaagcaggttattcagtgattcctccccaccattcttaagaacgttaaataatgctgttgtgttagctctgagtagaaaggaaaaagtaaaacctctgtttggaggtaatattgggttgaattctgactgcccctttctagctggacctttaacaaatcacccaatcttttttgtgtttctctaaagtcatttatacattaaatgtaattatagcaactgtggggttctgttgagaattaagagctaacactatatatgtaaagtttccagtactagtcccagaatttagaatatgctcaacacaaagtaaacagcattatataagtttatatttttgtgagttataaagtactttgatatattctcattaaatctgtaaatcacctctataagtaagtggtaataataaagcagatatttttgtccccatttaaaaaatgaagaaattaatgcttaatagggtggtaccctggaaaggatctgggaagtggtagaatttctggtctgtacttttacaaatggagcccttgggaggtgggttaggtaaaagaagctttttacttaacgttgtcttatttccagtctaattttacgctgtagcagaaccagatggctgagaaaattctggaactatggatcttgaccccaaggatatattattttattccaagaaagatcaggtaggcgaaaagatgacaggatacagagtcaatccataaactaaatatttataactgttctgaattatacagagtctaaaaatatgtgtcagctacttcattcctgtaaatactcttgctgtgttataaatatggcaagaaataaacatgaccaatatcaatagacttcttgaggctactataagttttgagaaataaggttcaaaaaataagaatgctaacacttaagcacagactagagcttgcttgggtttcttcctgcattacaaggtaaaaatttgttaatgtttgtttttattcagcttgggaaagctttgtgccatgaatacgtcgcatttaataacaagcaacacacggcatatagaaataactttaattaaaaaacttacatagaagattataatatcagacgtgacaaagatttgagtttatttgcctggacaacttgggtttgtctggcttttgttttctttttctttaaaaataaatgtacagtaaaact

SEQ ID NO: 360057 - DNA, 1007 bp, Homo sapiens
acggagaaggggcggggccaaaactgcgcgcccaatcggggtgacgctctagccttgccggggactcgtgggtaacttgcttttgggagccagcggtatggcgtcgggctgcaagattggcccgtccatcctcaacagcgacctggccaatttaggggccgagtgcctccggatgctagactctggggccgattatctgcacctggacgtaatggacgggcattttgttcccaacatcacctttggtcaccctgtggtagaaagccttcgaaagcagctaggccaggaccctttctttgacatgcacatgatggtgtccaagccagaacagtgggtaaagccaatggctgtagcaggagccaatcagtacacctttcatctcgaggctactgagaacccaggggctttgattaaagacattcgggagaatgggatgaagtcttgctctgtcacccaggctgaagtgcagtggcacagtcagggcccattgcaggttggccttgccatcaaaccaggaacctcagttgagtatttggcaccatgggctaatcagatagatatggccttggttatgacagtggaaccggggtttggagggcagaaattcatggaagatatgatgccaaaggttcactggttgaggacccagttcccatctttggatatagaggtcgatggtggagtaggtcctgacactgtccataaatgtgcagaggcaggagctaacatgattgtgtctggcagtgctattatgaggagtgaagaccccagatctgtgatcaatctattaagaaatgtttgctcagaagctgctcagaaacgttctcttgatcggtgaaaccataaggagcccagtgttcctgttcatgaaatctcccttttactggaaaacaggaatattgactaccaaatcacaatgcaattgaagccgtactgcttttttgagcagttattcattccagtgattaaaactgattgtgcagaatattctaagaggtcagaaattg

SEQ ID NO: 360058 - DNA, 3037 bp, Homo sapiens
acggagaaggggcggggccaaaactgcgcgcccaatcggggtgacgctctagccttgccggggactcgtgggtaacttgcttttgggagccagcggtatggcgtcgggctgcaagattggcccgtccatcctcaacagcgacctggccaatttaggggccgagtgcctccggatgctagactctggggccgattatctgcacctggacgtaatggacgggcattttgttcccaacatcacctttggtcaccctgtggtagaaagccttcgaaagcagctaggccaggaccctttctttgacatgcacatgatggtgtccaagccagaacagtgggtaaagccaatggctgtagcaggagccaatcagtacacctttcatctcgaggctactgagaacccaggggctttgattaaagacattcgggagaatgggatgaaggttggccttgccatcaaaccaggaacctcagttgagtatttggcaccatgggctaatcagatagatatggccttggttatgacagtggaaccggggtttggagggcagaaattcatggaagatatgatgccaaaggttcactggttgaggacccagttcccatctttggatatagaggtcgatggtggagtaggtcctgacactgtccataaatgtgcagaggcaggagctaacatgattgtgtctggcagtgctattatgaggagtgaagaccccagatctgtgatcaatctattaagaaatgtttgctcagaagctgctcagaaacgttctcttgatcggtgaaaccataaggagcccagtgttcctgttcatgaaatctcccttttactggaaaacaggaatattgactaccaaatcacaatgcaattgaagccgtactgcttttttgagcagttattcattccagtgattaaaactgattgtgcagaatattctaagaggtcagaaattggtgtgtataactacatttttagtgatgcaatttattgattagtgagtaagatactgtttttattgagagatttgatttttataaagtaaaaatacggctgcattagggttacaaacagaaaagtgtcttaatgtctaaggagggcatattagctacactacaaaaacaaattttgtctgtacttctgaaaagaattttgttgtttctcagctgttttccaaaagcaaaggaagtctttatggtttttttctatttcatgttattgtgatttgtttataagtttgggtggggtgcataccatattcttggttcttaaaatctatcacttttcaccttacacttgatgtgtgaaaactataaaaacaatgtgtgaaacccaggggttctaaaatacaagcatagattttatcagggtgttttgtcaaagcaggttattcagtgattcctccccaccattcttaagaacgttaaataatgctgttgtgttagctctgagtagaaaggaaaaagtaaaacctctgtttggaggtaatattgggttgaattctgactgcccctttctagctggacctttaacaaatcacccaatcttttttgtgtttctctaaagtcatttatacattaaatgtaattatagcaactgtggggttctgttgagaattaagagctaacactatatatgtaaagtttccagtactagtcccagaatttagaatatgctcaacacaaagtaaacagcattatataagtttatatttttgtgagttataaagtactttgatatattctcattaaatctgtaaatcacctctataagtaagtggtaataataaagcagatatttttgtccccatttaaaaaatgaagaaattaatgcttaatagggtggtaccctggaaaggatctgggaagtggtagaatttctggtctgtacttttacaaatggagcccttgggaggtgggttaggtaaaagaagctttttacttaacgttgtcttatttccagtctaattttacgctgtagcagaaccagatggctgagaaaattctggaactatggatcttgaccccaaggatatattattttattccaagaaagatcaggtaggcgaaaagatgacaggatacagagtcaatccataaactaaatatttataactgttctgaattatacagagtctaaaaatatgtgtcagctacttcattcctgtaaatactcttgctgtgttataaatatggcaagaaataaacatgaccaatatcaatagacttcttgaggctactataagttttgagaaataaggttcaaaaaataagaatgctaacacttaagcacagactagagcttgcttgggtttcttcctgcattacaaggtaaaaatttgttaatgtttgtttttattcagcttgggaaagctttgtgccatgaatacgtcgcatttaataacaagcaacacacggcatatagaaataactttaattaaaaaacttacatagaagattataatatcagacgtgacaaagatttgagtttatttgcctggacaacttgggtttgtctggcttttgttttctttttctttaaaaataaatgtacagtaaaactacaagcaaaagtttgtcagtattgaattgaattttttaccccttaaaaggactagtataatttccaatctctaacaaaaacttagtgtcaaatctcacagataaggccaaatggccaatattttcagttatgtgggtagtacaacttgagtaaccttttttacatgacaaaaagtgagttatataaattgtcctcaactttcacataggaaaaaaatggtttaatagcttcaaaaggaattttctttcatgtatactcttcagtatccaatattgaagctttgttctttgaaaaattttaatttccaatctaggatgcaagcaagaatatatgtttatttgaatagagtaagctatggcaaagaatgaccaaattagctagaaatagaaatcagccagaattaactaatttcttgctaatctagaaatacaatcatcttttttttttttttcaaattttatactgatagggctttact

SEQ ID NO: 360059 - DNA, 2981 bp, Homo sapiens
acggagaaggggcggggccaaaactgcgcgcccaatcggggtgacgctctagccttgccggggactcgtgggtaacttgcttttgggagccagcggtatggcgtcgggctgcaagattggcccgtccatcctcaacagcgacctggccaatttaggggccgagtgcctccggatgctagactctggggccgattatctgcacctggacgtaatggacgggcattttgttcccaacatcacctttggtcaccctgtggtagaaagccttcgaaagcagctaggccaggaccctttctttgacatgcacatgatggtgtccaagccagaacagtgggtaaagccaatggctgtagcaggagccaatcagtacacctttcatctcgaggctactgagaacccaggggctttgattaaagacattcgggagaatgggatgaaggttggccttgccatcaaaccaggaacctcagttgagtatttggcaccatgggctaatcagatagatatggccttggttatgacagtggaaccggggtttggagggcagaaattcatggaagatatgatgccaaaggttcactggttgaggacccagttcccatctttggatatagaggtcgatggtggagtaggtcctgacactgtccataaatgtgcagaggcaggagctaacatgattgtgtctggcagtgctattatgaggagtgaagaccccagatctgtgatcaatctattaagaaatgtttgctcagaagctgctcagaaacgttctcttgatcggtgaaaccataaggagcccagtgttcctgttcatgaaatctcccttttactggaaaacaggaatattgactaccaaatcacaatgcaattgaagccgtactgcttttttgagcagttattcattccagtgattaaaactgattgtgcagaatattctaagaggtcagaaattggtgtgtataactacatttttagtgatgcaatttattgattagtgagtaagatactgtttttattgagagatttgatttttataaagtaaaaatacggctgcattagggttacaaacagaaaagtgtcttaatgtctaaggagggcatattagctacactacaaaaacaaattttgtctgtacttctgaaaagaattttgttgtttctcagctgttttccaaaagcaaaggaagtctttatggtttttttctatttcatgttattgtgatttgtttataagtttgggtggggtgcataccatattcttggttcttaaaatctatcacttttcaccttacacttgatgtgtgaaaactataaaaacaatgtgtgaaacccaggggttctaaaatacaagcatagattttatcagggtgttttgtcaaagcaggttattcagtgattcctccccaccattcttaagaacgttaaataatgctgttgtgttagctctgagtagaaaggaaaaagggacctttaacaaatcacccaatcttttttgtgtttctctaaagtcatttatacattaaatgtaattatagcaactgtggggttctgttgagaattaagagctaacactatatatgtaaagtttccagtactagtcccagaatttagaatatgctcaacacaaagtaaacagcattatataagtttatatttttgtgagttataaagtactttgatatattctcattaaatctgtaaatcacctctataagtaagtggtaataataaagcagatatttttgtccccatttaaaaaatgaagaaattaatgcttaatagggtggtaccctggaaaggatctgggaagtggtagaatttctggtctgtacttttacaaatggagcccttgggaggtgggttaggtaaaagaagctttttacttaacgttgtcttatttccagtctaattttacgctgtagcagaaccagatggctgagaaaattctggaactatggatcttgaccccaaggatatattattttattccaagaaagatcaggtaggcgaaaagatgacaggatacagagtcaatccataaactaaatatttataactgttctgaattatacagagtctaaaaatatgtgtcagctacttcattcctgtaaatactcttgctgtgttataaatatggcaagaaataaacatgaccaatatcaatagacttcttgaggctactataagttttgagaaataaggttcaaaaaataagaatgctaacacttaagcacagactagagcttgcttgggtttcttcctgcattacaaggtaaaaatttgttaatgtttgtttttattcagcttgggaaagctttgtgccatgaatacgtcgcatttaataacaagcaacacacggcatatagaaataactttaattaaaaaacttacatagaagattataatatcagacgtgacaaagatttgagtttatttgcctggacaacttgggtttgtctggcttttgttttctttttctttaaaaataaatgtacagtaaaactacaagcaaaagtttgtcagtattgaattgaattttttaccccttaaaaggactagtataatttccaatctctaacaaaaacttagtgtcaaatctcacagataaggccaaatggccaatattttcagttatgtgggtagtacaacttgagtaaccttttttacatgacaaaaagtgagttatataaattgtcctcaactttcacataggaaaaaaatggtttaatagcttcaaaaggaattttctttcatgtatactcttcagtatccaatattgaagctttgttctttgaaaaattttaatttccaatctaggatgcaagcaagaatatatgtttatttgaatagagtaagctatggcaaagaatgaccaaattagctagaaatagaaatcagccagaattaactaatttcttgctaatctagaaatacaatcatcttttttttttttttcaaattttatactgatagggctttact

SEQ ID NO: 360060 - DNA, 2916 bp, Homo sapiens
acggagaaggggcggggccaaaactgcgcgcccaatcggggtgacgctctagccttgccggggactcgtgggtaacttgcttttgggagccagcggtatggcgtcgggctgcaagattggcccgtccatcctcaacagcgacctggccaatttaggggccgagtgcctccggatgctagactctggggccgattatctgcacctggacgtaatggacgggcattttgttcccaacatcacctttggtcaccctgtggtagaaagccttcgaaagcagctaggccaggaccctttctttgacatgcacatgatggtgtccaagccagaacagtgggtaaagccaatggctgtagcaggagccaatcagtacacctttcatctcgaggctactgagaacccaggggctttgattaaagacattcgggagaatgggatgaaggttggccttgccatcaaaccaggaacctcagttgagtatttggcaccatgggctaatcagatagatatggccttggttatgacagtggaaccggggtttggagggcagaaattcatggaagatatgatgccaaaggttcactggttgaggacccagttcccatctttggatatagaggtcgatggtggagtaggtcctgacactgtccataaatgtgcagaggcaggagctaacatgattgtgtctggcagtgctattatgaggagtgaagaccccagatctgtgatcaatctattaagaaatgtttgctcagaagctgctcagaaacgttctcttgatcggtgaaaccataaggagcccagtgttcctgttcatgaaatctcccttttactggaaaacaggaatattgactaccaaatcacaatgcaattgaagccgtactgcttttttgagcagttattcattccagtgattaaaactgattgtgcagaatattctaagaggtcagaaattggtgtgtataactacatttttagtgatgcaatttattgattagtgagtaagatactgtttttattgagagatttgatttttataaagtaaaaatacggctgcattagggttacaaacagaaaagtgtcttaatgtctaaggagggcatattagctacactacaaaaacaaattttgtctgtacttctgaaaagaattttgttgtttctcagctgttttccaaaagcaaaggaagtctttatggtttttttctatttcatgttattgtgatttgtttataagtttgggtggggtgcataccatattcttggttcttaaaatctatcacttttcaccttacacttgatgtgtgaaaactataaaaacaatgtgtgaaacccaggggttctaaaatacaagcatagattttatcagggtgttttgtcaaagcaggttattcagtgattcctccccaccattcttaagaacgttaaataatgctgttgtgttagctctgagtagaaaggaaaaagtaaaacctctgtttggaggtaatattgggttgaattctgactgcccctttctagctggacctttaacaaatcacccaatcttttttgtgtttctctaaagtcatttatacattaaatgtaattatagcaactgtggggttctgttgagaattaagagctaacactatatatgtaaagtttccagtactagtcccagaatttagaatatgctcaacacaaagtaaacagcattatataagtttatatttttgtgagttataaagtactttgatatattctcattaaatctgtaaatcacctctataagtaagtggtaataataaagcagatatttttgtccccatttaaaaaatgaagaaattaatgcttaatagggtggtaccctggaaaggatctgggaagtggtagaatttctggtctgtacttttacaaatggagcccttgggaggtgggttaggtaaaagaagctttttacttaacgttgtcttatttccagtctaattttacgctgtagcagaaccagatggctgagaaaattctggaactatggatcttgaccccaaggatatattattttattccaagaaagatcagttgtgcagaagattctgaccttatttgaggcttacatataggtttggagatgtggaaaggagtggaaaaagaaatatgtaagctgaagtgccaaactcacactgaaataaagggcatggcctaccagctgacaaggagtgtctggtttcaagatggcaaatgaccctaaacatgatagacaaatatgttttacataggtacatgcacagataggcacatataaatccacatttgcaagcaaaaagtggaacctgtaaagcagaatttctgaggaatctctaaaagactaatactatatggaatttgaagaggaaacccagagcagaagcacatagtgaagtactgccacaaagatgtgtgacgccactaaaggtgctctagacccacaagaaaggaaaactgggagcaggacaactatctggatattgactgcacatgccaatatctcagtcagactaacagaatcagagctttaggcagagaaatgaatggttggagagagaaggcaatgcccaggtgccctgctttgaaatgtcccgcccatccccaaattagtctgaaaatttcaaatgttgtataaattcccttcccatcaaaagtgtcccataaacagcagtggtagaagagttttaactgagtatcacagcttcaatgatgagtatagaaaactccaaaaatctgaataccaacacaatcaaaaaagaggtacaaaccacaagtggaagaaccatctcaagaaataatgaagcattcatggaatacagattagcaactctttaaaacagtattgccaagagaaacaggtaagaggccctctggagaaatgtcagaaatagaaaatgtaattgttcaaatgtta

SEQ ID NO: 360061 - DNA, 3055 bp, Homo sapiens
acggagaaggggcggggccaaaactgcgcgcccaatcggggtgacgctctagccttgccggggactcgtgggtaacttgcttttgggagccagcggtatggcgtcgggctgcaagattggcccgtccatcctcaacagcgacctggccaatttaggggccgagtgcctccggatgctagactctggggccgattatctgcacctggacgtaatggacggattttgtttgtcttgtaggcattttgttcccaacatcacctttggtcaccctgtggtagaaagccttcgaaagcagctaggccaggaccctttctttgacatgcacatgatggtgtccaagccagaacagtgggtaaagccaatggctgtagcaggagccaatcagtacacctttcatctcgaggctactgagaacccaggggctttgattaaagacattcgggagaatgggatgaaggttggccttgccatcaaaccaggaacctcagttgagtatttggcaccatgggctaatcagatagatatggccttggttatgacagtggaaccggggtttggagggcagaaattcatggaagatatgatgccaaaggttcactggttgaggacccagttcccatctttggatatagaggtcgatggtggagtaggtcctgacactgtccataaatgtgcagaggcaggagctaacatgattgtgtctggcagtgctattatgaggagtgaagaccccagatctgtgatcaatctattaagaaatgtttgctcagaagctgctcagaaacgttctcttgatcggtgaaaccataaggagcccagtgttcctgttcatgaaatctcccttttactggaaaacaggaatattgactaccaaatcacaatgcaattgaagccgtactgcttttttgagcagttattcattccagtgattaaaactgattgtgcagaatattctaagaggtcagaaattggtgtgtataactacatttttagtgatgcaatttattgattagtgagtaagatactgtttttattgagagatttgatttttataaagtaaaaatacggctgcattagggttacaaacagaaaagtgtcttaatgtctaaggagggcatattagctacactacaaaaacaaattttgtctgtacttctgaaaagaattttgttgtttctcagctgttttccaaaagcaaaggaagtctttatggtttttttctatttcatgttattgtgatttgtttataagtttgggtggggtgcataccatattcttggttcttaaaatctatcacttttcaccttacacttgatgtgtgaaaactataaaaacaatgtgtgaaacccaggggttctaaaatacaagcatagattttatcagggtgttttgtcaaagcaggttattcagtgattcctccccaccattcttaagaacgttaaataatgctgttgtgttagctctgagtagaaaggaaaaagtaaaacctctgtttggaggtaatattgggttgaattctgactgcccctttctagctggacctttaacaaatcacccaatcttttttgtgtttctctaaagtcatttatacattaaatgtaattatagcaactgtggggttctgttgagaattaagagctaacactatatatgtaaagtttccagtactagtcccagaatttagaatatgctcaacacaaagtaaacagcattatataagtttatatttttgtgagttataaagtactttgatatattctcattaaatctgtaaatcacctctataagtaagtggtaataataaagcagatatttttgtccccatttaaaaaatgaagaaattaatgcttaatagggtggtaccctggaaaggatctgggaagtggtagaatttctggtctgtacttttacaaatggagcccttgggaggtgggttaggtaaaagaagctttttacttaacgttgtcttatttccagtctaattttacgctgtagcagaaccagatggctgagaaaattctggaactatggatcttgaccccaaggatatattattttattccaagaaagatcaggtaggcgaaaagatgacaggatacagagtcaatccataaactaaatatttataactgttctgaattatacagagtctaaaaatatgtgtcagctacttcattcctgtaaatactcttgctgtgttataaatatggcaagaaataaacatgaccaatatcaatagacttcttgaggctactataagttttgagaaataaggttcaaaaaataagaatgctaacacttaagcacagactagagcttgcttgggtttcttcctgcattacaaggtaaaaatttgttaatgtttgtttttattcagcttgggaaagctttgtgccatgaatacgtcgcatttaataacaagcaacacacggcatatagaaataactttaattaaaaaacttacatagaagattataatatcagacgtgacaaagatttgagtttatttgcctggacaacttgggtttgtctggcttttgttttctttttctttaaaaataaatgtacagtaaaactacaagcaaaagtttgtcagtattgaattgaattttttaccccttaaaaggactagtataatttccaatctctaacaaaaacttagtgtcaaatctcacagataaggccaaatggccaatattttcagttatgtgggtagtacaacttgagtaaccttttttacatgacaaaaagtgagttatataaattgtcctcaactttcacataggaaaaaaatggtttaatagcttcaaaaggaattttctttcatgtatactcttcagtatccaatattgaagctttgttctttgaaaaattttaatttccaatctaggatgcaagcaagaatatatgtttatttgaatagagtaagctatggcaaagaatgaccaaattagctagaaatagaaatcagccagaattaactaatttcttgctaatctagaaatacaatcatcttttttttttttttcaaattttatactgatagggctttact

SEQ ID NO: 360062 - DNA, 3068 bp, Homo sapiens
acggagaaggggcggggccaaaactgcgcgcccaatcggggtgacgctctagccttgccggggactcgtgggtaacttgcttttgggagccagcggtatggcgtcgggctgcaagattggcccgtccatcctcaacagcgacctggccaatttaggggccgagtgcctccggatgctagactctggggccgattatctgcacctggacgtaatggacgggcattttgttcccaacatcacctttggtcaccctgtggtagaaagccttcgaaagcagctaggccaggaccctttctttgacatgcacatgatggtgtccaagccagaacagtgggtaaagccaatggctgtagcaggagccaatcagtacacctttcatctcgaggctactgagaacccaggggctttgattaaagacattcgggagaatgggatgaaggttggccttgccatcaaaccaggaacctcagttgagtatttggcaccatgggctaatcagatagatatggccttggttatgacagtggaaccggggtttggagggcagaaattcatggaagatatgatgccaaaggagttacttatttcctcatgtatatatctaggttcactggttgaggacccagttcccatctttggatatagaggtcgatggtggagtaggtcctgacactgtccataaatgtgcagaggcaggagctaacatgattgtgtctggcagtgctattatgaggagtgaagaccccagatctgtgatcaatctattaagaaatgtttgctcagaagctgctcagaaacgttctcttgatcggtgaaaccataaggagcccagtgttcctgttcatgaaatctcccttttactggaaaacaggaatattgactaccaaatcacaatgcaattgaagccgtactgcttttttgagcagttattcattccagtgattaaaactgattgtgcagaatattctaagaggtcagaaattggtgtgtataactacatttttagtgatgcaatttattgattagtgagtaagatactgtttttattgagagatttgatttttataaagtaaaaatacggctgcattagggttacaaacagaaaagtgtcttaatgtctaaggagggcatattagctacactacaaaaacaaattttgtctgtacttctgaaaagaattttgttgtttctcagctgttttccaaaagcaaaggaagtctttatggtttttttctatttcatgttattgtgatttgtttataagtttgggtggggtgcataccatattcttggttcttaaaatctatcacttttcaccttacacttgatgtgtgaaaactataaaaacaatgtgtgaaacccaggggttctaaaatacaagcatagattttatcagggtgttttgtcaaagcaggttattcagtgattcctccccaccattcttaagaacgttaaataatgctgttgtgttagctctgagtagaaaggaaaaagtaaaacctctgtttggaggtaatattgggttgaattctgactgcccctttctagctggacctttaacaaatcacccaatcttttttgtgtttctctaaagtcatttatacattaaatgtaattatagcaactgtggggttctgttgagaattaagagctaacactatatatgtaaagtttccagtactagtcccagaatttagaatatgctcaacacaaagtaaacagcattatataagtttatatttttgtgagttataaagtactttgatatattctcattaaatctgtaaatcacctctataagtaagtggtaataataaagcagatatttttgtccccatttaaaaaatgaagaaattaatgcttaatagggtggtaccctggaaaggatctgggaagtggtagaatttctggtctgtacttttacaaatggagcccttgggaggtgggttaggtaaaagaagctttttacttaacgttgtcttatttccagtctaattttacgctgtagcagaaccagatggctgagaaaattctggaactatggatcttgaccccaaggatatattattttattccaagaaagatcaggtaggcgaaaagatgacaggatacagagtcaatccataaactaaatatttataactgttctgaattatacagagtctaaaaatatgtgtcagctacttcattcctgtaaatactcttgctgtgttataaatatggcaagaaataaacatgaccaatatcaatagacttcttgaggctactataagttttgagaaataaggttcaaaaaataagaatgctaacacttaagcacagactagagcttgcttgggtttcttcctgcattacaaggtaaaaatttgttaatgtttgtttttattcagcttgggaaagctttgtgccatgaatacgtcgcatttaataacaagcaacacacggcatatagaaataactttaattaaaaaacttacatagaagattataatatcagacgtgacaaagatttgagtttatttgcctggacaacttgggtttgtctggcttttgttttctttttctttaaaaataaatgtacagtaaaactacaagcaaaagtttgtcagtattgaattgaattttttaccccttaaaaggactagtataatttccaatctctaacaaaaacttagtgtcaaatctcacagataaggccaaatggccaatattttcagttatgtgggtagtacaacttgagtaaccttttttacatgacaaaaagtgagttatataaattgtcctcaactttcacataggaaaaaaatggtttaatagcttcaaaaggaattttctttcatgtatactcttcagtatccaatattgaagctttgttctttgaaaaattttaatttccaatctaggatgcaagcaagaatatatgtttatttgaatagagtaagctatggcaaagaatgaccaaattagctagaaatagaaatcagccagaattaactaatttcttgctaatctagaaatacaatcatcttttttttttttttcaaattttatactgatagggctttact

SEQ ID NO: 360063 - DNA, 3011 bp, Homo sapiens
acggagaaggggcggggccaaaactgcgcgcccaatcggggtgacgctctagccttgccggggactcgtgggtaacttgcttttgggagccagcggtatggcgtcgggctgcaagattggcccgtccatcctcaacagcgacctggccaatttaggggccgagtgcctccggatgctagactctggggccgattatctgcacctggacgtaatggacggacatgcacatgatggtgtccaagccagaacagtgggtaaagccaatggctgtagcaggagccaatcagtacacctttcatctcgaggctactgagaacccaggggctttgattaaagacattcgggagaatgggatgaagtcttgctctgtcacccaggctgaagtgcagtggcacagtcagggcccattgcaggttggccttgccatcaaaccaggaacctcagttgagtatttggcaccatgggctaatcagatagatatggccttggttatgacagtggaaccggggtttggagggcagaaattcatggaagatatgatgccaaaggttcactggttgaggacccagttcccatctttggatatagaggtcgatggtggagtaggtcctgacactgtccataaatgtgcagaggcaggagctaacatgattgtgtctggcagtgctattatgaggagtgaagaccccagatctgtgatcaatctattaagaaatgtttgctcagaagctgctcagaaacgttctcttgatcggtgaaaccataaggagcccagtgttcctgttcatgaaatctcccttttactggaaaacaggaatattgactaccaaatcacaatgcaattgaagccgtactgcttttttgagcagttattcattccagtgattaaaactgattgtgcagaatattctaagaggtcagaaattggtgtgtataactacatttttagtgatgcaatttattgattagtgagtaagatactgtttttattgagagatttgatttttataaagtaaaaatacggctgcattagggttacaaacagaaaagtgtcttaatgtctaaggagggcatattagctacactacaaaaacaaattttgtctgtacttctgaaaagaattttgttgtttctcagctgttttccaaaagcaaaggaagtctttatggtttttttctatttcatgttattgtgatttgtttataagtttgggtggggtgcataccatattcttggttcttaaaatctatcacttttcaccttacacttgatgtgtgaaaactataaaaacaatgtgtgaaacccaggggttctaaaatacaagcatagattttatcagggtgttttgtcaaagcaggttattcagtgattcctccccaccattcttaagaacgttaaataatgctgttgtgttagctctgagtagaaaggaaaaagtaaaacctctgtttggaggtaatattgggttgaattctgactgcccctttctagctggacctttaacaaatcacccaatcttttttgtgtttctctaaagtcatttatacattaaatgtaattatagcaactgtggggttctgttgagaattaagagctaacactatatatgtaaagtttccagtactagtcccagaatttagaatatgctcaacacaaagtaaacagcattatataagtttatatttttgtgagttataaagtactttgatatattctcattaaatctgtaaatcacctctataagtaagtggtaataataaagcagatatttttgtccccatttaaaaaatgaagaaattaatgcttaatagggtggtaccctggaaaggatctgggaagtggtagaatttctggtctgtacttttacaaatggagcccttgggaggtgggttaggtaaaagaagctttttacttaacgttgtcttatttccagtctaattttacgctgtagcagaaccagatggctgagaaaattctggaactatggatcttgaccccaaggatatattattttattccaagaaagatcaggtaggcgaaaagatgacaggatacagagtcaatccataaactaaatatttataactgttctgaattatacagagtctaaaaatatgtgtcagctacttcattcctgtaaatactcttgctgtgttataaatatggcaagaaataaacatgaccaatatcaatagacttcttgaggctactataagttttgagaaataaggttcaaaaaataagaatgctaacacttaagcacagactagagcttgcttgggtttcttcctgcattacaaggtaaaaatttgttaatgtttgtttttattcagcttgggaaagctttgtgccatgaatacgtcgcatttaataacaagcaacacacggcatatagaaataactttaattaaaaaacttacatagaagattataatatcagacgtgacaaagatttgagtttatttgcctggacaacttgggtttgtctggcttttgttttctttttctttaaaaataaatgtacagtaaaactacaagcaaaagtttgtcagtattgaattgaattttttaccccttaaaaggactagtataatttccaatctctaacaaaaacttagtgtcaaatctcacagataaggccaaatggccaatattttcagttatgtgggtagtacaacttgagtaaccttttttacatgacaaaaagtgagttatataaattgtcctcaactttcacataggaaaaaaatggtttaatagcttcaaaaggaattttctttcatgtatactcttcagtatccaatattgaagctttgttctttgaaaaattttaatttccaatctaggatgcaagcaagaatatatgtttatttgaatagagtaagctatggcaaagaatgaccaaattagctagaaatagaaatcagccagaattaactaatttcttgctaatctagaaatacaatcatcttttttttttttttcaaattttatactgatagggctttact

SEQ ID NO: 360064 - DNA, 3036 bp, Homo sapiens
acggagaaggggcggggccaaaactgcgcgcccaatcggggtgacgctctagccttgccggggactcgtgggtaacttgcttttgggagccagcggtatggcgtcgggctgcaagattggcccgtccatcctcaacagcgacctggccaatttaggggccgagtgcctccggatgctagactctggggccgattatctgcacctggacgtaatggacgggcaccctgctcttcagggaggtcagacatgcacatgatggtgtccaagccagaacagtgggtaaagccaatggctgtagcaggagccaatcagtacacctttcatctcgaggctactgagaacccaggggctttgattaaagacattcgggagaatgggatgaagtcttgctctgtcacccaggctgaagtgcagtggcacagtcagggcccattgcaggttggccttgccatcaaaccaggaacctcagttgagtatttggcaccatgggctaatcagatagatatggccttggttatgacagtggaaccggggtttggagggcagaaattcatggaagatatgatgccaaaggttcactggttgaggacccagttcccatctttggatatagaggtcgatggtggagtaggtcctgacactgtccataaatgtgcagaggcaggagctaacatgattgtgtctggcagtgctattatgaggagtgaagaccccagatctgtgatcaatctattaagaaatgtttgctcagaagctgctcagaaacgttctcttgatcggtgaaaccataaggagcccagtgttcctgttcatgaaatctcccttttactggaaaacaggaatattgactaccaaatcacaatgcaattgaagccgtactgcttttttgagcagttattcattccagtgattaaaactgattgtgcagaatattctaagaggtcagaaattggtgtgtataactacatttttagtgatgcaatttattgattagtgagtaagatactgtttttattgagagatttgatttttataaagtaaaaatacggctgcattagggttacaaacagaaaagtgtcttaatgtctaaggagggcatattagctacactacaaaaacaaattttgtctgtacttctgaaaagaattttgttgtttctcagctgttttccaaaagcaaaggaagtctttatggtttttttctatttcatgttattgtgatttgtttataagtttgggtggggtgcataccatattcttggttcttaaaatctatcacttttcaccttacacttgatgtgtgaaaactataaaaacaatgtgtgaaacccaggggttctaaaatacaagcatagattttatcagggtgttttgtcaaagcaggttattcagtgattcctccccaccattcttaagaacgttaaataatgctgttgtgttagctctgagtagaaaggaaaaagtaaaacctctgtttggaggtaatattgggttgaattctgactgcccctttctagctggacctttaacaaatcacccaatcttttttgtgtttctctaaagtcatttatacattaaatgtaattatagcaactgtggggttctgttgagaattaagagctaacactatatatgtaaagtttccagtactagtcccagaatttagaatatgctcaacacaaagtaaacagcattatataagtttatatttttgtgagttataaagtactttgatatattctcattaaatctgtaaatcacctctataagtaagtggtaataataaagcagatatttttgtccccatttaaaaaatgaagaaattaatgcttaatagggtggtaccctggaaaggatctgggaagtggtagaatttctggtctgtacttttacaaatggagcccttgggaggtgggttaggtaaaagaagctttttacttaacgttgtcttatttccagtctaattttacgctgtagcagaaccagatggctgagaaaattctggaactatggatcttgaccccaaggatatattattttattccaagaaagatcaggtaggcgaaaagatgacaggatacagagtcaatccataaactaaatatttataactgttctgaattatacagagtctaaaaatatgtgtcagctacttcattcctgtaaatactcttgctgtgttataaatatggcaagaaataaacatgaccaatatcaatagacttcttgaggctactataagttttgagaaataaggttcaaaaaataagaatgctaacacttaagcacagactagagcttgcttgggtttcttcctgcattacaaggtaaaaatttgttaatgtttgtttttattcagcttgggaaagctttgtgccatgaatacgtcgcatttaataacaagcaacacacggcatatagaaataactttaattaaaaaacttacatagaagattataatatcagacgtgacaaagatttgagtttatttgcctggacaacttgggtttgtctggcttttgttttctttttctttaaaaataaatgtacagtaaaactacaagcaaaagtttgtcagtattgaattgaattttttaccccttaaaaggactagtataatttccaatctctaacaaaaacttagtgtcaaatctcacagataaggccaaatggccaatattttcagttatgtgggtagtacaacttgagtaaccttttttacatgacaaaaagtgagttatataaattgtcctcaactttcacataggaaaaaaatggtttaatagcttcaaaaggaattttctttcatgtatactcttcagtatccaatattgaagctttgttctttgaaaaattttaatttccaatctaggatgcaagcaagaatatatgtttatttgaatagagtaagctatggcaaagaatgaccaaattagctagaaatagaaatcagccagaattaactaatttcttgctaatctagaaatacaatcatcttttttttttttttcaaattttatactgatagggctttact

SEQ ID NO: 360065 - DNA, 1910 bp, Homo sapiens
acggagaaggggcggggccaaaactgcgcgcccaatcggggtgacgctctagccttgccggggactcgtgggtaacttgcttttgggagccagcggtatggcgtcgggctgcaagattggcccgtccatcctcaacagcgacctggccaatttaggggccgagtgcctccggatgctagactctggggccgattatctgcacctggacgtaatggacgggcattttgttcccaacatcacctttggtcaccctgtggtagaaagccttcgaaagcagctaggccaggaccctttctttgacatgcacatgatggtgtccaagccagaacagtgggtaaagccaatggctgtagcaggagccaatcagtacacctttcatctcgaggctactgagaacccaggggctttgattaaagacattcgggagaatgggatgaaggttggccttgccatcaaaccaggaacctcagttgagtatttggcaccatgggctaatcagatagatatggccttggttatgacagtggaaccggggtttggagggcagaaattcatggaagatatgatgccaaaggttcactggttgaggacccagttcccatctttggatatagaggtcgatggtggagtaggtcctgacactgtccataaatgtgcagaggcaggagctaacatgattgtgtctggcagtgctattatgaggagtgaagaccccagatctgtgatcaatctattaagaaatgtttgctcagaagctgctcagaaacgttctcttgatcggtgaaaccataaggagcccagtgttcctgttcatgaaatctcccttttactggaaaacaggaatattgactaccaaatcacaatgcaattgaagccgtactgcttttttgagcagttattcattccagtgattaaaactgattgtgcagaatattctaagaggtcagaaattgtctaattttacgctgtagcagaaccagatggctgagaaaattctggaactatggatcttgaccccaaggatatattattttattccaagaaagatcagttgtgcagaagattctgaccttatttgaggcttacatataggtttggagatgtggaaaggagtggaaaaagaaatatgtaagctgaagtgccaaactcacactgaaataaagggcatggcctaccagctgacaaggagtgtctggtttcaagatggcaaatgaccctaaacatgatagacaaatatgttttacataggtacatgcacagataggcacatataaatccacatttgcaagcaaaaagtggaacctgtaaagcagaatttctgaggaatctctaaaagactaatactatatggaatttgaagaggaaacccagagcagaagcacatagtgaagtactgccacaaagatgtgtgacgccactaaaggtgctctagacccacaagaaaggaaaactgggagcaggacaactatctggatattgactgcacatgccaatatctcagtcagactaacagaatcagagctttaggcagagaaatgaatggttggagagagaaggcaatgcccaggtgccctgctttgaaatgtcccgcccatccccaaattagtctgaaaatttcaaatgttgtataaattcccttcccatcaaaagtgtcccataaacagcagtggtagaagagttttaactgagtatcacagcttcaatgatgagtatagaaaactccaaaaatctgaataccaacacaatcaaaaaagaggtacaaaccacaagtggaagaaccatctcaagaaataatgaagcattcatggaatacagattagcaactctttaaaacagtattgccaagagaaacaggtaagaggccctctggagaaatgtcagaaatagaaaatgtaattgttcaaatgtta

SEQ ID NO: 360066 - DNA, 607 bp, Homo sapiens
tttttttaaccgtaaccagaaaggggttgcgaatgacatctagctgtcaggtctttaaagtattgtatttcttagagtgtcctttaaaggtacttttgcattggtaaccttttgagattagtttttatcatagcaacgtgtggaaattctgaagctgacatgaagttggtttgatccgtgtgtgaacattgtgcctttccagtgttaagtgagtcagacagagcatcgctgcccgtgatagccactgtttttgataaactcaaccatgagtataaaaagtacctggatgccgagcagagttatgcgatggtgagttacatggagtatgacaaagggtcctcctcccccaccccctcccgggtattttctaagtaattatgatgcaaaattgtttcctatatattagaataaggtcgctgagatttgccgcctgccatagggcaaggtggcagtagtgggggatagtggaggagtagtaaattcagggtccctgcatcccacgagctggcggctgcatctcacttcataccttcactgtttttgtttttcccatctgtgtttgatcttgcctgtagatccttggtctactgttatagatgagaaaaat

SEQ ID NO: 360067 - DNA, 2198 bp, Homo sapiens
gtgggggcgtggcaccaggaagcggcgtccgcgccgggcccagagccgcagccgcagccgccgctacagtccgggccgggctccaccgcgcatcctgctccactctggcgaccgcccccggggcccccgccgcgggcgcggcgcccgccatgggcgaggaggactactatctggagctgtgcgagcggccggtgcagttcgagaaggcgaaccctgtcaactgcgtcttcttcgatgaggccaacaagcaggtttttgctgttcgatctggtggagctactggcgtggtagttaaaggcccagatgataggaatcccatctcatttagaatggatgacaaaggagaagtgaagtgcattaagttttccttagaaaataagatattggctgttcagaggacctcaaagactgtggatttttgtaattttatccctgataattcccagctggaatacacacaggagtgcaagactaagaatgccaacattctaggattctgctggactagttcaactgaaattgtcttcataacagatcaaggaatcgaattttaccaggtattaccagagaaacggagtctgaaactcttgaagagccacaatctcaatgtgaattggtacatgtactgccccgagagcgccgtgatcttgctgtctaccacggtcctggagaatgtcctgcagccttttcactttagggctggcactatgtcgaagctgcccaaatttgagattgaattaccagctgcgcctaagtcaactaaacccagcctttccgaaagagacatcgcaatggctaccatatacgggcagctgtatgttctcttcttgaggcatcattctcggacctccaacagcacaggagcggaggtggtcctctatcatctaccacgagaaggtgcctgtaaaaagatgcacatattgaagttaaataggacgggaaagtttgccctgaacgtggtggacaacctggtagtcgtgcatcatcaggatacagagacatcggtaatattcgatatcaagttacggggagagtttgacggctccgttaccttccaccaccccgtgcttcccgctcgatcgatccagccctatcagatccccatcacaggtcctgctgccgtgaccagccagtctcctgttccatgtaaactctattcttcatcttggattgtctttcaacctgacatcattatcagcgcaagccaaggttacctctggaacctccaagtgaaacttgagcccatagtaaatctcttaccagacaaaggaagactcatggactttctcctccagagaaaggaatgcaagatggtcatcctgtctgtctgttcacagatgttaagtgagtcagacagagcatcgctgcccgtgatagccactgtttttgataaactcaaccatgagtataaaaagtacctggatgccgagcagagttatgcgatggcggtggaagcagggcagagccgaagcagcccgctcctcaagaggccggtgcggacccaggcggtgctggaccagtcagatgtgtacacccatgtcctgtcagccttcgtggaaaagaaggagatgcctcataaatttgtgatagccgtgctgatggaatacattcgttctcttaaccagtttcagattgcagtacagcattacctacatgaacttgttatcaaaacccttgtccagcacaacctcttttatatgctgcatcagttcctgcagtaccacgtcctcagcgactccaaacctttggcttgtctgctgttatccctagagagtttctatcctcctgctcatcagctatctctggacatgctgaagcgactttcaacagcaaatgatgaaatagtagaagttctcctttccaaacaccaagtgttagctgccttaaggtttatccggggcattggtggccatgacaacatttctgcacgaaaatttttagatgctgcaaagcagactgaagacaacatgcttttctatacaatattccgcttttttgaacagcgaaaccagcgtttgcgagggagccccaatttcacaccaggggaacactgtgaagaacatgttgcttttttcaaacagatttttggagaccaagctctaatgaggcctacaacattctgaaatcacttgctgtttttttatataaaaatgtgtacaaagttaatttattgcattaataaagctctttaaactata

SEQ ID NO: 360068 - DNA, 3813 bp, Homo sapiens
  misc_feature (1235)..(1235): n is a, c, g, or t
  misc_feature (1408)..(1408): n is a, c, g, or t
  misc_feature (1527)..(1527): n is a, c, g, or t
  misc_feature (1799)..(1799): n is a, c, g, or t
  misc_feature (1978)..(1978): n is a, c, g, or t
  misc_feature (1985)..(1985): n is a, c, g, or t
  misc_feature (2071)..(2071): n is a, c, g, or t
cgaactaattatttagataattaagtggctgggcacagtggctcatgcctgtaatcgcagcatgttgggaggctgaggtgggcagatcacttaagcccaggagttggagaccagcctaggtaacatagaccttgtcttcacaaaaaaaaaaaaaaaaaaaaaaaaaaaaaaagaaaaaaagttagggcatggtcacatgcctgtagtcctagctactctgaaggctgaggcaggaggaccacttgagccaaggagttcgtggttatagtgggctatgatcaactactgcactcaagcctggacagcagagcaacaccctctcttaaagaaaaaaaaagataattaagctacaagccacatttatttgaaacattctccgtggatgatctgggtatttgattttgaatccttcaagtaaatttctcagttccttaacgtgcatatgtaaacgatcatgagtcatctttggttattaaaaataacccaaaccacagtgattgaagccttgacatgctttctttttcttggtgagattttcctggattgtcagctcctccccccttcctccccgtacgtgctttcagtgagacggaacagttcatttcttccttgactacaattgaataaacatttcgtaatgacattaaaaagtattgacttttgtgtcataagtaccagcatttgcagcattttctgactgcatcgttgcacttatgttttctcaatttgtaggtcctgctgccgtgaccagccagtctcctgttccatgtaaactctgtatcctttactaaggtgtggcaccgtgcacaacagggcaagtggtcaccctcagagagtggtcctgaagtcctcctccgggcagctgtgaataacactccgagagccaccccgcaggcagcttccctgactgtccaggggcctcgcgtttagcgtggactcagtacatggtgggcaggggcgagtgctagcggaaactgggtttgctttttgttttcatcttttcctggtttagaatttcctataacatgtggattcttcatcttggattgtctttcaacctgacatcattatcagcgcaagccaaggtaggtcagcggggacagttgtcgtgttacaacatggtgcttgttgactttggatcccagttgtagccagggacgttttcaaggtgaatctcttagaaatgacccctcctttcaagcgtgggaatgggatttttttttttcactttatangttttttactatatgtgcattttatcaagaacatatactacttttaataattaaagcaacaactaagaatgccattctcctgcttaagcccattctggaaaagccagactccaccccagggtggatggaaagccggactccaccccagggtgtctccctcatttctcccatcnaccttcccaccggtgtccgtgcccttttctgttctgcatgagcccgggaggtgtgctcctctttctggccttgctgaggaagcctcctcagtctgttaattgtctcttcctgggtaatntctttattagagaaatctttttttttttttttgagacggagttttgctcgttgcccaggctggagtgcaatggcgtgatcttggctcactgcaacctccgcctcccgggttcaagcgattctcctgcctcagcctcctgaatagctgggattacaggcatgtgccaccacgcccagctaattttgtatttttagtagagacgaggtttttcatgttggtcaggctggtctcaaactcccaacctcaggtgatccgcctgcctcggcctcccnaagtgctgggattacaggcatgagccactgtgcccggcctaaagaaatcttatttttttaaggcagggtcttgctccgtcacccagcctggagtgcagtagtgctatctcagcttactgcagccttgagctcctgggctcaggcgatcctcctgcttcagcctcccaagtagctgggcntacaggngcacatcaccacgcccagttaatttattataataataataattattttgagacggaatctcgctttgtcaccaggctggagtgcantggtgccatctcggctcactgcaacctccaactcctgggtttaagcgattctcctgcctcagcctccccagtagctgggattacaggcatgcgccaccacacccagctaatttttgtatttttagtagatacggggtttcaccatgttggccaggatggtctcgatctcctgacctcgtgatctgcccacctcagcctcccaaagtgctgggattacaggtgtgagccaccacagccggcctataattttttttttgtagagacagggtcttgccatgttgcccctgtgtctctaatacctcgccaggctggttattagagaatctcctatgttactctttaatcctctgtgtattttcctgcctttcctctggaattcctaagaactcttgaggagagaattagccctgatgctgtaggcatccactgtatgtaatgcattgttgtgccttgtctgtaacccatagcctcatgtgacatccactgtatgtatgtaatgaagtcatttctctcctgtgcatctcgctggtgttttcctgtacagctgctctgtacctgccttgggccaactgaaaagggggtcacccagatgattttttatgtggcacttcattctcctgtggcatcccaattgggaaaggccacaccagatgctggcagtgtgggtgatcagtacatttatgggtcgatgaatggatgagttatgatgttccattgagagcctctggagttaccttttaaactaatgagctgttgtaggagaaaccaaagcacaggactgaagttgatgccacgtgttgacatctttttctattttaaacgttaaaagaggggctaggtctagggaagtccccgtttggaatgaaggactaggagctacacctttgatgtgcccctgaatgcagaggttacttggaaaagagtcagccaggtgtgcggtggttgggctgtcatcctcctgtggtagacacgctcctgaattgctcctgaatggctcagctctgctttggttaggaaggaaaagctacactgactgtactttgcggctttttatcaccacctgccacccgccccgcagatgtttaggggaaccacttttgggcttttgttacggtttgcatcatactgttttatttgctgcctcttaaaatccaggttacctctggaacctccaagtgaaacttgagcccatagtaaatctcttaccagacaaaggaagactcatggactttctcctccagagaaaggaatgcaagatggtcatcctgtctgtctgttcacagagtaagttgaatccttcccccttgctctgattccagtgtgaggcctgtgctgcccaacactttttatcgggatgtgggctacattgttgtgtcttgtctgtgacccacagcctcattctttatgtgaggggtggctatgtgaccccctaggaaaggctgctaaatggaaagatgatttgtagagatactggtagaaaagaacaataaatgggatggttctgaatgaaagtgggcacacaggaggggagtgggccaccacccctggccttcacacacacctctttcaaaatccaagccactcactgcatatgtgtcttctttaagaatcccctactgaggccaggcatggtggctcatgcttataatcccagcactctgggaggctgaagcaggaggattgcctgagcctaggagttcgagaccagcctggacgacaacatggcaaaaccctgtctctac

SEQ ID NO: 360069 - DNA, 494 bp, Homo sapiens
ttcttaaaaggaactagtatattagattgtaatagaactactttctatcccccggagatgataaaaagcccctcattttcttaatcttctacttcagtgcttcaatttagtgacaaagctataaatgaagcaaatcagtattgttctttcaaccgtgggtcatttttgtgcaaggtgaagtggccatagaagtaaaaggatcaaggacagtctcgagatgaagaaaggcagcaagcactttgctaagaaacgggaaatccatgagggacataaaaagctgttctgcagcactgctggtgtgagagctggctgccagatggactccttcatctcagtggcagggaggagctgccctgcctgctgacactcagatccattcaaggactggctccaggcctttgtgaagcagacagatcaggcctccagaaaaaacatcgacaacttcctaataaagtagtctgcaccatcatgaatcccctggatgggttttttct

SEQ ID NO: 360070 - DNA, 2287 bp, Homo sapiens
gtgggggcgtggcaccaggaagcggcgtccgcgccgggcccagagccgcagccgcagccgccgctacagtccgggccgggctccaccgcgcatcctgctccactctggcgaccgcccccggggcccccgccgcgggcgcggcgcccgccatgggcgaggaggactactatctggagctgtgcgagcggccggtgcagttcgagaaggcgaaccctgtcaactgcgtcttcttcgatgaggccaacaagcaggtttttgctgttcgatctggtggagctactggcgtggtagttaaaggcccagatgataggaatcccatctcatttagaatggatgacaaaggagaagtgaagtgcattaagttttccttagaaaataagatattggctgttcagaggacctcaaagactgtggatttttgtaattttatccctgataattcccagctggaatacacacaggagtgcaagactaagaatgccaacattctaggattctgctggactagttcaactgaaattgtcttcataacagatcaaggaatcgaattttaccaggtattaccagagaaacggagtctgaaactcttgaagagccacaatctcaatgtgaattggtacatgtactgccccgagagcgccgtgatcttgctgtctaccacggtcctggagaatgtcctgcagccttttcactttagggctggcactatgtcgaagctgcccaaatttgagattgaattaccagctgcgcctaagtcaactaaacccagcctttccgaaagagacatcgcaatggctaccatatacgggcagctgtatgttctcttcttgaggcatcattctcggacctccaacagcacaggagcggaggtggtcctctatcatctaccacggtagatttcatgctttgttttccctctctctctgattttaaaatgtgaactgcagcttgttgatctgttttttgctttctatcctacagagaaggtgcctgtaaaaagatgcacatattgaagttaaataggacgggaaagtttgccctgaacgtggtggacaacctggtagtcgtgcatcatcaggatacagagacatcggtaatattcgatatcaagttacggggagagtttgacggctccgttaccttccaccaccccgtgcttcccgctcgatcgatccagccctatcagatccccatcacaggtcctgctgccgtgaccagccagtctcctgttccatgtaaactctattcttcatcttggattgtctttcaacctgacatcattatcagcgcaagccaaggttacctctggaacctccaagtgaaacttgagcccatagtaaatctcttaccagacaaaggaagactcatggactttctcctccagagaaaggaatgcaagatggtcatcctgtctgtctgttcacagatgttaagtgagtcagacagagcatcgctgcccgtgatagccactgtttttgataaactcaaccatgagtataaaaagtacctggatgccgagcagagttatgcgatggcggtggaagcagggcagagccgaagcagcccgctcctcaagaggccggtgcggacccaggcggtgctggaccagtcagatgtgtacacccatgtcctgtcagccttcgtggaaaagaaggagatgcctcataaatttgtgatagccgtgctgatggaatacattcgttctcttaaccagtttcagattgcagtacagcattacctacatgaacttgttatcaaaacccttgtccagcacaacctcttttatatgctgcatcagttcctgcagtaccacgtcctcagcgactccaaacctttggcttgtctgctgttatccctagagagtttctatcctcctgctcatcagctatctctggacatgctgaagcgactttcaacagcaaatgatgaaatagtagaagttctcctttccaaacaccaagtgttagctgccttaaggtttatccggggcattggtggccatgacaacatttctgcacgaaaatttttagatgctgcaaagcagactgaagacaacatgcttttctatacaatattccgcttttttgaacagcgaaaccagcgtttgcgagggagccccaatttcacaccaggggaacactgtgaagaacatgttgcttttttcaaacagatttttggagaccaagctctaatgaggcctacaacattctgaaatcacttgctgtttttttatataaaaatgtgtacaaagttaatttattgcattaataaagctctttaaactata

SEQ ID NO: 360071 - DNA, 2980 bp, Homo sapiens
gtgggggcgtggcaccaggaagcggcgtccgcgccgggcccagagccgcagccgcagccgccgctacagtccgggccgggctccaccgcgcatcctgctccactctggcgaccgcccccggggcccccgccgcgggcgcggcgcccgccatgggcgaggaggactactatctggagctgtgcgagcggccggtgcagttcgagaaggcgaaccctgtcaactgcgtcttcttcgatgaggccaacaagcaggtttttgctgttcgatctggtggagctactggcgtggtagttaaaggcccagatgataggaatcccatctcatttagaatggatgacaaaggagaagtgaagtgcattaagttttccttagaaaataagatattggctgttcagaggacctcaaagactgtggatttttgtaattttatccctgataattcccagctggaatacacacaggagtgcaagactaagaatgccaacattctaggattctgctggactagttcaactgaaattgtcttcataacagatcaaggaatcgaattttaccaggtattaccagagaaacggagtctgaaactcttgaagagccacaatctcaatgtgaattggtacatgtactgccccgagagcgccgtgatcttgctgtctaccacggtcctggagaatgtcctgcagccttttcactttagggctggcactatgtcgaagctgcccaaatttgagattgaattaccagctgcgcctaagtcaactaaacccagcctttccgaaagagacatcgcaatggctaccatatacgggcagctgtatgttctcttcttgaggcatcattctcggacctccaacagcacaggagcggaggtggtcctctatcatctaccacgagaaggtgcctgtaaaaagatgcacatattgaagttaaataggacgggaaagtttgccctgaacgtggtggacaacctggtagtcgtgcatcatcaggatacagagacatcggtaatattcgatatcaagttacggggagagtttgacggctccgttaccttccaccaccccgtgcttcccgctcgatcgatccagccctatcagatccccatcacaggtcctgctgccgtgaccagccagtctcctgttccatgtaaactctattcttcatcttggattgtctttcaacctgacatcattatcagcgcaagccaaggttacctctggaacctccaagtgaaacttgagcccatagtaaatctcttaccagacaaaggaagactcatggactttctcctccagagaaaggaatgcaagatggtcatcctgtctgtctgttcacagatgttaagtgagtcagacagagcatcgctgcccgtgatagccactgtttttgataaactcaaccatgagtataaaaagtacctggatgccgagcagagttatgcgatggcggtggaagcagggcagagccgaagcagcccgctcctcaagaggccggtgcggacccaggcggtgctggaccagtcagatgtgtacacccatgtcctgtcagccttcgtggaaaagaaggagatgcctcataaatttgtgatagccgtgctgatggaatacattcgttctcttaaccagtttcagattgcagtacagcattacctacatgaacttgttatcaaaacccttgtccagcacaacctcttttatatgctgcatcagttcctgcagtaccacgtcctcagcgactccaaacctttggcttgtctgctgttatccctagagagtttctatcctcctgctcatcagctatctctggacatgctgaagcgactttcaacagcaaatgatgaaatagtagaagttctcctttccaaacaccaagtgttagctgccttaaggtttatccggggcattggtggccatgacaacatttctgcacgaaaatttttagatgctgcaaagcagactgaagacaacatgcttttctatacaatattccgcttttttgaacagcgaaaccagcgtttgcgagggagccccaatttcacaccaggggaacactgtgaagaacatgttgcttttttcaaacagatttttggagaccaagctctaatgaggcctacaacattctgaaatcacttgctgtttttttatataaaaatgtgtacaaagttaatttattgcattaataaagctctttaaactataaaatgttataaagtgtatctacaacctcaactgtcactaaaaatatggtatagaacttgtgggatggcttactcctaaaaggagagacagacagtgcattgattggcctttacagagtgtcagtgagcggatcacattcacagccatctagtgtcacctcctgcttgccaaagaatgaggtttctttcctgaagaggctgggagaagtttagtgtcctgtggttgcctccagatctagtaatactgcttcccaagtcaactgtgcattcctgagttcacaggcgctacgttcaaagctgctgccaaacaaccgatggttggcaccatccggtgttcaacttggccttgccgatgcagcacccgtccagtggtaaaccgaccgacccttagacacagttcagtcaggatgccctgcgagagggctagaaatttagaagccgttcgcgctctgttcctttgtatcgctcttcagtggcacaacttttggctttatttactgatggccctatgagagagagagactttttcttatttctgcaggagaaagggagctagttggctgggcatagtggctcacgcctgtaatcccactttggaagactgaggcaggagaattgcttgagaccagcctggacaacagagtgagaccacatctctctccctctcttttggagatgggctctttgctttcttcctcaggctgcagtgcagtggtatgaacacgactcactgcatcctaagcccacccttctgggctcaagcaagcttcctgcctcagccta

SEQ ID NO: 360072 - DNA, 4339 bp, Homo sapiens
  misc_feature (1359)..(1359): n is a, c, g, or t
  misc_feature (1532)..(1532): n is a, c, g, or t
  misc_feature (1651)..(1651): n is a, c, g, or t
  misc_feature (1923)..(1923): n is a, c, g, or t
  misc_feature (2102)..(2102): n is a, c, g, or t
  misc_feature (2109)..(2109): n is a, c, g, or t
  misc_feature (2195)..(2195): n is a, c, g, or t
gtgggggcgtggcaccaggaagcggcgtccgcgccgggcccagagccgcagccgcagccgccgctacagtccgggccgggctccaccgcgcatcctgctccactctggcgaccgcccccggggcccccgccgcgggcgcggcgcccgccatgggcgaggaggactactatctggagctgtgcgagcggccggtgcagttcgagaaggcgaaccctgtcaactgcgtcttcttcgatgaggccaacaagcaggtttttgctgttcgatctggtggagctactggcgtggtagttaaaggcccagatgataggaatcccatctcatttagaatggatgacaaaggagaagtgaagtgcattaagttttccttagaaaataagatattggctgttcagaggacctcaaagactgtggatttttgtaattttatccctgataattcccagctggaatacacacaggagtgcaagactaagaatgccaacattctaggattctgctggactagttcaactgaaattgtcttcataacagatcaaggaatcgaattttaccaggtattaccagagaaacggagtctgaaactcttgaagagccacaatctcaatgtgaattggtacatgtactgccccgagagcgccgtgatcttgctgtctaccacggtcctggagaatgtcctgcagccttttcactttagggctggcactatgtcgaagctgcccaaatttgagattgaattaccagctgcgcctaagtcaactaaacccagcctttccgaaagagacatcgcaatggctaccatatacgggcagctgtatgttctcttcttgaggcatcattctcggacctccaacagcacaggagcggaggtggtcctctatcatctaccacgagaaggtgcctgtaaaaagatgcacatattgaagttaaataggacgggaaagtttgccctgaacgtggtggacaacctggtagtcgtgcatcatcaggatacagagacatcggtaatattcgatatcaagttacggggagagtttgacggctccgttaccttccaccaccccgtgcttcccgctcgatcgatccagccctatcagatccccatcacaggtcctgctgccgtgaccagccagtctcctgttccatgtaaactctattcttcatcttggattgtctttcaacctgacatcattatcagcgcaagccaaggtaggtcagcggggacagttgtcgtgttacaacatggtgcttgttgactttggatcccagttgtagccagggacgttttcaaggtgaatctcttagaaatgacccctcctttcaagcgtgggaatgggatttttttttttcactttatangttttttactatatgtgcattttatcaagaacatatactacttttaataattaaagcaacaactaagaatgccattctcctgcttaagcccattctggaaaagccagactccaccccagggtggatggaaagccggactccaccccagggtgtctccctcatttctcccatcnaccttcccaccggtgtccgtgcccttttctgttctgcatgagcccgggaggtgtgctcctctttctggccttgctgaggaagcctcctcagtctgttaattgtctcttcctgggtaatntctttattagagaaatctttttttttttttttgagacggagttttgctcgttgcccaggctggagtgcaatggcgtgatcttggctcactgcaacctccgcctcccgggttcaagcgattctcctgcctcagcctcctgaatagctgggattacaggcatgtgccaccacgcccagctaattttgtatttttagtagagacgaggtttttcatgttggtcaggctggtctcaaactcccaacctcaggtgatccgcctgcctcggcctcccnaagtgctgggattacaggcatgagccactgtgcccggcctaaagaaatcttatttttttaaggcagggtcttgctccgtcacccagcctggagtgcagtagtgctatctcagcttactgcagccttgagctcctgggctcaggcgatcctcctgcttcagcctcccaagtagctgggcntacaggngcacatcaccacgcccagttaatttattataataataataattattttgagacggaatctcgctttgtcaccaggctggagtgcantggtgccatctcggctcactgcaacctccaactcctgggtttaagcgattctcctgcctcagcctccccagtagctgggattacaggcatgcgccaccacacccagctaatttttgtatttttagtagatacggggtttcaccatgttggccaggatggtctcgatctcctgacctcgtgatctgcccacctcagcctcccaaagtgctgggattacaggtgtgagccaccacagccggcctataattttttttttgtagagacagggtcttgccatgttgcccctgtgtctctaatacctcgccaggctggttattagagaatctcctatgttactctttaatcctctgtgtattttcctgcctttcctctggaattcctaagaactcttgaggagagaattagccctgatgctgtaggcatccactgtatgtaatgcattgttgtgccttgtctgtaacccatagcctcatgtgacatccactgtatgtatgtaatgaagtcatttctctcctgtgcatctcgctggtgttttcctgtacagctgctctgtacctgccttgggccaactgaaaagggggtcacccagatgattttttatgtggcacttcattctcctgtggcatcccaattgggaaaggccacaccagatgctggcagtgtgggtgatcagtacatttatgggtcgatgaatggatgagttatgatgttccattgagagcctctggagttaccttttaaactaatgagctgttgtaggagaaaccaaagcacaggactgaagttgatgccacgtgttgacatctttttctattttaaacgttaaaagaggggctaggtctagggaagtccccgtttggaatgaaggactaggagctacacctttgatgtgcccctgaatgcagaggttacttggaaaagagtcagccaggtgtgcggtggttgggctgtcatcctcctgtggtagacacgctcctgaattgctcctgaatggctcagctctgctttggttaggaaggaaaagctacactgactgtactttgcggctttttatcaccacctgccacccgccccgcagatgtttaggggaaccacttttgggcttttgttacggtttgcatcatactgttttatttgctgcctcttaaaatccaggttacctctggaacctccaagtgaaacttgagcccatagtaaatctcttaccagacaaaggaagactcatggactttctcctccagagaaaggaatgcaagatggtcatcctgtctgtctgttcacagatgttaagtgagtcagacagagcatcgctgcccgtgatagccactgtttttgataaactcaaccatgagtataaaaagtacctggatgccgagcagagttatgcgatggcggtggaagcagggcagagccgaagcagcccgctcctcaagaggccggtgcggacccaggcggtgctggaccagtcagatgtgtacacccatgtcctgtcagccttcgtggaaaagaaggagatgcctcataaatttgtgatagccgtgctgatggaatacattcgttctcttaaccagtttcagattgcagtacagcattacctacatgaacttgttatcaaaacccttgtccagcacaacctcttttatatgctgcatcagttcctgcagtaccacgtcctcagcgactccaaacctttggcttgtctgctgttatccctagagagtttctatcctcctgctcatcagctatctctggacatgctgaagcgactttcaacagcaaatgatgaaatagtagaagttctcctttccaaacaccaagtgttagctgccttaaggtttatccggggcattggtggccatgacaacatttctgcacgaaaatttttagatgctgcaaagcagactgaagacaacatgcttttctatacaatattccgcttttttgaacagcgaaaccagcgtttgcgagggagccccaatttcacaccaggggaacactgtgaagaacatgttgcttttttcaaacagatttttggagaccaagctctaatgaggcctacaacattctgaaatcacttgctgtttttttatataaaaatgtgtacaaagttaatttattgcattaataaagctctttaaactata

SEQ ID NO: 360073 - DNA, 2281 bp, Homo sapiens
gtgggggcgtggcaccaggaagcggcgtccgcgccgggcccagagccgcagccgcagccgccgctacagtccgggccgggctccaccgcgcatcctgctccactctggcgaccgcccccggggcccccgccgcgggcgcggcgcccgccatgggcgaggaggactactatctggagctgtgcgagcggccggtgcagttcgagaaggcgaaccctgtcaactgcgtcttcttcgatgaggccaacaagcaggtttttgctgttcgatctggtggagctactggcgtggtagttaaaggcccagatgataggaatcccatctcatttagaatggatgacaaaggagaagtgaagtgcattaagttttccttagaaaataagatattggctgttcagaggacctcaaagactgtggatttttgtaattttatccctgataattcccagctggaatacacacaggagtgcaagactaagaatgccaacattctaggattctgctggactagttcaactgaaattgtcttcataacagatcaaggaatcgaattttaccaggtattaccagagaaacggagtctgaaactcttgaagagccacaatctcaatgtgaattggtacatgtactgccccgagagcgccgtgatcttgctgtctaccacggtcctggagaatgtcctgcagccttttcactttagggctggcactatgtcgaagctgcccaaatttgagattgaattaccagctgcgcctaagtcaactaaacccagcctttccgaaagagacatcgcaatggctaccatatacgggcagctgtatgttctcttcttgaggcatcattctcggacctccaacagcacaggagcggaggtggtcctctatcatctaccacgagaaggtgcctgtaaaaagatgcacatattgaagttaaataggacgggaaagtttgccctgaacgtggtggacaacctggtagtcgtgcatcatcaggatacagagacatcggtaatattcgatatcaagttacggggagagtttgacggctccgttaccttccaccaccccgtgcttcccgctcgatcgatccagccctatcagatccccatcacaggtcctgctgccgtgaccagccagtctcctgttccatgtaaactctattcttcatcttggattgtctttcaacctgacatcattatcagcgcaagccaaggtaggtcagcggggacagttgtcgtgttacaacatggtgcttgttgactttggatcccagttgtagccagggacgttttcaaggttacctctggaacctccaagtgaaacttgagcccatagtaaatctcttaccagacaaaggaagactcatggactttctcctccagagaaaggaatgcaagatggtcatcctgtctgtctgttcacagatgttaagtgagtcagacagagcatcgctgcccgtgatagccactgtttttgataaactcaaccatgagtataaaaagtacctggatgccgagcagagttatgcgatggcggtggaagcagggcagagccgaagcagcccgctcctcaagaggccggtgcggacccaggcggtgctggaccagtcagatgtgtacacccatgtcctgtcagccttcgtggaaaagaaggagatgcctcataaatttgtgatagccgtgctgatggaatacattcgttctcttaaccagtttcagattgcagtacagcattacctacatgaacttgttatcaaaacccttgtccagcacaacctcttttatatgctgcatcagttcctgcagtaccacgtcctcagcgactccaaacctttggcttgtctgctgttatccctagagagtttctatcctcctgctcatcagctatctctggacatgctgaagcgactttcaacagcaaatgatgaaatagtagaagttctcctttccaaacaccaagtgttagctgccttaaggtttatccggggcattggtggccatgacaacatttctgcacgaaaatttttagatgctgcaaagcagactgaagacaacatgcttttctatacaatattccgcttttttgaacagcgaaaccagcgtttgcgagggagccccaatttcacaccaggggaacactgtgaagaacatgttgcttttttcaaacagatttttggagaccaagctctaatgaggcctacaacattctgaaatcacttgctgtttttttatataaaaatgtgtacaaagttaatttattgcattaataaagctctttaaactata

SEQ ID NO: 360074 - DNA, 2847 bp, Homo sapiens
gtgggggcgtggcaccaggaagcggcgtccgcgccgggcccagagccgcagccgcagccgccgctacagtccgggccgggctccaccgcgcatcctgctccactctggcgaccgcccccggggcccccgccgcgggcgcggcgcccgccatgggcgaggaggactactatctggagctgtgcgagcggccggtgcagttcgagaaggcgaaccctgtcaactgcgtcttcttcgatgaggccaacaagcaggtttttgctgttcgatctggtggagctactggcgtggtagttaaaggcccagatgataggaatcccatctcatttagaatggatgacaaaggagaagtgaagtgcattaagttttccttagaaaataagatattggctgttcagaggacctcaaagactgtggatttttgtaattttatccctgataattcccagctggaatacacacaggagtgcaagactaagaatgccaacattctaggattctgctggactagttcaactgaaattgtcttcataacagatcaaggaatcgaattttaccaggtattaccagagaaacggagtctgaaactcttgaagagccacaatctcaatgtgaattggtacatgtactgccccgagagcgccgtgatcttgctgtctaccacggtcctggagaatgtcctgcagccttttcactttagggctggcactatgtcgaagctgcccaaatttgagattgaattaccagctgcgcctaagtcaactaaacccagcctttccgaaagagacatcgcaatggctaccatatacgggcagctgtatgttctcttcttgaggcatcattctcggacctccaacagcacaggagcggaggtggtcctctatcatctaccacgagaaggtgcctgtaaaaagatgcacatattgaagttaaataggacgggaaagtttgccctgaacgtggtggacaacctggtagtcgtgcatcatcaggatacagagacatcggtaatattcgatatcaagttacggggagagtttgacggctccgttaccttccaccaccccgtgcttcccgctcgatcgatccagccctatcagatccccatcacaggtcctgctgccgtgaccagccagtctcctgttccatgtaaactctattcttcatcttggattgtctttcaacctgacatcattatcagcgcaagccaaggttacctctggaacctccaagtgaaacttgagcccatagtaaatctcttaccagacaaaggaagactcatggactttctcctccagagaaaggaatgcaagatggtcatcctgtctgtctgttcacagatgttaagtgagtcagacagagcatcgctgcccgtgatagccactgtttttgataaactcaaccatgagtataaaaagtacctggatgccgagcagagttatgcgatggcggtggaagcagggcagagccgaagcagcccgctcctcaagaggccggtgcggacccaggcggtgctggaccagtcagatgtgtacacccatgtcctgtcagccttcgtggaaaagaaggtgggccgcagctttccgcctcttctggactgagaatgctcaaaacaaggaagttgctgaaaacgaggagacttcatgtgattagagtcacttgaagtgattagaatcactggagtttccttgggtgaggccctagagctggtagtttggcttctaatgctgaggcctaaagcataattgttgacgggtggttctggagcgatttgtgcaaaaccagtgaaagatgaacactgggccattttaagatggaaacaaggtgggggttggatagagagttatatgcagcctcttttgcacctcgttggtatttgtaagaccacatttttttctccctaggagatgcctcataaatttgtgatagccgtgctgatggaatacattcgttctcttaaccagtttcagattgcagtacagccttcaaatcatctgggcccaagttaaaacagaaggaatttaaaaaaaaaacacagtcactgtcttagaagatgactcatatgctaagacaggtctgcctccctgactcagaatgctgagtgactcctgacattattagttggaatgggaagtgtaaggtcaagttggggtctttacctgcatgacgaaaccacttcttgtaatgacagacttttactgtgttggttagaatagccagtccttggggagcctctagtctgttgtagctgaatgatttggaagtgttctttcacttttaacttttgtcctcagccattacctacatgaacttgttatcaaaacccttgtccagcacaacctcttttatatgctgcatcagttcctgcagtaccacgtcctcagcgactccaaacctttggcttgtctgctgttatccctagagagtttctatcctcctgctcatcagctatctctggacatgctgaagcgactttcaacagcaaatgatgaaatagtagaagttctcctttccaaacaccaagtgttagctgccttaaggtttatccggggcattggtggccatgacaacatttctgcacgaaaatttttagatgctgcaaagcagactgaagacaacatgcttttctatacaatattccgcttttttgaacagcgaaaccagcgtttgcgagggagccccaatttcacaccaggggaacactgtgaagaacatgttgcttttttcaaacagatttttggagaccaagctctaatgaggcctacaacattctgaaatcacttgctgtttttttatataaaaatgtgtacaaagttaatttattgcattaataaagctctttaaactata

SEQ ID NO: 360075 - DNA, 4285 bp, Homo sapiens
  misc_feature (1359)..(1359): n is a, c, g, or t
  misc_feature (1532)..(1532): n is a, c, g, or t
  misc_feature (1651)..(1651): n is a, c, g, or t
  misc_feature (1923)..(1923): n is a, c, g, or t
  misc_feature (2102)..(2102): n is a, c, g, or t
  misc_feature (2109)..(2109): n is a, c, g, or t
  misc_feature (2195)..(2195): n is a, c, g, or t
gtgggggcgtggcaccaggaagcggcgtccgcgccgggcccagagccgcagccgcagccgccgctacagtccgggccgggctccaccgcgcatcctgctccactctggcgaccgcccccggggcccccgccgcgggcgcggcgcccgccatgggcgaggaggactactatctggagctgtgcgagcggccggtgcagttcgagaaggcgaaccctgtcaactgcgtcttcttcgatgaggccaacaagcaggtttttgctgttcgatctggtggagctactggcgtggtagttaaaggcccagatgataggaatcccatctcatttagaatggatgacaaaggagaagtgaagtgcattaagttttccttagaaaataagatattggctgttcagaggacctcaaagactgtggatttttgtaattttatccctgataattcccagctggaatacacacaggagtgcaagactaagaatgccaacattctaggattctgctggactagttcaactgaaattgtcttcataacagatcaaggaatcgaattttaccaggtattaccagagaaacggagtctgaaactcttgaagagccacaatctcaatgtgaattggtacatgtactgccccgagagcgccgtgatcttgctgtctaccacggtcctggagaatgtcctgcagccttttcactttagggctggcactatgtcgaagctgcccaaatttgagattgaattaccagctgcgcctaagtcaactaaacccagcctttccgaaagagacatcgcaatggctaccatatacgggcagctgtatgttctcttcttgaggcatcattctcggacctccaacagcacaggagcggaggtggtcctctatcatctaccacgagaaggtgcctgtaaaaagatgcacatattgaagttaaataggacgggaaagtttgccctgaacgtggtggacaacctggtagtcgtgcatcatcaggatacagagacatcggtaatattcgatatcaagttacggggagagtttgacggctccgttaccttccaccaccccgtgcttcccgctcgatcgatccagccctatcagatccccatcacaggtcctgctgccgtgaccagccagtctcctgttccatgtaaactctattcttcatcttggattgtctttcaacctgacatcattatcagcgcaagccaaggtaggtcagcggggacagttgtcgtgttacaacatggtgcttgttgactttggatcccagttgtagccagggacgttttcaaggtgaatctcttagaaatgacccctcctttcaagcgtgggaatgggatttttttttttcactttatangttttttactatatgtgcattttatcaagaacatatactacttttaataattaaagcaacaactaagaatgccattctcctgcttaagcccattctggaaaagccagactccaccccagggtggatggaaagccggactccaccccagggtgtctccctcatttctcccatcnaccttcccaccggtgtccgtgcccttttctgttctgcatgagcccgggaggtgtgctcctctttctggccttgctgaggaagcctcctcagtctgttaattgtctcttcctgggtaatntctttattagagaaatctttttttttttttttgagacggagttttgctcgttgcccaggctggagtgcaatggcgtgatcttggctcactgcaacctccgcctcccgggttcaagcgattctcctgcctcagcctcctgaatagctgggattacaggcatgtgccaccacgcccagctaattttgtatttttagtagagacgaggtttttcatgttggtcaggctggtctcaaactcccaacctcaggtgatccgcctgcctcggcctcccnaagtgctgggattacaggcatgagccactgtgcccggcctaaagaaatcttatttttttaaggcagggtcttgctccgtcacccagcctggagtgcagtagtgctatctcagcttactgcagccttgagctcctgggctcaggcgatcctcctgcttcagcctcccaagtagctgggcntacaggngcacatcaccacgcccagttaatttattataataataataattattttgagacggaatctcgctttgtcaccaggctggagtgcantggtgccatctcggctcactgcaacctccaactcctgggtttaagcgattctcctgcctcagcctccccagtagctgggattacaggcatgcgccaccacacccagctaatttttgtatttttagtagatacggggtttcaccatgttggccaggatggtctcgatctcctgacctcgtgatctgcccacctcagcctcccaaagtgctgggattacaggtgtgagccaccacagccggcctataattttttttttgtagagacagggtcttgccatgttgcccctgtgtctctaatacctcgccaggctggttattagagaatctcctatgttactctttaatcctctgtgtattttcctgcctttcctctggaattcctaagaactcttgaggagagaattagccctgatgctgtaggcatccactgtatgtaatgcattgttgtgccttgtctgtaacccatagcctcatgtgacatccactgtatgtatgtaatgaagtcatttctctcctgtgcatctcgctggtgttttcctgtacagctgctctgtacctgccttgggccaactgaaaagggggtcacccagatgattttttatgtggcacttcattctcctgtggcatcccaattgggaaaggccacaccagatgctggcagtgtgggtgatcagtacatttatgggtcgatgaatggatgagttatgatgttccattgagagcctctggagttaccttttaaactaatgagctgttgtaggagaaaccaaagcacaggactgaagttgatgccacgtgttgacatctttttctattttaaacgttaaaagaggggctaggtctagggaagtccccgtttggaatgaaggactaggagctacacctttgatgtgcccctgaatgcagaggttacttggaaaagagtcagccaggtgtgcggtggttgggctgtcatcctcctgtggtagacacgctcctgaattgctcctgaatggctcagctctgctttggttaggaaggaaaagctacactgactgtactttgcggctttttatcaccacctgccacccgccccgcagatgtttaggggaaccacttttgggcttttgttacggtttgcatcatactgttttatttgctgcctcttaaaatccaggttacctctggaacctccaagtgaaacttgagcccatagtaaatctcttaccagacaaaggaagactcatggactttctcctccagagaaaggaatgcaagatggtcatcctgtctgtctgttcacagatgttaagtgagtcagacagagcatcgctgcccgtgatagccactgtttttgataaactcaaccatgagtatagccgaagcagcccgctcctcaagaggccggtgcggacccaggcggtgctggaccagtcagatgtgtacacccatgtcctgtcagccttcgtggaaaagaaggagatgcctcataaatttgtgatagccgtgctgatggaatacattcgttctcttaaccagtttcagattgcagtacagcattacctacatgaacttgttatcaaaacccttgtccagcacaacctcttttatatgctgcatcagttcctgcagtaccacgtcctcagcgactccaaacctttggcttgtctgctgttatccctagagagtttctatcctcctgctcatcagctatctctggacatgctgaagcgactttcaacagcaaatgatgaaatagtagaagttctcctttccaaacaccaagtgttagctgccttaaggtttatccggggcattggtggccatgacaacatttctgcacgaaaatttttagatgctgcaaagcagactgaagacaacatgcttttctatacaatattccgcttttttgaacagcgaaaccagcgtttgcgagggagccccaatttcacaccaggggaacactgtgaagaacatgttgcttttttcaaacagatttttggagaccaagctctaatgaggcctacaacattctgaaatcacttgctgtttttttatataaaaatgtgtacaaagttaatttattgcattaataaagctctttaaactata

SEQ ID NO: 360076 - DNA, 3076 bp, Homo sapiens
gtgggggcgtggcaccaggaagcggcgtccgcgccgggcccagagccgcagccgcagccgccgctacagtccgggccgggctccaccgcgcatcctgctccactctggcgaccgcccccggggcccccgccgcgggcgcggcgcccgccatgggcgaggaggactactatctggagctgtgcgagcggccggtgcagttcgagaaggcgaaccctgtcaactgcgtcttcttcgatgaggccaacaagcaggtttttgctgttcgatctggtggagctactggcgtggtagttaaaggcccagatgataggaatcccatctcatttagaatggatgacaaaggagaagtgaagtgcattaagttttccttagaaaataagatattggctgttcagaggacctcaaagactgtggatttttgtaattttatccctgataattcccagctggaatacacacaggagtgcaagactaagaatgccaacattctaggattctgctggactagttcaactgaaattgtcttcataacagatcaaggaatcgaattttaccaggtattaccagagaaacggagtctgaaactcttgaagagccacaatctcaatgtgaattggtacatgtactgccccgagagcgccgtgatcttgctgtctaccacggtcctggagaatgtcctgcagccttttcactttagggctggcactatgtcgaagctgcccaaatttgagattgaattaccagctgcgcctaagtcaactaaacccagcctttccgaaagagacatcgcaatggctaccatatacgggcagctgtatgttctcttcttgaggcatcattctcggacctccaacagcacaggagcggaggtggtcctctatcatctaccacgagaaggtgcctgtaaaaagatgcacatattgaagttaaataggacgggaaagtttgccctgaacgtggtggacaacctggtagtcgtgcatcatcaggatacagagacatcggtaatattcgatatcaagttacggggagagtttgacggctccgttaccttccaccaccccgtgcttcccgctcgatcgatccagccctatcagatccccatcacaggtcctgctgccgtgaccagccagtctcctgttccatgtaaactctattcttcatcttggattgtctttcaacctgacatcattatcagcgcaagccaaggttacctctggaacctccaagtgaaacttgagcccatagtaaatctcttaccagacaaaggaagactcatggactttctcctccagagaaaggaatgcaagatggtcatcctgtctgtctgttcacagatgttaagtgagtcagacagagcatcgctgcccgtgatagccactgtttttgataaactcaaccatgagtataaaaagtacctggatgccgagcagagttatgcgatggcggtggaagcagggcagagccgaagcagcccgctcctcaagaggccggtgcggacccaggcggtgctggaccagtcagatgtgtacacccatgtcctgtcagccttcgtggaaaagaaggagatgcctcataaatttgtgatagccgtgctgatggaatacattcgttctcttaaccagtttcagattgcagtacagcattacctacatgaacttgttatcaaaacccttgtccagcacaacctcttttatatgctgcatcagttcctgcagtaccacgtcctcagcgactccaaacctttggtatgcattgccagatttttacttccattgtggttaaaaatggaaaattttaaccgttatctttccaactgaagtgggtctaaaaatgtctttcaggcttgtctgctgttatccctagagagtttctatcctcctgctcatcagctatctctggacatgctgaagcgactttcaacagcaaatgatgaaatagtagaagttctcctttccaaacaccaagtgttagctgccttaaggtttatccggggcattggtggccatgacaacatttctgcacgaaaatttttagatgctgcaaagcagactgaagacaacatgcttttctatacaatattccgcttttttgaacagcgaaaccagcgtttgcgagggagccccaatttcacaccaggggaacactgtgaagaacatgttgcttttttcaaacagatttttggagaccaagctctaatgaggcctacaacattctgaaatcacttgctgtttttttatataaaaatgtgtacaaagttaatttattgcattaataaagctctttaaactataaaatgttataaagtgtatctacaacctcaactgtcactaaaaatatggtatagaacttgtgggatggcttactcctaaaaggagagacagacagtgcattgattggcctttacagagtgtcagtgagcggatcacattcacagccatctagtgtcacctcctgcttgccaaagaatgaggtttctttcctgaagaggctgggagaagtttagtgtcctgtggttgcctccagatctagtaatactgcttcccaagtcaactgtgcattcctgagttcacaggcgctacgttcaaagctgctgccaaacaaccgatggttggcaccatccggtgttcaacttggccttgccgatgcagcacccgtccagtggtaaaccgaccgacccttagacacagttcagtcaggatgccctgcgagagggctagaaatttagaagccgttcgcgctctgttcctttgtatcgctcttcagtggcacaacttttggctttatttactgatggccctatgagagagagagactttttcttatttctgcaggagaaagggagctagttggctgggcatagtggctcacgcctgtaatcccactttggaagactgaggcaggagaattgcttgagaccagcctggacaacagagtgagaccacatctctctccctctcttttggagatgggctctttgctttcttcctcaggctgcagtgcagtggtatgaacacgactcactgcatcctaagcccacccttctgggctcaagcaagcttcctgcctcagccta

SEQ ID NO: 360077 - DNA, 3165 bp, Homo sapiens
gtgggggcgtggcaccaggaagcggcgtccgcgccgggcccagagccgcagccgcagccgccgctacagtccgggccgggctccaccgcgcatcctgctccactctggcgaccgcccccggggcccccgccgcgggcgcggcgcccgccatgggcgaggaggactactatctggagctgtgcgagcggccggtgcagttcgagaaggcgaaccctgtcaactgcgtcttcttcgatgaggccaacaagcaggtttttgctgttcgatctggtggagctactggcgtggtagttaaaggcccagatgataggaatcccatctcatttagaatggatgacaaaggagaagtgaagtgcattaagttttccttagaaaataagatattggctgttcagaggacctcaaagactgtggatttttgtaattttatccctgataattcccagctggaatacacacaggagtgcaagactaagaatgccaacattctaggattctgctggactagttcaactgaaattgtcttcataacagatcaaggaatcgaattttaccaggtattaccagagaaacggagtctgaaactcttgaagagccacaatctcaatgtgaattggtacatgtactgccccgagagcgccgtgatcttgctgtctaccacggtcctggagaatgtcctgcagccttttcactttagggctggcactatgtcgaagctgcccaaatttgagattgaattaccagctgcgcctaagtcaactaaacccagcctttccgaaagagacatcgcaatggctaccatatacgggcagctgtatgttctcttcttgaggcatcattctcggacctccaacagcacaggagcggaggtggtcctctatcatctaccacgagaaggtgcctgtaaaaagatgcacatattgaagttaaataggacgggaaagtttgccctgaacgtggtggacaacctggtagtcgtgcatcatcaggatacagagacatcggtaatattcgatatcaagttacggggagagtttgacggctccgttaccttccaccaccccgtgcttcccgctcgatcgatccagccctatcagatccccatcacaggtcctgctgccgtgaccagccagtctcctgttccatgtaaactctattcttcatcttggattgtctttcaacctgacatcattatcagcgcaagccaaggttacctctggaacctccaagtgaaacttgagcccatagtaaatctcttaccagacaaaggaagactcatggactttctcctccagagaaaggaatgcaagatggtcatcctgtctgtctgttcacagatgttaagtgagtcagacagagcatcgctgcccgtgatagccactgtttttgataaactcaaccatgagtataaaaagtacctggatgccgagcagagttatgcgatggcggtggaagcagggcagagccgaagcagcccgctcctcaagaggccggtgcggacccaggcggtgctggaccagtcagatgtgtacacccatgtcctgtcagccttcgtggaaaagaaggagatgcctcataaatttgtgatagccgtgctgatggaatacattcgttctcttaaccagtttcagattgcagtacagcattacctacatgaacttgttatcaaaacccttgtccagcacaacctcttttatatgctgcatcagttcctgcagtaccacgtcctcagcgactccaaacctttggtatgcattgccagatttttacttccattgtggttaaaaatggaaaattttaaccgttatctttccaactgaagtgggtctaaaaatgtctttcaggcttgtctgctgttatccctagagagtttctatcctcctgctcatcagctatctctggacatgctgaaggtaactctgatgtgtgaggttttagactatggaaactaactctgttcctgttgtttgcactgacctggacttctctcccttactgctagcgactttcaacagcaaatgatgaaatagtagaagttctcctttccaaacaccaagtgttagctgccttaaggtttatccggggcattggtggccatgacaacatttctgcacgaaaatttttagatgctgcaaagcagactgaagacaacatgcttttctatacaatattccgcttttttgaacagcgaaaccagcgtttgcgagggagccccaatttcacaccaggggaacactgtgaagaacatgttgcttttttcaaacagatttttggagaccaagctctaatgaggcctacaacattctgaaatcacttgctgtttttttatataaaaatgtgtacaaagttaatttattgcattaataaagctctttaaactataaaatgttataaagtgtatctacaacctcaactgtcactaaaaatatggtatagaacttgtgggatggcttactcctaaaaggagagacagacagtgcattgattggcctttacagagtgtcagtgagcggatcacattcacagccatctagtgtcacctcctgcttgccaaagaatgaggtttctttcctgaagaggctgggagaagtttagtgtcctgtggttgcctccagatctagtaatactgcttcccaagtcaactgtgcattcctgagttcacaggcgctacgttcaaagctgctgccaaacaaccgatggttggcaccatccggtgttcaacttggccttgccgatgcagcacccgtccagtggtaaaccgaccgacccttagacacagttcagtcaggatgccctgcgagagggctagaaatttagaagccgttcgcgctctgttcctttgtatcgctcttcagtggcacaacttttggctttatttactgatggccctatgagagagagagactttttcttatttctgcaggagaaagggagctagttggctgggcatagtggctcacgcctgtaatcccactttggaagactgaggcaggagaattgcttgagaccagcctggacaacagagtgagaccacatctctctccctctcttttggagatgggctctttgctttcttcctcaggctgcagtgcagtggtatgaacacgactcactgcatcctaagcccacccttctgggctcaagcaagcttcctgcctcagccta

SEQ ID NO: 360078 - DNA, 2287 bp, Homo sapiens
gtgggggcgtggcaccaggaagcggcgtccgcgccgggcccagagccgcagccgcagccgccgctacagtccgggccgggctccaccgcgcatcctgctccactctggcgaccgcccccggggcccccgccgcgggcgcggcgcccgccatgggcgaggaggactactatctggagctgtgcgagcggccggtgcagttcgagaaggcgaaccctgtcaactgcgtcttcttcgatgaggccaacaagcaggtttttgctgttcgatctggtggagctactggcgtggtagttaaaggcccagatgataggaatcccatctcatttagaatggatgacaaaggagaagtgaagtgcattaagttttccttagaaaataagatattggctgttcagaggacctcaaagactgtggatttttgtaattttatccctgataattcccagctggaatacacacaggagtgcaagactaagaatgccaacattctaggattctgctggactagttcaactgaaattgtcttcataacagatcaaggaatcgaattttaccaggtattaccagagaaacggagtctgaaactcttgaagagccacaatctcaatgtgaattggtacatgtactgccccgagagcgccgtgatcttgctgtctaccacggtcctggagaatgtcctgcagccttttcactttagggctggcactatgtcgaagctgcccaaatttgagattgaattaccagctgcgcctaagtcaactaaacccagcctttccgaaagagacatcgcaatggctaccatatacgggcagctgtatgttctcttcttgaggcatcattctcggacctccaacagcacaggagcggaggtggtcctctatcatctaccacgagaaggtgcctgtaaaaagatgcacatattgaagttaaataggacgggaaagtttgccctgaacgtggtggacaacctggtagtcgtgcatcatcaggatacagagacatcggtaatattcgatatcaagttacggggagagtttgacggctccgttaccttccaccaccccgtgcttcccgctcgatcgatccagccctatcagatccccatcacaggtcctgctgccgtgaccagccagtctcctgttccatgtaaactctattcttcatcttggattgtctttcaacctgacatcattatcagcgcaagccaaggttacctctggaacctccaagtgaaacttgagcccatagtaaatctcttaccagacaaaggaagactcatggactttctcctccagagaaaggaatgcaagatggtcatcctgtctgtctgttcacagatgttaagtgagtcagacagagcatcgctgcccgtgatagccactgtttttgataaactcaaccatgagtataaaaagtacctggatgccgagcagagttatgcgatggcggtggaagcagggcagagccgaagcagcccgctcctcaagaggccggtgcggacccaggcggtgctggaccagtcagatgtgtacacccatgtcctgtcagccttcgtggaaaagaaggagatgcctcataaatttgtgatagccgtgctgatggaatacattcgttctcttaaccagtttcagattgcagtacagcattacctacatgaacttgttatcaaaacccttgtccagcacaacctcttttatatgctgcatcagttcctgcagtaccacgtcctcagcgactccaaacctttggcttgtctgctgttatccctagagagtttctatcctcctgctcatcagctatctctggacatgctgaaggtaactctgatgtgtgaggttttagactatggaaactaactctgttcctgttgtttgcactgacctggacttctctcccttactgctagcgactttcaacagcaaatgatgaaatagtagaagttctcctttccaaacaccaagtgttagctgccttaaggtttatccggggcattggtggccatgacaacatttctgcacgaaaatttttagatgctgcaaagcagactgaagacaacatgcttttctatacaatattccgcttttttgaacagcgaaaccagcgtttgcgagggagccccaatttcacaccaggggaacactgtgaagaacatgttgcttttttcaaacagatttttggagaccaagctctaatgaggcctacaacattctgaaatcacttgctgtttttttatataaaaatgtgtacaaagttaatttattgcattaataaagctctttaaactata

SEQ ID NO: 360079 - DNA, 3718 bp, Homo sapiens
gtgggggcgtggcaccaggaagcggcgtccgcgccgggcccagagccgcagccgcagccgccgctacagtccgggccgggctccaccgcgcatcctgctccactctggcgaccgcccccggggcccccgccgcgggcgcggcgcccgccatgggcgaggaggactactatctggagctgtgcgagcggccggtgcagttcgagaaggcgaaccctgtcaactgcgtcttcttcgatgaggccaacaagcaggtttttgctgttcgatctggtggagctactggcgtggtagttaaaggcccagatgataggaatcccatctcatttagaatggatgacaaaggagaagtgaagtgcattaagttttccttagaaaataagatattggctgttcagaggacctcaaagactgtggatttttgtaattttatccctgataattcccagctggaatacacacaggagtgcaagactaagaatgccaacattctaggattctgctggactagttcaactgaaattgtcttcataacagatcaaggaatcgaattttaccaggtattaccagagaaacggagtctgaaactcttgaagagccacaatctcaatgtgaattggtacatgtactgccccgagagcgccgtgatcttgctgtctaccacggtcctggagaatgtcctgcagccttttcactttagggctggcactatgtcgaagctgcccaaatttgagattgaattaccagctgcgcctaagtcaactaaacccagcctttccgaaagagacatcgcaatggctaccatatacgggcagctgtatgttctcttcttgaggcatcattctcggacctccaacagcacaggagcggaggtggtcctctatcatctaccacgagaaggtgcctgtaaaaagatgcacatattgaagttaaataggacgggaaagtttgccctgaacgtggtggacaacctggtagtcgtgcatcatcaggatacagagacatcggtaatattcgatatcaagttacggggagagtttgacggctccgttaccttccaccaccccgtgcttcccgctcgatcgatccagccctatcagatccccatcacaggtcctgctgccgtgaccagccagtctcctgttccatgtaaactctattcttcatcttggattgtctttcaacctgacatcattatcagcgcaagccaaggttacctctggaacctccaagtgaaacttgagcccatagtaaatctcttaccagacaaaggaagactcatggactttctcctccagagaaaggaatgcaagatggtcatcctgtctgtctgttcacagatgttaagtgagtcagacagagcatcgctgcccgtgatagccactgtttttgataaactcaaccatgagtataaaaagtacctggatgccgagcagagttatgcgatggcggtggaagcagggcagagccgaagcagcccgctcctcaagaggccggtgcggacccaggcggtgctggaccagtcagatgtgtacacccatgtcctgtcagccttcgtggaaaagaaggtgggccgcagctttccgcctcttctggactgagaatgctcaaaacaaggaagttgctgaaaacgaggagacttcatgtgattagagtcacttgaagtgattagaatcactggagtttccttgggtgaggccctagagctggtagtttggcttctaatgctgaggcctaaagcataattgttgacgggtggttctggagcgatttgtgcaaaaccagtgaaagatgaacactgggccattttaagatggaaacaaggtgggggttggatagagagttatatgcagcctcttttgcacctcgttggtatttgtaagaccacatttttttctccctaggagatgcctcataaatttgtgatagccgtgctgatggaatacattcgttctcttaaccagtttcagattgcagtacagccttcaaatcatctgggcccaagttaaaacagaaggaatttaaaaaaaaaacacagtcactgtcttagaagatgactcatatgctaagacaggtctgcctccctgactcagaatgctgagtgactcctgacattattagttggaatgggaagtgtaaggtcaagttggggtctttacctgcatgacgaaaccacttcttgtaatgacagacttttactgtgttggttagaatagccagtccttggggagcctctagtctgttgtagctgaatgatttggaagtgttctttcacttttaacttttgtcctcagccattacctacatgaacttgttatcaaaacccttgtccagcacaacctcttttatatgctgcatcagttcctgcagtaccacgtcctcagcgactccaaacctttggcttgtctgctgttatccctagagagtttctatcctcctgctcatcagctatctctggacatgctgaaggtaactctgatgtgtgaggttttagactatggaaactaactctgttcctgttgtttgcactgacctggacttctctcccttactgctagcgactttcaacagcaaatgatgaaatagtagaagttctcctttccaaacaccaagtgttagctgccttaaggtttatccggggcattggtggccatgacaacatttctgcacgaaaatttttagatgctgcaaagcagactgaagacaacatgcttttctatacaatattccgcttttttgaacagcgaaaccagcgtttgcgagggagccccaatttcacaccaggggaacactgtgaagaacatgttgcttttttcaaacagatttttggagaccaagctctaatgaggcctacaacattctgaaatcacttgctgtttttttatataaaaatgtgtacaaagttaatttattgcattaataaagctctttaaactataaaatgttataaagtgtatctacaacctcaactgtcactaaaaatatggtatagaacttgtgggatggcttactcctaaaaggagagacagacagtgcattgattggcctttacagagtgtcagtgagcggatcacattcacagccatctagtgtcacctcctgcttgccaaagaatgaggtttctttcctgaagaggctgggagaagtttagtgtcctgtggttgcctccagatctagtaatactgcttcccaagtcaactgtgcattcctgagttcacaggcgctacgttcaaagctgctgccaaacaaccgatggttggcaccatccggtgttcaacttggccttgccgatgcagcacccgtccagtggtaaaccgaccgacccttagacacagttcagtcaggatgccctgcgagagggctagaaatttagaagccgttcgcgctctgttcctttgtatcgctcttcagtggcacaacttttggctttatttactgatggccctatgagagagagagactttttcttatttctgcaggagaaagggagctagttggctgggcatagtggctcacgcctgtaatcccactttggaagactgaggcaggagaattgcttgagaccagcctggacaacagagtgagaccacatctctctccctctcttttggagatgggctctttgctttcttcctcaggctgcagtgcagtggtatgaacacgactcactgcatcctaagcccacccttctgggctcaagcaagcttcctgcctcagccta

SEQ ID NO: 360080 - DNA, 1820 bp, Homo sapiens
cgaactaattatttagataattaagtggctgggcacagtggctcatgcctgtaatcgcagcatgttgggaggctgaggtgggcagatcacttaagcccaggagttggagaccagcctaggtaacatagaccttgtcttcacaaaaaaaaaaaaaaaaaaaaaaaaaaaaaaagaaaaaaagttagggcatggtcacatgcctgtagtcctagctactctgaaggctgaggcaggaggaccacttgagccaaggagttcgtggttatagtgggctatgatcaactactgcactcaagcctggacagcagagcaacaccctctcttaaagaaaaaaaaagataattaagctacaagccacatttatttgaaacattctccgtggatgatctgggtatttgattttgaatccttcaagtaaatttctcagttccttaacgtgcatatgtaaacgatcatgagtcatctttggttattaaaaataacccaaaccacagtgattgaagccttgacatgctttctttttcttggtgagattttcctggattgtcagctcctccccccttcctccccgtacgtgctttcagtgagacggaacagttcatttcttccttgactacaattgaataaacatttcgtaatgacattaaaaagtattgacttttgtgtcataagtaccagcatttgcagcattttctgactgcatcgttgcacttatgttttctcaatttgtaggtcctgctgccgtgaccagccagtctcctgttccatgtaaactctattcttcatcttggattgtctttcaacctgacatcattatcagcgcaagccaaggttacctctggaacctccaagtgaaacttgagcccatagtaaatctcttaccagacaaaggaagactcatggactttctcctccagagaaaggaatgcaagatggtcatcctgtctgtctgttcacagatgttaagtgagtcagacagagcatcgctgcccgtgatagccactgtttttgataaactcaaccatgagtataaaaagtacctggatgccgagcagagttatgcgatggcggtggaagcagggcagagccgaagcagcccgctcctcaagaggccggtgcggacccaggcggtgctggaccagtcagatgtgtacacccatgtcctgtcagccttcgtggaaaagaaggagatgcctcataaatttgtgatagccgtgctgatggaatacattcgttctcttaaccagtttcagattgcagtacagcattacctacatgaacttgttatcaaaacccttgtccagcacaacctcttttatatgctgcatcagttcctgcagtaccacgtcctcagcgactccaaacctttggcttgtctgctgttatccctagagagtttctatcctcctgctcatcagctatctctggacatgctgaagcgactttcaacagcaaatgatgaaatagtagaagttctcctttccaaacaccaagtgttagctgccttaaggtttatccggggcattggtggccatgacaacatttctgcacgaaaatttttagatgctgcaaagcagactgaagacaacatgcttttctatacaatattccgcttttttgaacagcgaaaccagcgtttgcgagggagccccaatttcacaccaggggaacactgtgaagaacatgttgcttttttcaaacagatttttggagaccaagctctaatgaggcctacaacattctgaaatcacttgctgtttttttatataaaaatgtgtacaaagttaatttattgcattaataaagctctttaaactata

SEQ ID NO: 360081 - DNA, 1984 bp, Homo sapiens
gtgggggcgtggcaccaggaagcggcgtccgcgccgggcccagagccgcagccgcagccgccgctacagtccgggccgggctccaccgcgcatcctgctccactctggcgaccgcccccggggcccccgccgcgggcgcggcgcccgccatgggcgaggaggactactatctggagctgtgcgagcggccggtgcagttcgagaaggcgaaccctgtcaactgcgtcttcttcgatgaggccaacaagcaggtttttgctgttcgatctggtggagctactggcgtggtagttaaaggcccagatgataggaatcccatctcatttagaatggatgacaaaggagaagtgaagtgcattaagttttccttagaaaataagatattggctgttcagaggacctcaaagactgtggatttttgtaattttatccctgataattcccagctggaatacacacaggagtgcaagactaagaatgccaacattctaggattctgctggactagttcaactgaaattgtcttcataacagatcaaggaatcgaattttaccaggtattaccagagaaacggagtctgaaactcttgaagagccacaatctcaatgtgaattggtacatgtactgccccgagagcgccgtgatcttgctgtctaccacggtcctggagaatgtcctgcagccttttcactttagggctggcactatgtcgaagctgcccaaatttgagattgaattaccagctgcgcctaagtcaactaaacccagcctttccgaaagagacatcgcaatggctaccatatacgggcagctgtatgttctcttcttgaggcatcattctcggacctccaacagcacaggagcggaggtggtcctctatcatctaccacgagaaggtgcctgtaaaaagatgcacatattgaagttaaataggacgggaaagtttgccctgaacgtggtggacaacctggtagtcgtgcatcatcaggatacagagacatcggtaatattcgatatcaagttacggggagagtttgacggctccgttaccttccaccaccccgtgcttcccgctcgatcgatccagccctatcagatccccatcacaggtcctgctgccgtgaccagccagtctcctgttccatgtaaactctattcttcatcttggattgtctttcaacctgacatcattatcagcgcaagccaaggttacctctggaacctccaagtgaaacttgagcccatagtaaatctcttaccagacaaaggaagactcatggactttctcctccagagaaaggaatgcaagatggtcatcctgtctgtctgttcacagatgttaagtgagtcagacagagcatcgctgcccgtgatagccactgtttttgataaactcaaccatgagtataaaaagtacctggatgccgagcagagttatgcgatggcggtggaagcagggcagagccgaagcagcccgctcctcaagaggccggtgcggacccaggcggtgctggaccagtcagatgtgtacacccatgtcctgtcagccttcgtggaaaagaaggagatgcctcataaatttgtgatagccgtgctgatggaatacattcgttctcttaaccagtttcagattgcagtacagcattacctacatgaacttgttatcaaaacccttgtccagcacaacctcttttatatgctgcatcagttcctgcagtaccacgtcctcagcgactccaaacctttggcttgtctgctgttatccctagagagtttctatcctcctgctcatcagctatctctggacatgctgaagcgactttcaacagcaaatgatgaaatagtagaagttctcctttccaaacaccaagtgttaggtctacctggccaggtagacctaactattagtggcaggttagttgtttgtagggctcatggtaggggtaaaaggagggcaatttctagatcaaataataagaaggt

SEQ ID NO: 360082 - DNA, 2098 bp, Homo sapiens
  misc_feature (2079)..(2079): n is a, c, g, or t
gtgggggcgtggcaccaggaagcggcgtccgcgccgggcccagagccgcagccgcagccgccgctacagtccgggccgggctccaccgcgcatcctgctccactctggcgaccgcccccggggcccccgccgcgggcgcggcgcccgccatgggcgaggaggactactatctggagctgtgcgagcggccggtgcagttcgagaaggcgaaccctgtcaactgcgtcttcttcgatgaggccaacaagcaggtttttgctgttcgatctggtggagctactggcgtggtagttaaaggcccagatgataggaatcccatctcatttagaatggatgacaaaggagaagtgaagtgcattaagttttccttagaaaataagatattggctgttcagaggacctcaaagactgtggatttttgtaattttatccctgataattcccagctggaatacacacaggagtgcaagactaagaatgccaacattctaggattctgctggactagttcaactgaaattgtcttcataacagatcaaggaatcgaattttaccaggtattaccagagaaacggagtctgaaactcttgaagagccacaatctcaatgtgaattggtacatgtactgccccgagagcgccgtgatcttgctgtctaccacggtcctggagaatgtcctgcagccttttcactttagggctggcactatgtcgaagctgcccaaatttgagattgaattaccagctgcgcctaagtcaactaaacccagcctttccgaaagagacatcgcaatggctaccatatacgggcagctgtatgttctcttcttgaggcatcattctcggacctccaacagcacaggagcggaggtggtcctctatcatctaccacgagaaggtgcctgtaaaaagatgcacatattgaagttaaataggacgggaaagtttgccctgaacgtggtggacaacctggtagtcgtgcatcatcaggatacagagacatcggtaatattcgatatcaagttacggggagagtttgacggctccgttaccttccaccaccccgtgcttcccgctcgatcgatccagccctatcagatccccatcacaggtcctgctgccgtgaccagccagtctcctgttccatgtaaactctattcttcatcttggattgtctttcaacctgacatcattatcagcgcaagccaaggttacctctggaacctccaagtgaaacttgagcccatagtaaatctcttaccagacaaaggaagactcatggactttctcctccagagaaaggaatgcaagatggtcatcctgtctgtctgttcacagatgttaagtgagtcagacagagcatcgctgcccgtgatagccactgtttttgataaactcaaccatgagtataaaaagtacctggatgccgagcagagttatgcgatggcggtggaagcagggcagagccgaagcagcccgctcctcaagaggccggtgcggacccaggcggtgctggaccagtcagatgtgtacacccatgtcctgtcagccttcgtggaaaagaaggtgggccgcagctttccgcctcttctggactgagaatgctcaaaacaaggaagttgctgaaaacgaggagacttcatgtgattagagtcacttgaagtgattagaatcactggagtttccttgggtgaggccctagagctggtagtttggcttctaatgctgaggcctaaagcataattgttgacgggtggttctggagcgatttgtgcaaaaccagtgaaagatgaacactgggccattttaagatggaaacaaggtgggggttggatagagagttatatgcagcctcttttgcacctcgttggtatttgtaagaccacatttttttctccctaggagatgcctcataaatttgtgatagccgtgctgatggaatacattcgttctcttaaccagtttcagattgcagtacagctatgtaactgagtaagacagggagaaatattaatccgtgagtggctcccagtaagaccatggccaaatacatcctgaagtagaatatctgggtcaaacnataatagggatcctctaga

SEQ ID NO: 360083 - DNA, 1371 bp, Homo sapiens
gagacggagttttgttcttattgcccaggctggagtgcaatggtgagatcttggctcaccgcaacctctgcctcctgggttcaagggattctcctgcctcagcctcctgagtagctgggattacaggcatgcgcacaggaaaaagttgtatctaagtagagaaagtgttttccgctcatatcctgggtccacatcgaagaattcagtccttgtggatgaactgtaaacagcacccttcctctaagatgccgaagatcatagtttgtggtttttttctttcaggcggtggaagcagggcagagccgaagcagcccgctcctcaagaggccggtgcggacccaggcggtgctggaccagtcagatgtgtacacccatgtcctgtcagccttcgtggaaaagaaggtgggccgcagctttccgcctcttctggactgagaatgctcaaaacaaggaagttgctgaaaacgaggagacttcatgtgattagagtcacttgaagtgattagaatcactggagtttccttgggtgaggccctagagctggtagtttggcttctaatgctgaggcctaaagcataattgttgacgggtggttctggagcgatttgtgcaaaaccagtgaaagatgaacactgggccattttaagatggaaacaaggtgggggttggatagagagttatatgcagcctcttttgcacctcgttggtatttgtaagaccacatttttttctccctaggagatgcctcataaatttgtgatagccgtgctgatggaatacattcgttctcttaaccagtttcagattgcagtacagcattacctacatgaacttgttatcaaaacccttgtccagcacaacctcttttatatgctgcatcagttcctgcagtaccacgtcctcagcgactccaaacctttggcttgtctgctgttatccctagagagtttctatcctcctgctcatcagctatctctggacatgctgaagcgactttcaacagcaaatgatgaaatagtagaagttctcctttccaaacaccaagtgttagctgccttaaggtttatccggggcattggtggccatgacaacatttctgcacgaaaatttttagatgctgcaaagcagactgaagacaacatgcttttctatacaatattccgcttttttgaacagcgaaaccagcgtttgcgagggagccccaatttcacaccaggggaacactgtgaagaacatgttgcttttttcaaacagatttttggagaccaagctctaatgaggcctacaacattctgaaatcacttgctgtttttttatataaaaatgtgtacaaagttaatttattgcattaataaagctctttaaactata

SEQ ID NO: 360084 - DNA, 1502 bp, Homo sapiens
gtgggggcgtggcaccaggaagcggcgtccgcgccgggcccagagccgcagccgcagccgccgctacagtccgggccgggctccaccgcgcatcctgctccactctggcgaccgcccccggggcccccgccgcgggcgcggcgcccgccatgggcgaggaggactactatctggagctgtgcgagcggccggtgcagttcgagaaggcgaaccctgtcaactgcgtcttcttcgatgaggccaacaagcaggtttttgctgttcgatctggtggagctactggcgtggtagttaaaggcccagatgataggaatcccatctcatttagaatggatgacaaaggagaagtgaagtgcattaagttttccttagaaaataagatattggctgttcagaggacctcaaagactgtggatttttgtaattttatccctgataattcccagctggaatacacacaggagtgcaagactaagaatgccaacattctaggattctgctggactagttcaactgaaattgtcttcataacagatcaaggaatcgaattttaccaggtattaccagagaaacggagtctgaaactcttgaagagccacaatctcaatgtgaattggtacatgtactgccccgagagcgccgtgatcttgctgtctaccacggtcctggagaatgtcctgcagccttttcactttagggctggcactatgtcgaagctgcccaaatttgagattgaattaccagctgcgcctaagtcaactaaacccagcctttccgaaagagacatcgcaatggctaccatatacgggcagctgtatgttctcttcttgaggcatcattctcggacctccaacagcacaggagcggaggtggtcctctatcatctaccacgagaaggtgcctgtaaaaagatgcacatattgaagttaaataggacgggaaagtttgccctgaacgtggtggacaacctggtagtcgtgcatcatcaggatacagagacatcggtaatattcgatatcaagttacggggagagtttgacggctccgttaccttccaccaccccgtgcttcccgctcgatcgatccagccctatcagatccccatcacaggtcctgctgccgtgaccagccagtctcctgttccatgtaaactctattcttcatcttggattgtctttcaacctgacatcattatcagcgcaagccaaggttacctctggaacctccaagtgaaacttgagcccatagtaaatctcttaccagacaaaggaagactcatggactttctcctccagagaaaggaatgcaagatggtcatcctgtctgtctgttcacagatgttaagtgagtcagacagagcatcgctgcccgtgatagccactgtttttgataaactcaaccatgagtataaaaagtacctggatgccgagcagagttatgcgatggcggtggaagcagggcagagccgactgtcatctcagcggggatcctaatagagtcga

SEQ ID NO: 360085 - DNA, 286 bp, Homo sapiens
ctagagggcactctgtatacccgtcagctcctggagccattcattctatgctgggcagacaggctgtgagaggacatgggggacggtggaaaggatccaaagacgaagtctgtgtttatccttgttggttttacacagggaatgatgaaacattgaaggggtttaataagcttttcctaaaacattttccccctaaacaggctggcactatgtcgaagctgcccaaatttgagattgaattaccagctgcgcctaagtcaactaaacccagcctttccgaaagaga

SEQ ID NO: 360086 - DNA, 1969 bp, Homo sapiens
gtgggggcgtggcaccaggaagcggcgtccgcgccgggcccagagccgcagccgcagccgccgctacagtccgggccgggctccaccgcgcatcctgctccactctggcgaccgcccccggggcccccgccgcgggcgcggcgcccgccatgggcgaggaggactactatctggagctgtgcgagcggccggtgcagttcgagaaggcgaaccctgtcaactgcgtcttcttcgatgaggccaacaagcaggtttttgctgttcgatctggtggagctactggcgtggtagttaaaggcccagatgataggaatcccatctcatttaggtattaccagagaaacggagtctgaaactcttgaagagccacaatctcaatgtgaattggtacatgtactgccccgagagcgccgtgatcttgctgtctaccacggtcctggagaatgtcctgcagccttttcactttagggctggcactatgtcgaagctgcccaaatttgagattgaattaccagctgcgcctaagtcaactaaacccagcctttccgaaagagacatcgcaatggctaccatatacgggcagctgtatgttctcttcttgaggcatcattctcggacctccaacagcacaggagcggaggtggtcctctatcatctaccacgagaaggtgcctgtaaaaagatgcacatattgaagttaaataggacgggaaagtttgccctgaacgtggtggacaacctggtagtcgtgcatcatcaggatacagagacatcggtaatattcgatatcaagttacggggagagtttgacggctccgttaccttccaccaccccgtgcttcccgctcgatcgatccagccctatcagatccccatcacaggtcctgctgccgtgaccagccagtctcctgttccatgtaaactctattcttcatcttggattgtctttcaacctgacatcattatcagcgcaagccaaggttacctctggaacctccaagtgaaacttgagcccatagtaaatctcttaccagacaaaggaagactcatggactttctcctccagagaaaggaatgcaagatggtcatcctgtctgtctgttcacagatgttaagtgagtcagacagagcatcgctgcccgtgatagccactgtttttgataaactcaaccatgagtataaaaagtacctggatgccgagcagagttatgcgatggcggtggaagcagggcagagccgaagcagcccgctcctcaagaggccggtgcggacccaggcggtgctggaccagtcagatgtgtacacccatgtcctgtcagccttcgtggaaaagaaggagatgcctcataaatttgtgatagccgtgctgatggaatacattcgttctcttaaccagtttcagattgcagtacagcattacctacatgaacttgttatcaaaacccttgtccagcacaacctcttttatatgctgcatcagttcctgcagtaccacgtcctcagcgactccaaacctttggcttgtctgctgttatccctagagagtttctatcctcctgctcatcagctatctctggacatgctgaagcgactttcaacagcaaatgatgaaatagtagaagttctcctttccaaacaccaagtgttagctgccttaaggtttatccggggcattggtggccatgacaacatttctgcacgaaaatttttagatgctgcaaagcagactgaagacaacatgcttttctatacaatattccgcttttttgaacagcgaaaccagcgtttgcgagggagccccaatttcacaccaggggaacactgtgaagaacatgttgcttttttcaaacagatttttggagaccaagctctaatgaggcctacaacattctgaaatcacttgctgtttttttatataaaaatgtgtacaaagttaatttattgcattaataaagctctttaaactata

SEQ ID NO: 360087 - DNA, 1536 bp, Homo sapiens
ggatgtcccctggtacgggagtggccgtattatacttccgtttgatcaaaccaaaaattatttcagtaattgtaaattccctctcttttactccacgtttaaaccattgagaatttcagtcagctctacttctctccaccttctacaactatgatctagatgaccacaatcatcgttccactcccgtaccctggtacgggagtggaggtggtcctctatcatctaccacgagaaggtgcctgtaaaaagatgcacatattgaagttaaataggacgggaaagtttgccctgaacgtggtggacaacctggtagtcgtgcatcatcaggatacagagacatcggtaatattcgatatcaagttacggggagagtttgacggctccgttaccttccaccaccccgtgcttcccgctcgatcgatccagccctatcagatccccatcacaggtcctgctgccgtgaccagccagtctcctgttccatgtaaactctattcttcatcttggattgtctttcaacctgacatcattatcagcgcaagccaaggttacctctggaacctccaagtgaaacttgagcccatagtaaatctcttaccagacaaaggaagactcatggactttctcctccagagaaaggaatgcaagatggtcatcctgtctgtctgttcacagatgttaagtgagtcagacagagcatcgctgcccgtgatagccactgtttttgataaactcaaccatgagtataaaaagtacctggatgccgagcagagttatgcgatggcggtggaagcagggcagagccgaagcagcccgctcctcaagaggccggtgcggacccaggcggtgctggaccagtcagatgtgtacacccatgtcctgtcagccttcgtggaaaagaaggagatgcctcataaatttgtgatagccgtgctgatggaatacattcgttctcttaaccagtttcagattgcagtacagcattacctacatgaacttgttatcaaaacccttgtccagcacaacctcttttatatgctgcatcagttcctgcagtaccacgtcctcagcgactccaaacctttggcttgtctgctgttatccctagagagtttctatcctcctgctcatcagctatctctggacatgctgaagcgactttcaacagcaaatgatgaaatagtagaagttctcctttccaaacaccaagtgttagctgccttaaggtttatccggggcattggtggccatgacaacatttctgcacgaaaatttttagatgctgcaaagcagactgaagacaacatgcttttctatacaatattccgcttttttgaacagcgaaaccagcgtttgcgagggagccccaatttcacaccaggggaacactgtgaagaacatgttgcttttttcaaacagatttttggagaccaagctctaatgaggcctacaacattctgaaatcacttgctgtttttttatataaaaatgtgtacaaagttaatttattgcattaataaagctctttaaactata

SEQ ID NO: 360088 - DNA, 2534 bp, Homo sapiens
gtgggggcgtggcaccaggaagcggcgtccgcgccgggcccagagccgcagccgcagccgccgctacagtccgggccgggctccaccgcgcatcctgctccactctggcgaccgcccccggggcccccgccgcgggcgcggcgcccgccatgggcgaggaggactactatctggagctgtgcgagcggccggtgcagttcgagaaggcgaaccctgtcaactgcgtcttcttcgatgaggccaacaagcaggtttttgctgttcgatctggtggagctactggcgtggtagttaaaggcccagatgataggaatcccatctcatttagaatggatgacaaaggagaagtgaagtgcattaagttttccttagaaaataagatattggctgttcagaggacctcaaagactgtggatttttgtaattttatccctgataattcccagctggaatacacacaggagtgcaagactaagaatgccaacattctaggattctgctggactagttcaactgaaattgtcttcataacagatcaaggaatcgaattttaccaggtattaccagagaaacggagtctgaaactcttgaagagccacaatctcaatgtgaattggtacatgtactgccccgagagcgccgtgatcttgctgtctaccacggtcctggagaatgtcctgcagccttttcactttagggctggcactatgtcgaagctgcccaaatttgagattgaattaccagctgcgcctaagtcaactaaacccagcctttccgaaagagacatcgcaatggctaccatatacgggcagctgtatgttctcttcttgaggcatcattctcggacctccaacagcacaggagcggaggtggtcctctatcatctaccacgagaaggtgcctgtaaaaagatgcacatattgaagttaaataggacgggaaagtttgccctgaacgtggtggacaacctggtagtcgtgcatcatcaggatacagagacatcggtaatattcgatatcaagttacggggagagtttgacggctccgttaccttccaccaccccgtgcttcccgctcgatcgatccagccctatcagatccccatcacaggtcctgctgccgtgaccagccagtctcctgttccatgtaaactctattcttcatcttggattgtctttcaacctgacatcattatcagcgcaagccaaggttacctctggaacctccaagtgaaacttgagcccatagtaaatctcttaccagacaaaggaagactcatggactttctcctccagagaaaggaatgcaagatggtcatcctgtctgtctgttcacagatgttaagtgagtcagacagagcatcgctgcccgtgatagccactgtttttgataaactcaaccatgagtataaaaagtacctggatgccgagcagagttatgcgatggcggtggaagcagggcagagccgaagcagcccgctcctcaagaggccggtgcggacccaggcggtgctggaccagtcagatgtgtacacccatgtcctgtcagccttcgtggaaaagaaggtgggccgcagctttccgcctcttctggactgagaatgctcaaaacaaggaagttgctgaaaacgaggagacttcatgtgattagagtcacttgaagtgattagaatcactggagtttccttgggtgaggccctagagctggtagtttggcttctaatgctgaggcctaaagcataattgttgacgggtggttctggagcgatttgtgcaaaaccagtgaaagatgaacactgggccattttaagatggaaacaaggtgggggttggatagagagttatatgcagcctcttttgcacctcgttggtatttgtaagaccacatttttttctccctaggagatgcctcataaatttgtgatagccgtgctgatggaatacattcgttctcttaaccagtttcagattgcagtacagcattacctacatgaacttgttatcaaaacccttgtccagcacaacctcttttatatgctgcatcagttcctgcagtaccacgtcctcagcgactccaaacctttggcttgtctgctgttatccctagagagtttctatcctcctgctcatcagctatctctggacatgctgaagcgactttcaacagcaaatgatgaaatagtagaagttctcctttccaaacaccaagtgttagctgccttaaggtttatccggggcattggtggccatgacaacatttctgcacgaaaatttttagatgctgcaaagcagactgaagacaacatgcttttctatacaatattccgcttttttgaacagcgaaaccagcgtttgcgagggagccccaatttcacaccaggggaacactgtgaagaacatgttgcttttttcaaacagatttttggagaccaagctctaatgaggcctacaacattctgaaatcacttgctgtttttttatataaaaatgtgtacaaagttaatttattgcattaataaagctctttaaactata

SEQ ID NO: 360089 - DNA, 2856 bp, Homo sapiens
gtgggggcgtggcaccaggaagcggcgtccgcgccgggcccagagccgcagccgcagccgccgctacagtccgggccgggctccaccgcgcatcctgctccactctggcgaccgcccccggggcccccgccgcgggcgcggcgcccgccatgggcgaggaggactactatctggagctgtgcgagcggccggtgcagttcgagaaggcgaaccctgtcaactgcgtcttcttcgatgaggccaacaagcaggtttttgctgttcgatctggtggagctactggcgtggtagttaaaggcccagatgataggaatcccatctcatttagaatggatgacaaaggagaagtgaagtgcattaagttttccttagaaaataagatattggctgttcagaggacctcaaagactgtggatttttgtaattttatccctgataattcccagctggaatacacacaggagtgcaagactaagaatgccaacattctaggattctgctggactagttcaactgaaattgtcttcataacagatcaaggaatcgaattttaccaggtattaccagagaaacggagtctgaaactcttgaagagccacaatctcaatgtgaattggtacatgtactgccccgagagcgccgtgatcttgctgtctaccacggtcctggagaatgtcctgcagccttttcactttagggctggcactatgtcgaagctgcccaaatttgagattgaattaccagctgcgcctaagtcaactaaacccagcctttccgaaagagacatcgcaatggctaccatatacgggcagctgtatgttctcttcttgaggcatcattctcggacctccaacagcacaggagcggaggtggtcctctatcatctaccacgagaaggtgcctgtaaaaagatgcacatattgaagttaaataggacgggaaagtttgccctgaacgtggtggacaacctggtagtcgtgcatcatcaggatacagagacatcggtaatattcgatatcaagttacggggagagtttgacggctccgttaccttccaccaccccgtgcttcccgctcgatcgatccagccctatcagatccccatcacaggtcctgctgccgtgaccagccagtctcctgttccatgtaaactctattcttcatcttggattgtctttcaacctgacatcattatcagcgcaagccaaggttacctctggaacctccaagtgaaacttgagcccatagtaaatctcttaccagacaaaggaagactcatggactttctcctccagagaaaggaatgcaagatggtcatcctgtctgtctgttcacagatgttaagtgagtcagacagagcatcgctgcccgtgatagccactgtttttgataaactcaaccatgagtataaaaagtacctggatgccgagcagagttatgcgatggcggtggaagcagggcagagccgaagcagcccgctcctcaagaggccggtgcggacccaggcggtgctggaccagtcagatgtgtacacccatgtcctgtcagccttcgtggaaaagaaggagatgcctcataaatttgtgatagccgtgctgatggaatacattcgttctcttaaccagtttcagattgcagtacagcattacctacatgaacttgttatcaaaacccttgtccagcacaacctcttttatatgctgcatcagttcctgcagtaccacgtcctcagcgactccaaacctttggcttgtctgctgttatccctagagagtttctatcctcctgctcatcagctatctctggacatgctgaagatgctgcaaagcagactgaagacaacatgcttttctatacaatattccgcttttttgaacagcgaaaccagcgtttgcgagggagccccaatttcacaccaggggaacactgtgaagaacatgttgcttttttcaaacagatttttggagaccaagctctaatgaggcctacaacattctgaaatcacttgctgtttttttatataaaaatgtgtacaaagttaatttattgcattaataaagctctttaaactataaaatgttataaagtgtatctacaacctcaactgtcactaaaaatatggtatagaacttgtgggatggcttactcctaaaaggagagacagacagtgcattgattggcctttacagagtgtcagtgagcggatcacattcacagccatctagtgtcacctcctgcttgccaaagaatgaggtttctttcctgaagaggctgggagaagtttagtgtcctgtggttgcctccagatctagtaatactgcttcccaagtcaactgtgcattcctgagttcacaggcgctacgttcaaagctgctgccaaacaaccgatggttggcaccatccggtgttcaacttggccttgccgatgcagcacccgtccagtggtaaaccgaccgacccttagacacagttcagtcaggatgccctgcgagagggctagaaatttagaagccgttcgcgctctgttcctttgtatcgctcttcagtggcacaacttttggctttatttactgatggccctatgagagagagagactttttcttatttctgcaggagaaagggagctagttggctgggcatagtggctcacgcctgtaatcccactttggaagactgaggcaggagaattgcttgagaccagcctggacaacagagtgagaccacatctctctccctctcttttggagatgggctctttgctttcttcctcaggctgcagtgcagtggtatgaacacgactcactgcatcctaagcccacccttctgggctcaagcaagcttcctgcctcagccta

SEQ ID NO: 360090 - DNA, 2425 bp, Homo sapiens
gtgggggcgtggcaccaggaagcggcgtccgcgccgggcccagagccgcagccgcagccgccgctacagtccgggccgggctccaccgcgcatcctgctccactctggcgaccgcccccggggcccccgccgcgggcgcggcgcccgccatgggcgaggaggactactatctggagctgtgcgagcggccggtgcagttcgagaaggcgaaccctgtcaactgcgtcttcttcgatgaggccaacaagcaggtttttgctgttcgatctggtggagctactggcgtggtagttaaaggcccagatgataggaatcccatctcatttagaatggatgacaaaggagaagtgaagtgcattaagttttccttagaaaataagatattggctgttcagaggacctcaaagactgtggatttttgtaattttatccctgataattcccagctggaatacacacaggagtgcaagactaagaatgccaacattctaggattctgctggactagttcaactgaaattgtcttcataacagatcaaggaatcgaattttaccaggtattaccagagaaacggagtctgaaactcttgaagagccacaatctcaatgtgaattggtacatgtactgccccgagagcgccgtgatcttgctgtctaccacggtcctggagaatgtcctgcagccttttcactttagggctggcactatgtcgaagctgcccaaatttgagattgaattaccagctgcgcctaagtcaactaaacccagcctttccgaaagagacatcgcaatggctaccatatacgggcagctgtatgttctcttcttgaggcatcattctcggacctccaacagcacaggagcggaggtggtcctctatcatctaccacgagaaggtgcctgtaaaaagatgcacatattgaagttaaataggacgggaaagtttgccctgaacgtggtggacaacctggtagtcgtgcatcatcaggatacagagacatcggtaatattcgatatcaagttacggggagagtttgacggctccgttaccttccaccaccccgtgcttcccgctcgatcgatccagccctatcagatccccatcacaggtcctgctgccgtgaccagccagtctcctgttccatgtaaactctattcttcatcttggattgtctttcaacctgacatcattatcagcgcaagccaaggttacctctggaacctccaagtgaaacttgagcccatagtaaatctcttaccagacaaaggaagactcatggactttctcctccagagaaaggaatgcaagatggtcatcctgtctgtctgttcacagatgttaagtgagtcagacagagcatcgctgcccgtgatagccactgtttttgataaactcaaccatgagtataaaaagtacctggatgccgagcagagttatgcgatggcggtggaagcagggcagagccgaagcagcccgctcctcaagaggccggtgcggacccaggcggtgctggaccagtcagatgtgtacacccatgtcctgtcagccttcgtggaaaagaaggagatgcctcataaatttgtgatagccgtgctgatggaatacattcgttctcttaaccagtttcagattgcagtacagcattacctacatgaacttgttatcaaaacccttgtccagcacaacctcttttatatgctgcatcagttcctgcagtaccacgtcctcagcgactccaaacctttggcttgtctgctgttatccctagagagtttctatcctcctgctcatcagctatctctggacatgctgaagcgactttcaacagcaaatgatgaaatagtagaagttctcctttccaaacaccaagtgttagctgccttaaggtttatccggggcattggtggccatgacaacatttctgcacgaaaatttttagatgctgcaaagcagactgaagacaacatgcttttctatacaatattccgcttttttgaacagcgaaaccagcgtttgcgagggagccccaatttcacaccaggtgagaatgcaatgaaaagacttggggtaaccatagcctcaaagagtagcagagggcactggcagctggtgggcgaggaccctgggttagcatttttgtaaacaacacaatttgataacagcccacctagcccttggcccattatttgtagtagagtgaattcagtatactgacagaatctgaattatgctctggaactcaccgaggaggtgtgttttgagtcaagacacatttaggacccagatcaggcacagcccatctcttatagcagatcttggaatatctcttaaagccaggaataagacggcaaatggtggctaagggttttaaagggtctggggcttattaaggtttcagttttatgaagtatacattggttgat

SEQ ID NO: 360091 - DNA, 2936 bp, Homo sapiens
gtgggggcgtggcaccaggaagcggcgtccgcgccgggcccagagccgcagccgcagccgccgctacagtccgggccgggctccaccgcgcatcctgctccactctggcgaccgcccccggggcccccgccgcgggcgcggcgcccgccatgggcgaggaggactactatctggagctgtgcgagcggccggtgcagttcgagaaggcgaaccctgtcaactgcgtcttcttcgatgaggccaacaagcaggtttttgctgttcgatctggtggagctactggcgtggtagttaaaggcccagatgataggaatcccatctcatttagaatggatgacaaaggagaagtgaagtgcattaagttttccttagaaaataagatattggctgttcagaggacctcaaagactgtggatttttgtaattttatccctgataattcccagctggaatacacacaggagtgcaagactaagaatgccaacattctaggattctgctggactagttcaactgaaattgtcttcataacagatcaaggaatcgaattttaccaggtattaccagagaaacggagtctgaaactcttgaagagccacaatctcaatgtgaattggtacatgtactgccccgagagcgccgtgatcttgctgtctaccacggtcctggagaatgtcctgcagccttttcactttagggctggcactatgtcgaagctgcccaaatttgagattgaattaccagctgcgcctaagtcaactaaacccagcctttccgaaagagacatcgcaatggctaccatatacgggcagctgtatgttctcttcttgaggcatcattctcggacctccaacagcacaggagcggaggtggtcctctatcatctaccacgagaaggtgcctgtaaaaagatgcacatattgaagttaaataggacgggaaagtttgccctgaacgtggtggacaacctggtagtcgtgcatcatcaggatacagagacatcggtaatattcgatatcaagttacggggagagtttgacggctccgttaccttccaccaccccgtgcttcccgctcgatcgatccagccctatcagatccccatcacaggtcctgctgccgtgaccagccagtctcctgttccatgtaaactctattcttcatcttggattgtctttcaacctgacatcattatcagcgcaagccaaggttacctctggaacctccaagtgaaacttgagcccatagtaaatctcttaccagacaaaggaagactcatggactttctcctccagagaaaggaatgcaagatggtcatcctgtctgtctgttcacagatgttaagtgagtcagacagagcatcgctgcccgtgatagccactgtttttgataaactcaaccatgagtataaaaagtacctggatgccgagcagagttatgcgatggcggtggaagcagggcagagccgaagcagcccgctcctcaagaggccggtgcggacccaggcggtgctggaccagtcagatgtgtacacccatgtcctgtcagccttcgtggaaaagaaggtgggccgcagctttccgcctcttctggactgagaatgctcaaaacaaggaagttgctgaaaacgaggagacttcatgtgattagagtcacttgaagtgattagaatcactggagtttccttgggtgaggccctagagctggtagtttggcttctaatgctgaggcctaaagcataattgttgacgggtggttctggagcgatttgtgcaaaaccagtgaaagatgaacactgggccattttaagatggaaacaaggtgggggttggatagagagttatatgcagcctcttttgcacctcgttggtatttgtaagaccacatttttttctccctaggagatgcctcataaatttgtgatagccgtgctgatggaatacattcgttctcttaaccagtttcagattgcagtacagccttcaaatcatctgggcccaagttaaaacagaaggaatttaaaaaaaaaacacagtcactgtcttagaagatgactcatatgctaagacaggtctgcctccctgactcagaatgctgagtgactcctgacattattagttggaatgggaagtgtaaggtcaagttggggtctttacctgcatgacgaaaccacttcttgtaatgacagacttttactgtgttggttagaatagccagtccttggggagcctctagtctgttgtagctgaatgatttggaagtgttctttcacttttaacttttgtcctcagccattacctacatgaacttgttatcaaaacccttgtccagcacaacctcttttatatgctgcatcagttcctgcagtaccacgtcctcagcgactccaaacctttggcttgtctgctgttatccctagagagtttctatcctcctgctcatcagctatctctggacatgctgaaggtaactctgatgtgtgaggttttagactatggaaactaactctgttcctgttgtttgcactgacctggacttctctcccttactgctagcgactttcaacagcaaatgatgaaatagtagaagttctcctttccaaacaccaagtgttagctgccttaaggtttatccggggcattggtggccatgacaacatttctgcacgaaaatttttagatgctgcaaagcagactgaagacaacatgcttttctatacaatattccgcttttttgaacagcgaaaccagcgtttgcgagggagccccaatttcacaccaggggaacactgtgaagaacatgttgcttttttcaaacagatttttggagaccaagctctaatgaggcctacaacattctgaaatcacttgctgtttttttatataaaaatgtgtacaaagttaatttattgcattaataaagctctttaaactata

SEQ ID NO: 360092 - DNA, 1062 bp, Homo sapiens
tttttttaaccgtaaccagaaaggggttgcgaatgacatctagctgtcaggtctttaaagtattgtatttcttagagtgtcctttaaaggtacttttgcattggtaaccttttgagattagtttttatcatagcaacgtgtggaaattctgaagctgacatgaagttggtttgatccgtgtgtgaacattgtgcctttccagtgttaagtgagtcagacagagcatcgctgcccgtgatagccactgtttttgataaactcaaccatgagtataaaaagtacctggatgccgagcagagttatgcgatggcggtggaagcagggcagagccgaagcagcccgctcctcaagaggccggtgcggacccaggcggtgctggaccagtcagatgtgtacacccatgtcctgtcagccttcgtggaaaagaaggagatgcctcataaatttgtgatagccgtgctgatggaatacattcgttctcttaaccagtttcagattgcagtacagcattacctacatgaacttgttatcaaaacccttgtccagcacaacctcttttatatgctgcatcagttcctgcagtaccacgtcctcagcgactccaaacctttggcttgtctgctgttatccctagagagtttctatcctcctgctcatcagctatctctggacatgctgaagcgactttcaacagcaaatgatgaaatagtagaagttctcctttccaaacaccaagtgttagctgccttaaggtttatccggggcattggtggccatgacaacatttctgcacgaaaatttttagatgctgcaaagcagactgaagacaacatgcttttctatacaatattccgcttttttgaacagcgaaaccagcgtttgcgagggagccccaatttcacaccaggggaacactgtgaagaacatgttgcttttttcaaacagatttttggagaccaagctctaatgaggcctacaacattctgaaatcacttgctgtttttttatataaaaatgtgtacaaagttaatttattgcattaataaagctctttaaactata

SEQ ID NO: 360093 - DNA, 1035 bp, Homo sapiens
gagacggagttttgttcttattgcccaggctggagtgcaatggtgagatcttggctcaccgcaacctctgcctcctgggttcaagggattctcctgcctcagcctcctgagtagctgggattacaggcatgcgcacaggaaaaagttgtatctaagtagagaaagtgttttccgctcatatcctgggtccacatcgaagaattcagtccttgtggatgaactgtaaacagcacccttcctctaagatgccgaagatcatagtttgtggtttttttctttcaggcggtggaagcagggcagagccgaagcagcccgctcctcaagaggccggtgcggacccaggcggtgctggaccagtcagatgtgtacacccatgtcctgtcagccttcgtggaaaagaaggagatgcctcataaatttgtgatagccgtgctgatggaatacattcgttctcttaaccagtttcagattgcagtacagcattacctacatgaacttgttatcaaaacccttgtccagcacaacctcttttatatgctgcatcagttcctgcagtaccacgtcctcagcgactccaaacctttggcttgtctgctgttatccctagagagtttctatcctcctgctcatcagctatctctggacatgctgaagcgactttcaacagcaaatgatgaaatagtagaagttctcctttccaaacaccaagtgttagctgccttaaggtttatccggggcattggtggccatgacaacatttctgcacgaaaatttttagatgctgcaaagcagactgaagacaacatgcttttctatacaatattccgcttttttgaacagcgaaaccagcgtttgcgagggagccccaatttcacaccaggggaacactgtgaagaacatgttgcttttttcaaacagatttttggagaccaagctctaatgaggcctacaacattctgaaatcacttgctgtttttttatataaaaatgtgtacaaagttaatttattgcattaataaagctctttaaactata

SEQ ID NO: 360094 - DNA, 1743 bp, Homo sapiens
gtgggggcgtggcaccaggaagcggcgtccgcgccgggcccagagccgcagccgcagccgccgctacagtccgggccgggctccaccgcgcatcctgctccactctggcgaccgcccccggggcccccgccgcgggcgcggcgcccgccatgggcgaggaggactactatctggagctgtgcgagcggccggtgcagttcgagaaggcgaaccctgtcaactgcgtcttcttcgatgaggccaacaagcaggtttttgctgttcgatctggtggagctactggcgtggtagttaaaggcccagatgataggaatcccatctcatttagaatggatgacaaaggagaagtgaagtgcattaagttttccttagaaaataagatattggctgttcagaggacctcaaagactgtggatttttgtaattttatccctgataattcccagctggaatacacacaggagtgcaagactaagaatgccaacattctaggattctgctggactagttcaactgaaattgtcttcataacagatcaaggaatcgaattttaccaggtattaccagagaaacggagtctgaaactcttgaagagccacaatctcaatgtgaattggtacatgtactgccccgagagcgccgtgatcttgctgtctaccacggtcctggagaatgtcctgcagccttttcactttagggctggcactatgtcgaagctgcccaaatttgagattgaattaccagctgcgcctaagtcaactaaacccagcctttccgaaagagacatcgcaatggctaccatatacgggcagctgtatgttctcttcttgaggcatcattctcggacctccaacagcacaggagcggaggtggtcctctatcatctaccacgagaaggtgcctgtaaaaagatgcacatattgaagttaaataggacgggaaagtttgccctgaacgtggtggacaacctggtagtcgtgcatcatcaggatacagagacatcggtaatattcgatatcaagttacggggagagtttgacggctccgttaccttccaccaccccgtgcttcccgctcgatcgatccagccctatcagatccccatcacaggtcctgctgccgtgaccagccagtctcctgttccatgtaaactctattcttcatcttggattgtctttcaacctgacatcattatcagcgcaagccaaggttacctctggaacctccaagtgaaacttgagcccatagtaaatctcttaccagacaaaggaagactcatggactttctcctccagagaaaggaatgcaagatggtcatcctgtctgtctgttcacagatgttaagtgagtcagacagagcatcgctgcccgtgatagccactgtttttgataaactcaaccatgagtataaaaagtacctggatgccgagcagagttatgcgatggtgagttacatggagtatgacaaagggtcctcctcccccaccccctcccgggtattttctaagtaattatgatgcaaaattgtttcctatatattagaataaggtcgctgagatttgccgcctgccatagggcaaggtggcagtagtgggggatagtggaggagtagtaaattcagggtccctgcatcccacgagctggcggctgcatctcacttcataccttcactgtttttgtttttcccatctgtgtttgatcttgcctgtagatccttggtctactgttatagatgagaaaaat

SEQ ID NO: 360095 - DNA, 1552 bp, Homo sapiens
  misc_feature (1348)..(1348): n is a, c, g, or t
  misc_feature (1401)..(1401): n is a, c, g, or t
gtgggggcgtggcaccaggaagcggcgtccgcgccgggcccagagccgcagccgcagccgccgctacagtccgggccgggctccaccgcgcatcctgctccactctggcgaccgcccccggggcccccgccgcgggcgcggcgcccgccatgggcgaggaggactactatctggagctgtgcgagcggccggtgcagttcgagaaggcgaaccctgtcaactgcgtcttcttcgatgaggccaacaagcaggtttttgctgttcgatctggtggagctactggcgtggtagttaaaggcccagatgataggaatcccatctcatttagaatggatgacaaaggagaagtgaagtgcattaagttttccttagaaaataagatattggctgttcagaggacctcaaagactgtggatttttgtaattttatccctgataattcccagctggaatacacacaggagtgcaagactaagaatgccaacattctaggattctgctggactagttcaactgaaattgtcttcataacagatcaaggaatcgaattttaccaggtattaccagagaaacggagtctgaaactcttgaagagccacaatctcaatgtgaattggtacatgtactgccccgagagcgccgtgatcttgctgtctaccacggtcctggagaatgtcctgcagccttttcactttagggctggcactatgtcgaagctgcccaaatttgagattgaattaccagctgcgcctaagtcaactaaacccagcctttccgaaagagacatcgcaatggctaccatatacgggcagctgtatgttctcttcttgaggcatcattctcggacctccaacagcacaggagcggaggtggtcctctatcatctaccacgagaaggtgcctgtaaaaagatgcacatattgaagttaaataggacgggaaagtttgccctgaacgtggtggacaacctggtagtcgtgcatcatcaggatacagagacatcggtaatattcgatatcaagttacggggagagtttgacggctccgttaccttccaccaccccgtgcttcccgctcgatcgatccagccctatcagatccccatcacaggtcctgctgccgtgaccagccagtctcctgttccatgtaaactctattcttcatcttggattgtctttcaacctgacatcattatcagcgcaagccaagtacctctggaacctccaagtgaaacttgagcacatagttcagcgtctgacgtcagacgctgaactatgtgttccatttattttgtctctcaaattttaggaatcttctcctttaattaactcatcaacctctcatggcnagaatttgagaaagtaaatttatactcaggttctaattttaatagggaaggangaagttacagctcagtgcaccatgaagttgacacagagatggagacacctcagccccacctctctggaacaggcaagatgattggggacggagcacaggtcagcgtgggacgagggtcatggtggacatgggggtgaggtggtctccccac

SEQ ID NO: 360096 - DNA, 473 bp, Homo sapiens
ctatctcaaaaaaaaaaaaaaaataaggtttgagttggagctagtctgatgcagcagggagccctgttttcatcaccacccctctccccagtctcagggtgtggctgaggggccttggggtccctgatccagcctcctctcttgcatgatgatcaccacccctctccccagtctcgggtgtggctgaggggccttggggtccctgatccagcctcctctcttgcatggtgcctcgcgccccatgctcggccttcagtgctgtcttgaacgtcccaatggagccaccagagtgactttcctaacagaagatatgatctgccttgaggcttggaccccaaacccctgtggggcccgggttaccgtggctcctgcctgtgattccagcacttccggaggctgaggcctgagaatcagttgaggccaggagtttgagaccaccttgggcaacatagtgagatcccagctctacaaaa

SEQ ID NO: 360097 - DNA, 1995 bp, Homo sapiens
  misc_feature (1659)..(1659): n is a, c, g, or t
  misc_feature (1829)..(1829): n is a, c, g, or t
  misc_feature (1849)..(1849): n is a, c, g, or t
  misc_feature (1911)..(1911): n is a, c, g, or t
gacactcttgattaatgtgatccagaaccattgtgaatatccacatttgaaaatgccactattacatgtattttcacctatgaaatgtaaacatgagaatgggtcacaaaccttgctgagatacagatgctaaagagcctgctagatgtattcattaggtacaccattcacatgcgtgcacaagcctcaaagcatgttattcaaatttgtgccttagcaaaatgatgcctgctatacatcatgggtatttggagctcccacaaagagtagaaattgtaaacgttagatccctgaatgtcagtgatctactatagatgtaactattgttggtatgacacttcacacatcagttagaataatatcgcccaactttaagatctaacaatggcttgctgtaatattttattgatgatttttaaagtaagcatactatagctgaattcttctaaattttattttatattcaaatataaaataattactataaaaaacaaaatcacagaatggatccacatatatactgtcatatatgtgacaaaacattcacatatatactgtcaattgatttttgacaaaagcaccaatgcaattcaatggggaaatggaacttcaacaaatggtactagaacatctggatatctaaatgtggtgggagggaatcatgaatttttttcacatagcatacacaaaaattaatttgaaatgtgtcattgatctaaatataaaaaccaaaactatacaacatctagaccaaaacatctaagactatctttgaaagctgggggtaaagaaagatttcctaggacatagaaggcaattataagagaagacaattacaaattgaactttatcaaaattttaaaagtctgctcatgttagtgttaagacaaaaaggcaagccatggacaggaaaaaatatttgtaatatgtttatctgacaaaggactcgtatccaaaatatatacatataaaaaaacacaatattaaaaaatgggcaaaagccttgaacagatactacaaaagaaaatattggaatgtccaataacacataaagagatgttcatatgaaggtaaaatgaagcaggcaaaaaaagaaaagatgttcaacatcattagttatgagagaaatgcaatataaagtcatgaagtaatactttcacatctatcagaatgactaaaatttaaaagactgataaaatgtcaataagaatgtgaaagtcagaactttcatacactgctgctaagattacaaaatggtacaaccactttggaaaactggcaatttctgatacaattaaatatatccttcaacctgtgatccagcaatcctactccaaggtatatacccaagagaaatgaaatcatatgtccacaagaagagttgaacatgaatatcatagcagttctatttataatagccccaaactagaaacaatcccaatgtccttcaataggtaaatagataagtaagttacaatacagtggtattcagcaataaaaagacctactgatacaagcaaaacatgaatgaaaccaaaaatatgacatataaacaagtacttactgaatgattccatttatgtgaagttcaagaaaaggcaaaaagtgatctgtggtggtagaaatgaaaacactgtttgcctcaggtggtcaggtganacattcattaactagaaaggagaacttcctggagtgaaagaagatacgttttgatggccaggcgcagtggctcatgcctgtaatcccaacactttgggaggctgaggagggcggatcacgaggtcaggagttcgagaccagcctggccagcatggtgaaaccccatctcnactaaaaatacaaaaaattngctggacatggtggcacacacctgtagtcccagctacttgggaggctgaggcaggagaatcncttgaacccaggaggtggaggttgcagtgagcctatatcacgccactgcactccagcctagatgacagagcaagactctgtctc

SEQ ID NO: 360098 - DNA, 3753 bp, Homo sapiens
ttaaacccaaagcggccgccgtaggcgaaggtgaagatggctgcctctgcctttgctggtgcagtgagagcagcttcaggaatcctacggcccctgaatattttggcatcttcaacctaccgcaactgtgtcaagaatgcctctcttatttctgcattgtccactggacgttttagtcatattcagacaccagttgtttcctccactcccagacttaccacatctgagagaaacctgacatgtgggcatacctcagtgatccttaatagaatggcccccgtgcttccaagtgtcctgaagctgccagtcagatctctaacatacttcagtgcaagaaaaggcaagagaaagaccgtgaaagctgtcatcgataggtttcttcgacttcattgtggcctttgggtgaggagaaaggctggctataagaaaaaattatggaaaaagacacctgcaaggaagaagcgattgagggaatttgtattctgcaataaaacccagagtaaactcttagataaaatgacgacgtccttctggaagaggcgaaactggtacgttgatgatccttatcagaagtatcatgatcgaacaaacctgaaagtatagatcagaagtttcacttgtttctcagttattggatatgtatctttgtgtacatatctttgcaaaaatggataagtacaaaacttgatgtaaattgtaccaatgaatatgtaaacatacagtgacaacattaaacttagaaaagttttaaaacttaatggatcagactttgccagatttggttagggaaacagaaatttagaatggtgcattatttttaacaaatggtattggcttaactagttgtttcagttatgctcttttagttgcaaggaatctcaagtgggacaaacataaaaagactcaaaagctacaagttagctcaagcaatgtgacattatttcaaggatatgtgccagggaattcaggaaccacctcaccaaccccatctcccactcagaaatcacctcccagcctcaggaagagtagaaattgggtggtgctcctcagcaggggaaggtggatgtttaggcttgggctctgcatgcatgtgacttgcttctttttgcattgttaactccattctctctattcaccaacttctctacacagcttttgcatacttacagtttctgttcctttgtaataactttaacttgcacctttgaggttcttttctacatgatgaccttcagctcctgctgctagtctccaattgccaagggaatttaactgggccagactacctttttatactaggtctggttgggtcattgtctagagtagggattggctgtccttaagtcaggagcccgctttgtattagcaggtttgcatgcagcaaaaaaacagttatgtgagcagtttcacttggaggttcacatggggtggcagcacacttaacatctaacacaccaggttcattgtgttcataacacttgtcatttactgtaacaacattttttcataggagagtaaatagcccttcagcatgctcattcatgaaacagaagaggctgtacaagtgaagacaagggctttttatgcaagttttgaaagataggtatttattttttctagagacaggagttttgctctgttgcccaggctggagtgcagtggtgcaatcatagctcattgaagcctcgcactcctgggctcaagtggtcctcctgcctcagcttactgagtaaggatatgtatttcttaaaagttagtttatccacttcagatttcatgttttcatttgtaaggataaacttttcccacaaattttcaacaatcattgtagaaactaagggggagaaagtaatctcagttgttttagaaacgaaaaagttaagcattgtttacttgaagtgggcagggaagcagcactgagtaaagttcaattgagtggttacagtctagggcagtggttcccaactctccgatcagaatcatctgggaagcattttcaaacagcaaagtactttgaaaaccattattaaatagaattatgcatgaattactgtttcagatcctttaatgtggtagttggtaataataagatgaaattcctctgttgttagtaaaattatgaaattgaagttctgcagcatgtcaggccaggattattagggagattcctcgaaactagtgtgtgtttattaaaaggagaaaggataacaatagaatgttctaaaaccagaagtccaagtgcgtgtctacttatgggaccaataaataaagaacagacatttgatttgaggtgaggtaaaagcctgaaacatggaatggcattctgttttgatggattttcatttcttcgcacttctgagacggcaaagccaaccacttagaagccttccacatctttgtcacctgcctggctcctgctctctgatgtacctctgggtagtgagatggaaatggtgcctgcagaagttggggagaaggatacttttgcacagcctccatgatgtctttattgcaaatatggatgacaagggtctctgttacaggggcctcagagcaccttcgtttctcctctagaccagggacaggtgtagagataaggactggcaaccagagcctcagcatccaaagatggactgaagtgggatggctgacaggcacataacttacgggaaagggaatttcatacatacgatttttgttttgtgggtaggagggcttatcatcaacactgattttataatctgacaataaatgtctttcattaaagagtttacctaaatgatgttcgattatatgtataatttataaaatatttatgtatagtttgtttattcaggtatatgtataatttattgaacacctactatgtcccagcatatctacaaaactgggtacatacatactgtctaactgctaatccacatttccagtcttacaaaggacataatgattagttaagccctaatttagatttgaggaaactgaagctgagagagggttaagtaaattacccaaagtacagctaataagacccagaatctcagtctcactccttgggatcctgtgtatttccctgagtcttctaacatatgaaaattcatatctaaatcaacaagtgactgtaatctggtactataaatactaaataaacacttcttcataacactgtaccaattcagcttttaaattttattactttgctttcctgtcctttgccaactcttaacctagttaatcctagttctgttgacattggaccaggctcagtaaataaacgaatggatttccagcctttttttcccatctgttcctgcttttagtcctctgaatctgcttcttttcttactgctgctttattttacagtgattttgtcaaacatagaatacaggactaaaaatgcaaagaaattgggtctgtgtttaattttgatgtttcaaattttgagcttccaagtctttgtggccacccaatgaagtttgagtctgcctgttcagatgtgaaaggtaagggctgcagcaggtttaagggcggcccttcaccaccctgttgtcacctgcacaggcactcccccatttgcagatgaagaaatgttcagagaagaaaaatgatggaccaaacgtctgtttgcacaattgaaactctaccagtggactattctattttcacagctacctagtttctgccgatgatttttttaaatgtgaaataaacagtgatactttcaggttgtctacttgggggatgaactggtt

SEQ ID NO: 360099 - DNA, 2776 bp, Homo sapiens
ttaaacccaaagcggccgccgtaggcgaaggtgaagatggctgcctctgcctttgctggtgcagtgagagcagcttcaggaatcctacggcccctgaatattttggcatcttcaacctaccgcaactgtgtcaagaatgcctctcttatttctgcattgtccactggacgttttagtcatattcagacaccagttgtttcctccactcccagacttaccacatctgagagaaacctgacatgtgggcatacctcagtgatccttaatagaatggcccccgtgcttccaagtgtcctgaagctgccagtcagatctctaacatacttcagtgcaagaaaaggcaagagaaagaccgtgaaagctgtcatcgataggtttcttcgacttcattgtggcctttgggtgaggagaaaggctggctataagaaaaaattatggaaaaagacacctgcaaggaagaagcgattgagggaatttgtattctgcaataaaacccagagtaaactcttagataaaatgacgacgtccttctggaagaggcgaaactggtacgttgatgatccttatcagaagtatcatgatcgaacaaacctgaaagtatagatcagaagtttcacttgtttctcagttattggatatgtatctttgtgtacatatctttgcaaaaatggataagtacaaaacttgatgtaaattgtaccaatgaatatgtaaacatacagtgacaacattaaacttagaaaagttttaaaacttaatggatcagactttgccagatttggttagggaaacagaaatttagaatggtgcattatttttaacaaatggtattggcttaactagttgtttcagttatgctcttttagttgcaaggaatctcaagtgggacaaacataaaaagactcaaaagctacaagttagctcaagcaatgtgacattatttcaaggatatgtgccagggaattcaggaaccacctcaccaaccccatctcccactcagaaatcacctcccagcctcaggaagagtagaaattgggtggtgctcctcagcaggggaaggtggatgtttaggcttgggctctgcatgcatgtgacttgcttctttttgcattgttaactccattctctctattcaccaacttctctacacagcttttgcatacttacagtttctgttcctttgtaataactttaacttgcacctttgaggttcttttctacatgatgaccttcagctcctgctgctagtctccaattgccaagggaatttaactgggccagactacctttttatactaggtctggttgggtcattgtctagagtagggattggctgtccttaagtcaggagcccgctttgtattagcaggtttgcatgcagcaaaaaaacagttatgtgagcagtttcacttggaggttcacatggggtggcagcacacttaacatctaacacaccaggttcattgtgttcataacacttgtcatttactgtaacaacattttttcataggagagtaaatagcccttcagcatgctcattcatgaaacagaagaggctgtacaagtgaagacaagggctttttatgcaagttttgaaagataggtatttattttttctagagacaggagttttgctctgttgcccaggctggagtgcagtggtgcaatcatagctcattgaagcctcgcactcctgggctcaagtggtcctcctgcctcagcttactgagtaaggatatgtatttcttaaaagttagtttatccacttcagatttcatgttttcatttgtaaggataaacttttcccacaaattttcaacaatcattgtagaaactaagggggagaaagtaatctcagttgttttagaaacgaaaaagttaagcattgtttacttgaagtgggcagggaagcagcactgagtaaagttcaattgagtggttacagtctagggcagtggttcccaactctccgatcagaatcatctgggaagcattttcaaacagcaaagtactttgaaaaccattattaaatagaattatgcatgaattactgtttcagatcctttaatgtggtagttggtaataataagatgaaattcctctgttgttagtaaaattatgaaattgaagttctgcagcatgtcaggccaggattattagggagattcctcgaaactagtgtgtgtttattaaaaggagaaaggataacaatagaatgttctaaaaccagaagtccaagtgcgtgtctacttatgggaccaataaataaagaacagacatttgatttgaggtgaggtaaaagcctgaaacatggaatggcattctgttttgatggattttcatttcttcgcacttctgagacggcaaagccaaccacttagaagccttccacatctttgtcacctgcctggctcctgctctctgatgtacctctgggtagtgagatggaaatggtgcctgcagaagttggggagaaggatacttttgcacagcctccatgatgtctttattgcaaatatggatgacaagggtctctgttacaggggcctcagagcaccttcgtttctcctctagaccagggacaggtgtagagataaggactggcaaccagagcctcagcatccaaagatggactgaagtgggatggctgacaggcacataacttacgggaaagggaatttcatacatacgatttttgttttgtgggtaggagggcttatcatcaacactgattttataatctgacaataaatgtctttcattaaagagtttacct

SEQ ID NO: 360100 - DNA, 789 bp, Homo sapiens
  misc_feature (747)..(748): n is a, c, g, or t
  misc_feature (757)..(757): n is a, c, g, or t
ttaaacccaaagcggccgccgtaggcgaaggtgaagatggctgcctctgcctttgctggtgcagtgagagcagcttcaggaatcctacggcccctgaatattttggcatcttcaacctaccgcaactgtgtcaagaatgcctctcttatttctgcattgtccactggacgttttagtcatattcagacaccagttgtttcctccactcccagacttaccacatctgagagaaacctgacatgtgggcatacctcagtgatccttaatagaatggcccccgtgcttccaagtgtcctgaagctgccagtcagatctctaacatacttcagtgcaagaaaaggcaagagaaagaccgtgaaagctgtcatcgataggtttcttcgacttcattgtggcctttgggtgaggagaaaggctggctataagaaaaaattatggaaaaagacacctgcaaggaagaagcgattgagggaatttgtattctgcaataaaacccagagtaaactcttagataaaatgacgacgtccttctggaagaggcgaaactggtacgttgatgatccttatcagaagtatcatgatcgaacaaacctgaaagtatagatcagaagtttcacttgtttctcagttattggatatgtatctttgtgtacatatctttgcaaaaatggataagtacaaaacttgatgtaaattgtaccaatgaatatgtaaacatacagtgacaacattaaacttttctaagtnnaatgttgtngtcgacgcggccgcgaatttagtagtatgtag

SEQ ID NO: 360101 - DNA, 739 bp, Homo sapiens
ttaaacccaaagcggccgccgtaggcgaaggtgaagatggctgcctctgcctttgctggtgcagtgagagcagcttcaggaatcctacggcccctgaatattttggcatcttcaacctaccgcaactgtgtcaagaatgcctctcttatttctgcattgtccactggacgttttagtcatattcagacaccagttgtttcctccactcccagacttaccacatctgagagaaacctgacatgtgggcatacctcagtgatccttaatagaatggcccccgtgcttccaagtgtcctgaagctgccagtcagatctctaacatacttcagtgcaagaaaaggcaagagaaagaccgtgaaagctgtcatcgataggtttcttcgacttcattgtggcctttgggtgaggagaaaggctggctataagaaaaaattatggaaaaagacacctgcaaggaagaagcgattgagggaatttgtattctgcaataaaacccagagtaaactcttagataaaatgacgacgtccttctggaagaggcgaaactggcactcccccatttgcagatgaagaaatgttcagagaagaaaaatgatggaccaaacgtctgtttgcacaattgaaactctaccagtggactattctattttcacagctacctagtttctgccgatgatttttttaaatgtgaaataaacagtgatactttcaggttgtctacttgggggatgaactggtt

SEQ ID NO: 360102 - DNA, 485 bp, Homo sapiens
gtgcagtgagagcagcttcaggtcagtggagagcgacatactccatgcatgccttcacagaaggggaaactggtgcgggatggaatgggcgtttagactggaggttaacaagcaaaaagggtcattatttaagttaagaaggttgcgcccaattttctctggggcggtgtgaccggcagcccgtaccaagtcccccgactcggactcacgcgggcctgtgtgtcacgcatttgccgcttccttaccagctttttttccctagaaaagaagccagagaaactggaacggagggggcgagggaaaccaaaaagtctcacctaactttctgatttagaggctacgacctgccattcacgacctttaaccttgagaattaatgtctcctaacttaagattctacacctctaaaatgggggtcataaccacctacctggggattaaatgagataatgcacgtaaagcgttttgggcagtgcctgacacat

SEQ ID NO: 360103 - DNA, 3696 bp, Homo sapiens
ttaaacccaaagcggccgccgtaggcgaaggtgaagatggctgcctctgcctttgctggtgcagtgagagcagcttcaggaatcctacggcccctgaatattttggcatcttcaacctaccgcaactgtgtcaagaatgcctctcttatttctgcattgtccactggacgttttagtcatattcagacaccagttgtttcctccactcccagacttaccacatctgagagaaacctgacatgtgggcatacctcagtgatccttaatagaatggcccccgtgcttccaagtgtcctgaagctgccagtcagatctctaacatacttcagtgcaagaaaaggcaagagaaagaccgtgaaagctgtcatcgataggtttcttcgacttcattgtggcctttgggtgaggagaaaggctggctataagaaaaaattatggaaaaagacacctgcaaggaagaagcgattgagggaatttgtattctgcaataaaacccagagtaaactcttagataaaatgacgacgtccttctggaagaggcgaaactggtacgttgatgatccttatcagaagtatcatgatcgaacaaacctgaaagtatagatcagaagtttcacttgtttctcagttattggatatgtatctttgtgtacatatctttgcaaaaatggataagtacaaaacttgatgtaaattgtaccaatgaatatgtaaacatacagtgacaacattaaacttagaaaagttttaaaacttaatggatcagactttgccagatttggttagggaaacagaaatttagaatggtgcattatttttaacaaatggtattggcttaactagttgtttcagttatgctcttttagttgcaaggaatctcaagtgggacaaacataaaaagaggaattcaggaaccacctcaccaaccccatctcccactcagaaatcacctcccagcctcaggaagagtagaaattgggtggtgctcctcagcaggggaaggtggatgtttaggcttgggctctgcatgcatgtgacttgcttctttttgcattgttaactccattctctctattcaccaacttctctacacagcttttgcatacttacagtttctgttcctttgtaataactttaacttgcacctttgaggttcttttctacatgatgaccttcagctcctgctgctagtctccaattgccaagggaatttaactgggccagactacctttttatactaggtctggttgggtcattgtctagagtagggattggctgtccttaagtcaggagcccgctttgtattagcaggtttgcatgcagcaaaaaaacagttatgtgagcagtttcacttggaggttcacatggggtggcagcacacttaacatctaacacaccaggttcattgtgttcataacacttgtcatttactgtaacaacattttttcataggagagtaaatagcccttcagcatgctcattcatgaaacagaagaggctgtacaagtgaagacaagggctttttatgcaagttttgaaagataggtatttattttttctagagacaggagttttgctctgttgcccaggctggagtgcagtggtgcaatcatagctcattgaagcctcgcactcctgggctcaagtggtcctcctgcctcagcttactgagtaaggatatgtatttcttaaaagttagtttatccacttcagatttcatgttttcatttgtaaggataaacttttcccacaaattttcaacaatcattgtagaaactaagggggagaaagtaatctcagttgttttagaaacgaaaaagttaagcattgtttacttgaagtgggcagggaagcagcactgagtaaagttcaattgagtggttacagtctagggcagtggttcccaactctccgatcagaatcatctgggaagcattttcaaacagcaaagtactttgaaaaccattattaaatagaattatgcatgaattactgtttcagatcctttaatgtggtagttggtaataataagatgaaattcctctgttgttagtaaaattatgaaattgaagttctgcagcatgtcaggccaggattattagggagattcctcgaaactagtgtgtgtttattaaaaggagaaaggataacaatagaatgttctaaaaccagaagtccaagtgcgtgtctacttatgggaccaataaataaagaacagacatttgatttgaggtgaggtaaaagcctgaaacatggaatggcattctgttttgatggattttcatttcttcgcacttctgagacggcaaagccaaccacttagaagccttccacatctttgtcacctgcctggctcctgctctctgatgtacctctgggtagtgagatggaaatggtgcctgcagaagttggggagaaggatacttttgcacagcctccatgatgtctttattgcaaatatggatgacaagggtctctgttacaggggcctcagagcaccttcgtttctcctctagaccagggacaggtgtagagataaggactggcaaccagagcctcagcatccaaagatggactgaagtgggatggctgacaggcacataacttacgggaaagggaatttcatacatacgatttttgttttgtgggtaggagggcttatcatcaacactgattttataatctgacaataaatgtctttcattaaagagtttacctaaatgatgttcgattatatgtataatttataaaatatttatgtatagtttgtttattcaggtatatgtataatttattgaacacctactatgtcccagcatatctacaaaactgggtacatacatactgtctaactgctaatccacatttccagtcttacaaaggacataatgattagttaagccctaatttagatttgaggaaactgaagctgagagagggttaagtaaattacccaaagtacagctaataagacccagaatctcagtctcactccttgggatcctgtgtatttccctgagtcttctaacatatgaaaattcatatctaaatcaacaagtgactgtaatctggtactataaatactaaataaacacttcttcataacactgtaccaattcagcttttaaattttattactttgctttcctgtcctttgccaactcttaacctagttaatcctagttctgttgacattggaccaggctcagtaaataaacgaatggatttccagcctttttttcccatctgttcctgcttttagtcctctgaatctgcttcttttcttactgctgctttattttacagtgattttgtcaaacatagaatacaggactaaaaatgcaaagaaattgggtctgtgtttaattttgatgtttcaaattttgagcttccaagtctttgtggccacccaatgaagtttgagtctgcctgttcagatgtgaaaggtaagggctgcagcaggtttaagggcggcccttcaccaccctgttgtcacctgcacaggcactcccccatttgcagatgaagaaatgttcagagaagaaaaatgatggaccaaacgtctgtttgcacaattgaaactctaccagtggactattctattttcacagctacctagtttctgccgatgatttttttaaatgtgaaataaacagtgatactttcaggttgtctacttgggggatgaactggtt

SEQ ID NO: 360104 - DNA, 1941 bp, Homo sapiens
ttaaacccaaagcggccgccgtaggcgaaggtgaagatggctgcctctgcctttgctggtgcagtgagagcagcttcaggaatcctacggcccctgaatattttggcatcttcaacctaccgcaactgtgtcaagaatgcctctcttatttctgcattgtccactggacgttttagtcatattcagacaccagttgtttcctccactcccagacttaccacatctgagagaaacctgacatgtgggcatacctcagtgatccttaatagaatggcccccgtgcttccaagtgtcctgaagctgccagtcagatctctaacatacttcagtgcaagaaaaggcaagagaaagaccgtgaaagctgtcatcgataggtttcttcgacttcattgtggcctttgggtgaggagaaaggctggctataagaaaaaattatggaaaaagacacctgcaaggaagaagcgattgagggaatttgtattctgcaataaaacccagagtaaactcttagataaaatgacgacgtccttctggaagaggcgaaactgacggcaaagccaaccacttagaagccttccacatctttgtcacctgcctggctcctgctctctgatgtacctctgggtagtgagatggaaatggtgcctgcagaagttggggagaaggatacttttgcacagcctccatgatgtctttattgcaaatatggatgacaagggtctctgttacaggggcctcagagcaccttcgtttctcctctagaccagggacaggtgtagagataaggactggcaaccagagcctcagcatccaaagatggactgaagtgggatggctgacaggcacataacttacgggaaagggaatttcatacatacgatttttgttttgtgggtaggagggcttatcatcaacactgattttataatctgacaataaatgtctttcattaaagagtttacctaaatgatgttcgattatatgtataatttataaaatatttatgtatagtttgtttattcaggtatatgtataatttattgaacacctactatgtcccagcatatctacaaaactgggtacatacatactgtctaactgctaatccacatttccagtcttacaaaggacataatgattagttaagccctaatttagatttgaggaaactgaagctgagagagggttaagtaaattacccaaagtacagctaataagacccagaatctcagtctcactccttgggatcctgtgtatttccctgagtcttctaacatatgaaaattcatatctaaatcaacaagtgactgtaatctggtactataaatactaaataaacacttcttcataacactgtaccaattcagcttttaaattttattactttgctttcctgtcctttgccaactcttaacctagttaatcctagttctgttgacattggaccaggctcagtaaataaacgaatggatttccagcctttttttcccatctgttcctgcttttagtcctctgaatctgcttcttttcttactgctgctttattttacagtgattttgtcaaacatagaatacaggactaaaaatgcaaagaaattgggtctgtgtttaattttgatgtttcaaattttgagcttccaagtctttgtggccacccaatgaagtttgagtctgcctgttcagatgtgaaaggtaagggctgcagcaggtttaagggcggcccttcaccaccctgttgtcacctgcacaggcactcccccatttgcagatgaagaaatgttcagagaagaaaaatgatggaccaaacgtctgtttgcacaattgaaactctaccagtggactattctattttcacagctacctagtttctgccgatgatttttttaaatgtgaaataaacagtgatactttcaggttgtctacttgggggatgaactggtt

SEQ ID NO: 360105 - DNA, 399 bp, Homo sapiens
aaattaatgtggaacaattataaaacatattgtataaatactctttgatagtgaaatagttaagagtgtttaggcttacaacaattgtttgaacttgctaagaaggcttaaagtttttatttttggtaactgagtgatattaatatcataatatcttcacacaaaagtactacttagaaataaaacctcagagtcatgtgagttctcaagttgccacaactcttatttgttgggtattttcctttccttttttgttttgaattccttggaacataaccccttacataaaagcatagaacgactccactggtaatcttattaattctttgtaaagagtaatgaagatttcctgattttcttacttcttgatctcattgtttctgtggctttgcaaagcta

SEQ ID NO: 360106 - DNA, 6702 bp, Homo sapiens
  misc_feature (1551)..(1551): n is a, c, g, or t
  misc_feature (2166)..(2166): n is a, c, g, or t
  misc_feature (2267)..(2267): n is a, c, g, or t
  misc_feature (2410)..(2410): n is a, c, g, or t
  misc_feature (4696)..(4696): n is a, c, g, or t
  misc_feature (6263)..(6263): n is a, c, g, or t
  misc_feature (6390)..(6390): n is a, c, g, or t
  misc_feature (6428)..(6428): n is a, c, g, or t
catgcgccgggtcgtacacggcggccgcgcgcacgctgggggcgtggctgcgcgatgtaatcggtctctggacgctgcgcggcgctcctaggagcaggcgttcccgactccggcaagagggtggcgcctggactctcgccctcagagggaggcccgtcccacggtctgtggctacggatcccaggaccctcttcgcgggcgattcgcgtagcctcaggtaactgcatcctgcccagcatgacggccccctgcccgccgccacctccagacccccagtttgtcctccgaggcacccagtcaccggtgcatgcgctgcacttctgcgaaggagcccaggctcaggggcgcccgctcctcttctcagggtctcagagtggcctggtacacatctggagcctgcagacgcggagagcggttaccaccctggatggccacggcggccagtgtgtgacctggctgcagacgctgccccaggggcgccagctcctcagtcagggccgggacctgaagctgtgcctgtgggacctcgcggagggcaggagcgctgtcgtggactccgtgtgcttggagagtgtgggcttctgccggagcagcatcctggccgggggccagccacgctggacgcttgccgtgccagggaggggcagcgacgaggttcagattctggagatgccctccaagacgtcagtgtgcgccctgaagccgaaggcagatgccaagctgggcatgcccatgtgcctgcggctgtggcaggccgactgcagctcccgcccactccttctggccggctatgaggatggatcggtggtcctgtgggacgtctctgagcagaaggtgtgcagccgcatcgcctgccatgaggagcccgtcatggaccttgactttgactcccagaaggccaggggcatctcaggctccgcggggaaggcgctggctgtctggagcctggactggcagcaggccctgcaggtgcgtgggactcatgaactcaccaatcccgggatcgccgaggtcacgatccggccagatcgcaagatcctggccaccgcaggctgggaccaccgcatccgcgtgttccactggcggacgatgcagccactggccgtgctggccttccacagcgccgctgtccagtgcgtggccttcaccgccgatggcttgctggccgcgggctccaaggatcagcggatcagcctctggtcactctacccacgcgcatgactcacccactcccttcccgggagacgaggagggcgggcagggaggtgggcatcaggccccagccttggcctgaaacctcaagggcctctgaggaccagcaagtcatggcccaaggaccatggagtccccgctgtcttcatgaggttggtatttccttttgtggagtgcctcatcacaggacggtgactctgggggccagccagagccctggccgtccgaggcctgcaggagacgttggcttgggcctgctgtgttgccagctgagggtattttataataaatttccattgccaagttgcaggcttgaggtgggagctccctgaggaggcnctggtcccccacttagcatcagtgccctcagacccccaccaggcaggatgctcagccccaccctcacacctgctgttgaatgggccaccccgagtgtgggtttcctgggccaggcctcaggagatgataggccccaaccatagctgcgtcgatgtccacatgacccctcaccccgaggaggccaggagctcccaacacacaggttgaggccaggatcaggatcaggaagtaactgaactccctaaagagtgaagcagagaaaggtgcctgtgagggacggcaaggggggcttgcagcgcacagggccaggccagatgtgggatccgggagggcacgcctgcccgcagagggtgcagtggggaaggcgcacagggtgcacctccaggtgagtgctgggcagaaggcacgagagcagcaagggagtgtgacaagcaccgcctcacagtggccaaggccacagtcacagctgcggctgcacacagggtggcccccagggcacaacacagcaagagcaggacttagcagccagagcctcacactgcatgcagccgggcccagcctggccggtcgtctcctcctaaaagcgggtgttgattgggaaagaaccatgacccngaatattggagtggggcccatgggcagatccagagaagctgggaccacacacgcctgtgtctgcccggattgccggaagagcccctctagctgaaggcccngggtggcctcccttgaggcagttgccctgcaaggccctgccgatgctccttgggacccccacctgggcttctagtcctagaactagactcgagtccagcagacccccaggatgagatacagagggtgaccctgagagtggcancagcctcctgcaggaccacatggcatttccaggtttccaggcagaaatctgaacatgtgtgggacggatcggaagggtgtgggatccaggtggccggagcaggggtggatcaggggagttcccggaacagacctgccaaacggagggctggactgggcgctgcagcttggggccaggaaggctccagtgccgggctgggggtgggggctggattacagcctgagggtggctgcactgagtgaagtggacatggccagccgccgtggggtacagccgaggagggcttccaaggcctggggatgggggtgttggatttgtcagtgagacctgtgcacccactgcagggggtcccaaggccgtgcctccccaaccccactgtgaggaacatggttgctggggggcccggagtccttgaggagtcctgtgaccacacttctctgttggtcagaggtaccatggggaccgttccatcaaacgggaatgtcagtgctggccgggaaagcggcccctggcccaagcttggagaccacctggctcgggtactggcctggctccgttggacaagggtggccaccaggtgcccaggacctttggagaggggggccctgctgcttttcctcgagtgtcctatagccgccaggatgcgtagggcactccgggaggtattttcatatcactgaggtgtcagggaggggaagggtcctgggtttaggctgcagtgactgcaggtgctgagggagctgtgccctgggtgctcatcacaggctgtcacagtgagggaaggtgtcaggttctgacatccccatgacagcggcagggtaggtggagtgggaattggctttgcagtttccctgcatgcccttgacagccttgccaaaggcacatctgccccgcctcagctcccaccctgagggttctgggcctctaccccttcccctgtttatgtccctgtcatctttggcatcatcactgtagttacaaaactccctacgtcccacagccacgaggtgggtatcccacatgagggcccaggtgtgcatgccagcatgaggttggcgagtggcactgcctgctgatgtcttacatagaggccatgaagagctgtgggcagggtgtacagaccctgagttggcccctggccctcgtgctttcagtcaaaggcacaagcagggtggatggcaggcggctgccccctagcctggccttgagctccctgccccaggccatgtggcgttgagcagtgtccaggcacatcttgttctgaatctcagtgtgcagggatggagtcgggacagcgtgagtcctgcatgcctaacacagccctcacccctccagtgcacaacggggccacgtgcccgcatctgggtggctaggcagatagggccccccttgccaggcagatccagcttctgaggccttatagacgtcctgtggagggcaggcccaggactttcattcacctggctgagctgcctgggagagcagcagaaccggtgctggggtccaagccggccaagagcagtgcagccctcctggtcctgttcctctcttgagctgctccgtggtgtccacagcagagccatgtggctctggacaggtcggcctttgtgtcaacagaacctgggtcgtgatgaatcaccatgcgtctgaccagccttgaaacccccacaacagaagaagaaacggtctcagctccagacatccagcttggaaaagatgcacctgaacattggcattctcttcctagcaaacagccacttcctgtaggctggcaggaacgccaacagagccagcagtgaaggcattaagtggggaggaggggtggcccggaggcagcacgcgaaggtcagcatgcagctcctgggatgaacctgagaggcgactcctggcagcatggctggtcgctgccatcacgcccctggccaacccaccaactgggagaggcagcccttccacatcttcctccataatgctcttgggtagcagtgaggcctctcaagccagagagaacttggtgtttggaaacaacggcggacatttcttgccattttcagtgccaactcaggtaggtgtgttctaccatcctgtgtttttggggtgtttttttttttgagtcagagtctcactctgtcccccaggctggagtgcaatggagcagtctcggctcactgcaacctctgattcccaggttcaagcgattctcctgcctcagcctcccgagaagctcaggaccacccacataggtgcaggccatcatgcccagctaattttttatttttttttatngagaaggagtctcgctatgttgcccaggctggtttcgaactcctgggctcaagcgatcgatcctcccgcctctagcctcccaaagcactagaattataggcctgagccactgcgcccggcccaccatcctgttcttattggaagaatttccatgtgtcgaggcacgggcacaacgtagctggtcctctgctcagggccccacaaggctgcgtcagggtggcagcgcggctgggggctttttctgttcaaatccagattctcgtggctgtgagccccagccctgggcactgtccgcctggtggtgtcttcacagccagcaggggtggccttggggtgttctgtggagtaactttcacggcccagagtgggatcctgagtggctggagccgtatgctccagcatccccagccgctgcctccggtgcaggtggagtgggcccctctgattaccaggagctgtcagaggggcagcaggtcccactccactggccggtgggcagctgtgtgcagggacgcgggtcctggcacgtctgcctggtgaggccctgcctccagtgccaaggggcctcccctctcgacggtgggcgccaccatgtgctgacctctgtgcagccccactttacaaggtaggttcggccagcaccccatccgcgggcgggcagcactcacccagcgttgcgccgccaacagggtccctcttagacaagcagctgtgcctagagccttttccttcctccctgcgtgttacctgcaggccaacagacggccctgggtctgggaccaggagaacctgcctccgcctctggcagtgggtgtccctgcaggcagattgggcttggcacgtagacaccgaggggtcagccgatgccgggagatgatcccgggaagggctccggagcacagcccaggacccgccgccgctgctgggcgctccatgttgacgtgctgtgcgtgtctccactccccaggcaatgatgttcaatcaggtgtttcccacctgtgtctctgccaagaagccacagaacaccctctgcacaaaaggagtgtttgcacaaagaaaaacaaccctccgggggttctttagaaatgcttatactcaattagctagaacttcatgtgaaatcccagcgtggaagacaacaagccggcaccggtgaaaactttgctgtgcacctgccctctaccaagctgccagccccaccagccctgtggtcctaggtgggcacagctgctgcacggtcccccaggcctgcctctcctcggggtctcaaccttcataccagatttgccagcatccccattcccgccttgtgggtggagagtccttgagaccctctgtcactctgtcagcttccccaggtcagcgagctgtggcttggctcccacgcatcagcttttatgggaggcccattaggagctgggcaggagggacagaggggaggccaggcagccactgctgagtgggacgggtagcccagcccatgaggctggccagccctacaggggaggtcccacagcactggccgggaagtccacataggaaagcatcagttgagggatgaagccanggacgatggggacaacggccacagggtgtgctaagctgaggaaattagtaggaggtgctcataagctgttttgttttttggtttgtttgttttttcttttaagagaccagggacagtgggggtctcnctctgtcacccaggctggagtgcagtggcatgatcatngcttactgcagcctccaactaataggctcaggtgatcctcctgcctcagcctcccgagtaactcatggcctttaagtgaactgcttccaccatccagctgtgcaggtggcctgggaacagcagcacatctgtcccctgccacctcttgcatgcacacttgacctcctgacttgggctctgaaacctgtaaaatgtggggtgtagagaaatcgagtcatttggcctcatcctggtgccattatctcttgctacattaataaaccacctcaaacag

SEQ ID NO: 360107 - DNA, 2582 bp, Homo sapiens
  misc_feature (28)..(28): n is a, c, g, or t
ctgccgtgtgtctgagggccagtcatgnagcatccacctaggcaggcttgagagtccttgggagagtccaggtgacctggtttttaattaaaacgcgtcctgtttattgtggttgggctctgcccagaaaggaaggtagggccttgaagtggtgatgtccaggtttcctgcacaggtagggtggaggcaacgatggactctggcatggccttccagacaggcagtgcacacagctcctttcagagtggctttgttgccagctgctgcagcacctgctttcagacagatgatgaccaagctgctttcctgctgggggaaggaggcattccccctgggttgtttttctcttctggcccccacacactggcagacccgaaggcagggtgctcaggagctgcagagcctggcagggtttgctggacatgctcagggacgggccatggtgctggctctgctttctaatcatggtgtcagtccttcacttcccttggaaatacccagagattttatttcctgaagataggacatgatgggtgctgtgagatggtatttaaagtacctgtctgcaaggaaaactttaaaataggaagtactaaggataaggtcctatgggatattggaatattttataaagccacaatagttaaagcacttagatgtggacagatgagcagagaatagaggactttgaaacgggccaaataaatatggaaatttagtacaggctagaggtgtttccaattaacgagtaaaatggattattcagtaaaagcagttggccctctggaaaatagtaaagccatgtatgtgcctcactctttatgccagtacatattccagattaaagatttcaatgttacaattatgaaagtactagaggaaaatatgggtgaatttttttttttttttttttgcctatgattccaggattttaaaagttttagatgcccagagttgtggaggtatggagaagtggaccttctcatactgttggtgggaatacacaataatataatttgaccacgtaacaattctaggcacatgcatgctgtgactacttgctaggtgcatgaaggctcttgccaggggtggtcatggttcggtaccactacatgggggtttagagcagggactggaggttggccttgcctcctcccctccccgcatgagctgagggtccttacctgacctttttgagctgtgaccagagtttttcctcatggggtggttagaagggttgaatgagaatgatgcccatgcagtgccttggctggggtctgggccctctaacacccacctcatgggtgtcactgttttttgaacagcagaactggaaaagcccaaagatccagcaataaaggagcaaggcaaataaagctgttaccctgcaggatcagtcagcatgagccagattgtgctgcagtaacaaagatctccaacagcgcagcggctacagttggcactgcttatttcttgcttgcacctgtgggccaccgtggctggggcctgtcagacctgtgctgacgacagcctacctggacatatttctccatgctcactgaggcaggggaaaggccacagcaggccacaagtaatgtgtgtcaccccacttccatttctgtggccaaaggaagccacagagccacacctgagttccataggacggcagcagctgatcatcctatgggctggggtgctcagtatggagaagtacaagcagccacccagcgtggggctggttggtgctgctgaggatgggaggatgggaggggcctgcatccatcccagggcaacatacctgtttgtctgctggggctgcctgacaaaggaccgcaggctaggggacttaaacaacagacatttcctcatgattctggagctagaagcctgagatcaaggtgtgggcagggttggtttctcctgaggcctcgctccttggcctgcagatagccatcttcttgccgtgtccctgtctgtgtctgtgtcctaatctctcataagctcactagtctattggatcagggcccaccctcatgacctcatttaaccctgaattacctctttaaagaccctgtcttcaaatgtaagtactaggggttaggacttgaacataaaaatattgaagggacatagttctgcccacagcggtgcccgcgataggcttctctggttttgtctttgctgttcctggcagcgctatattgggcaggcttctgtggtctccacatgcctgtgtgcagagtcccccaggccctgggttctggggcccatactgaggagtggggatggccaagccttggctgttgagtaggcagtgcccagttgtgctgtatgggatgctgtttctcacttaagaaatctttccctacctggggggtacaaaggcattatcctgtattcccaggttgtaactttctgcctttgacattcaaccttgagtccacctgtaagtgtaactgcggcagaagggaggggtctgctgtcatccttgatagcctgtgatgagcagagcccctctgccgaccgcgatgcacatgtaatatgagcaagaaataaatttttgatgtgcgaagccactgaaa

SEQ ID NO: 360108 - DNA, 1515 bp, Homo sapiens
catgcgccgggtcgtacacggcggccgcgcgcacgctgggggcgtggctgcgcgatgtaatcggtctctggacgctgcgcggcgctcctaggagcaggcgttcccgactccggcaagagggtggcgcctggactctcgccctcagagggaggcccgtcccacggtctgtggctacggatcccaggaccctcttcgcgggcgattcgcgtagcctcaggtaactgcatcctgcccagcatgacggccccctgcccgccgccacctccagacccccagtttgtcctccgaggcacccagtcaccggtgcatgcgctgcacttctgcgaaggagcccaggctcaggggcgcccgctcctcttctcagggtctcagagtggcctggtacacatctggagcctgcagacgcggagagcggttaccaccctggatggccacggcggccagtgtgtgacctggctgcagacgctgccccaggggcgccagctcctcagtcagggccgggacctgaagctgtgcctgtgggacctcgcggagggcaggagcgctgtcgtggactccgtgtgcttggagagtgtgggcttctgccggagcagcatcctggccgggggccagccacgctggacgcttgccgtgccagggaggggcagcgacgaggttcagattctggagatgccctccaagacgtcagtgtgcgccctgaagccgaaggcagatgccaagctgggcatgcccatgtgcctgcggctgtggcaggccgactgcagctcccgcccactccttctggccggctatgaggatggatcggtggtcctgtgggacgtctctgagcagaaggtgtgcagccgcatcgcctgccatgaggagcccgtcatggaccttgactttgactcccagaaggccaggggcatctcaggctccgcggggaaggcgctggctgtctggagcctggactggcagcaggccctgcaggtgcgtgggactcatgaactcaccaatcccgggatcgccgaggtcacgatccggccagatcgcaagatcctggccaccgcaggctgggaccaccgcatccgcgtgttccactggcggacgatgcagccactggccgtgctggccttccacagcgccgctgtccagtgcgtggccttcaccgccgatggcttgctggccgcgggctccaaggatcagcggatcagcctctggtcactctacccacgcgcatgactcacccactcccttcccgggagacgaggagggcgggcagggaggtgggcatcaggccccagccttggcctgaaacctcaagggcctctgaggaccagcaagtcatggcccaaggaccatggagtccccgctgtcttcatgaggttggtatttccttttgtggagtgcctcatcacaggacggtgactctgggggccagccagagccctggccgtccgaggcctgcaggagacgttggcttgggcctgctgtgttgccagctgagggtattttataataaatttccattgccaa

SEQ ID NO: 360109 - DNA, 704 bp, Homo sapiens
  misc_feature (28)..(28): n is a, c, g, or t
ctgccgtgtgtctgagggccagtcatgnagcatccacctaggcaggcttgagagtccttgggagagtccaggtgacctggtttttaattaaaacgcgtcctgtttattgtggttgggctctgcccagaaaggaaggtagggccttgaagtggtgatgtccaggtttcctgcacaggtagggtggaggcaacgatggactctggcatggccttccagacaggcagtgcacacagctcctttcagagtggctttgttgccagctgctgcagcacctgctttcagacagatgatgaccaagctgctttcctgctgggggaaggaggcattccccctgggttgtttttctcttctggcccccacacactggcagacccgaaggcagggtgctcaggagctgcagagcctggcagggtttgctggacatgctcagggacgggccatggtgctggctctgctttctaatcatggtgtcagtccttcacttcccttggaaatacccagagattttatttcctgaagataggacatgatgggtgctgtgagatggtatttaaagtacctgtctgcaaggaaaactttaaaataggaagtactaaggataaggtcctatgggatattggaatattttataaagccacaatagttaaagcacttagatgtggacagaatcgcttgaacctgggaggcggaggttgcagtgagct

SEQ ID NO: 360110 - DNA, 1421 bp, Homo sapiens
ggccgatctcgttctccactttctaggtggcgcctggactctcgccctcagagggaggcccgtcccacggtctgtggctacggatcccaggaccctcttcgcgggcgattcgcgtagcctcaggtaactgcatcctgcccagcatgacggccccctgcccgccgccacctccagacccccagtttgtcctccgaggcacccagtcaccggtgcatgcgctgcacttctgcgaaggagcccaggctcaggggcgcccgctcctcttctcagggtctcagagtggcctggtacacatctggagcctgcagacgcggagagcggttaccaccctggatggccacggcggccagtgtgtgacctggctgcagacgctgccccaggggcgccagctcctcagtcagggccgggacctgaagctgtgcctgtgggacctcgcggagggcaggagcgctgtcgtggactccgtgtgcttggagagtgtgggcttctgccggagcagcatcctggccgggggccagccacgctggacgcttgccgtgccagggaggggcagcgacgaggttcagattctggagatgccctccaagacgtcagtgtgcgccctgaagccgaaggcagatgccaagctgggcatgcccatgtgcctgcggctgtggcaggccgactgcagctcccgcccactccttctggccggctatgaggatggatcggtggtcctgtgggacgtctctgagcagaaggtgtgcagccgcatcgcctgccatgaggagcccgtcatggaccttgactttgactcccagaaggccaggggcatctcaggctccgcggggaaggcgctggctgtctggagcctggactggcagcaggccctgcaggtgcgtgggactcatgaactcaccaatcccgggatcgccgaggtcacgatccggccagatcgcaagatcctggccaccgcaggctgggaccaccgcatccgcgtgttccactggcggacgatgcagccactggccgtgctggccttccacagcgccgctgtccagtgcgtggccttcaccgccgatggcttgctggccgcgggctccaaggatcagcggatcagcctctggtcactctacccacgcgcatgactcacccactcccttcccgggagacgaggagggcgggcagggaggtgggcatcaggccccagccttggcctgaaacctcaagggcctctgaggaccagcaagtcatggcccaaggaccatggagtccccgctgtcttcatgaggttggtatttccttttgtggagtgcctcatcacaggacggtgactctgggggccagccagagccctggccgtccgaggcctgcaggagacgttggcttgggcctgctgtgttgccagctgagggtattttataataaatttccattgccaa

SEQ ID NO: 360111 - DNA, 1813 bp, Homo sapiens
catgcgccgggtcgtacacggcggccgcgcgcacgctgggggcgtggctgcgcgatgtaatcggtctctggacgctgcgcggcgctcctaggagcaggcgttcccgactccggcaagagggtggcgcctggactctcgccctcagagggaggcccgtcccacggtctgtggctacggatcccaggaccctcttcgcgggcgattcgcgtagcctcaggtaactgcatcctgcccagcatgacggccccctgcccgccgccacctccagacccccagtttgtcctccgaggcacccagtcaccggtgcatgcgctgcacttctgcgaaggagcccaggctcaggggcgcccgctcctcttctcagggtctcagagtggcctggtacacatctggagcctgcagacgcggagagcggttaccaccctggatggccacggcggccagtgtgtgacctggctgcagacgctgccccaggggcgccagctcctcagtcagggccgggacctgaagctgtgcctgtgggacctcgcggagggcaggagcgctgtcgtggactccgtgtgcttggagagtgtgggcttctgccggagcagcatcctggccgggggccagccacgctggacgcttgccgtgccagggaggggcagcgacgaggttcagattctggagatgccctccaagacgtcagtgtgcgccctgaagccgaaggcagatgccaagctgggcatgcccatgtgcctgcggctgtggcaggccgactgcagctcccgcccactccttctggccggctatgaggatggatcggtggtcctgtgggacgtctctgagcagaaggtgtgcagccgcatcgcctgccatgaggagcccgtcatggaccttgactttgactcccagaaggccaggggcatctcaggctccgcggggaaggcgctggctgtctggagcctggactggcagcaggccctgcaggtgcgtgggactcatgaactcaccaatcccgggatcgccgaggtcacgatccggccagatcgcaagatcctggccaccgcaggctgggaccaccgcatccgcgtgttccactggcggacgatgcagccactggccgtgctggccttccacagcgccgctgtccagtgcgtggccttcaccgccgatggcttgctggccgcgggctccaaggatcagcggatcagcctctggtcactctacccacgcgcatgactcacccactcccttcccgggagacgaggagggcgggcagggaggtgggcatcaggccccagccttggcctgaaacctcaagggcctctgaggaccagcaagtcatggcccaaggaccatggagtccccgctgtcttcatgaggttggtatttccttttgtggagtgcctcatcacaggacggtgactctgggggccagccagagccctggccgtccgaggcctgcaggagacgttggcttgggcctgctgtgttgccagctgagggtattttataataaatttccattgccaaaaaaaaaaaaaaaaaaaaagaaaaagagaaaaaaaaaaaaaaaaaaaaaaaacaaaaaacaaaaaaaaaaaaaaaaaagacaaaaaaaaaggagagggggggcgcggggcgacgacaagaagcaaccttcccacccgcggggggggacgcgccccgatgaactagccgcgcaccccccgcgaggttctgtagacaaggcagggggggcccccaaaataggagggcggccatatatataaaagcgcagaggcgcagcgggcgccgcgcgttaacaaccacacagggtgggagagacact

SEQ ID NO: 360112 - DNA, 1471 bp, Homo sapiens
catgcgccgggtcgtacacggcggccgcgcgcacgctgggggcgtggctgcgcgatgtaatcggtctctggacgctgcgcggcgctcctaggagcaggcgttcccgactccggcaagagggtggcgcctggactctcgccctcagagggaggcccgtcccacggtctgtggctacggatcccaggaccctcttcgcgggcgattcgcgtagcctcagaactggaaaagcccaaagatccagcaataaaggagcaaggcaaataaagctgttaccctgcaggatcagtcagcatgagccagattgtgctgcagtaacaaagatctccaacagcgcagcggctacagttggcactgcttatttcttgcttgcacctgtgggccaccgtggctggggcctgtcagacctgtgctgacgacagcctacctggacatatttctccatgctcactgaggcaggggaaaggccacagcaggccacaagtaatgtgtgtcaccccacttccatttctgtggccaaaggaagccacagagccacacctgagttccataggacggcagcagctgatcatcctatgggctggggtgctcagtatggagaagtacaagcagccacccagcgtggggctggttggtgctgctgaggatgggaggatgggaggggcctgcatccatcccagggcaacatacctgtttgtctgctggggctgcctgacaaaggaccgcaggctaggggacttaaacaacagacatttcctcatgattctggagctagaagcctgagatcaaggtgtgggcagggttggtttctcctgaggcctcgctccttggcctgcagatagccatcttcttgccgtgtccctgtctgtgtctgtgtcctaatctctcataagctcactagtctattggatcagggcccaccctcatgacctcatttaaccctgaattacctctttaaagaccctgtcttcaaatgtaagtactaggggttaggacttgaacataaaaatattgaagggacatagttctgcccacagcggtgcccgcgataggcttctctggttttgtctttgctgttcctggcagcgctatattgggcaggcttctgtggtctccacatgcctgtgtgcagagtcccccaggccctgggttctggggcccatactgaggagtggggatggccaagccttggctgttgagtaggcagtgcccagttgtgctgtatgggatgctgtttctcacttaagaaatctttccctacctggggggtacaaaggcattatcctgtattcccaggttgtaactttctgcctttgacattcaaccttgagtccacctgtaagtgtaactgcggcagaagggaggggtctgctgtcatccttgatagcctgtgatgagcagagcccctctgccgaccgcgatgcacatgtaatatgagcaagaaataaatttttgatgtgcgaagccactgaaa

SEQ ID NO: 360113 - DNA, 1079 bp, Homo sapiens
catgcgccgggtcgtacacggcggccgcgcgcacgctgggggcgtggctgcgcgatgtaatcggtctctggacgctgcgcggcgctcctaggagcaggcgttcccgactccggcaagagggtggcgcctggactctcgccctcagagggaggcccgtcccacggtctgtggctacggatcccaggaccctcttcgcgggcgattcgcgtagcctcaggtaactgcatcctgcccagcatgacggccccctgcccgccgccacctccagacccccagtttgtcctccgaggcacccagtcaccggtgcatgcgctgcacttctgcgaaggagcccaggctcaggggcgcccgctcctcttctcagggtctcagagtggcctggtacacatctggagcctgcagacgcggagagcggttaccaccctggatggccacggcggccagtgtgtgacctggctgcagacgctgccccaggggcgccagctcctcagtcagggccgggacctgaagctgtgcctgtgggacctcgcggagggcaggagcgctgtcgtggactccgtgtgcttggagagtgtgggcttctgccggagcagcatcctggccgggggccagccacgctggacgcttgccgtgccagggaggggcagcgacgaggttcagattctggagatgccctccaagacgtcagtgtgcgccctgaagccgaaggcagatgccaagctgggcatgcccatgtgcctgcggctgtggcaggccgactgcagctcccgcccactccttctggccggctatgaggatggatcggtggtcctgtgggacgtctctgagcagaaggtgtgcagccgcatcgcctgccatgaggagcccggcctctgaggaccagcaagtcatggcccaaggaccatggagtccccgctgtcttcatgaggttggtatttccttttgtggagtgcctcatcacaggacggtgactctgggggccagccagagccctggccgtccgaggcctgcaggagacgttggcttgggcctgctgtgttgccagctgagggtattttataataaatttccattgccaa

SEQ ID NO: 360114 - DNA, 2622 bp, Homo sapiens
  misc_feature (28)..(28): n is a, c, g, or t
ctgccgtgtgtctgagggccagtcatgnagcatccacctaggcaggcttgagagtccttgggagagtccaggtgacctggtttttaattaaaacgcgtcctgtttattgtggttgggctctgcccagaaaggaaggtagggccttgaagtggtgatgtccaggtttcctgcacaggtagggtggaggcaacgatggactctggcatggccttccagacaggcagtgcacacagctcctttcagagtggctttgttgccagctgctgcagcacctgctttcagacagatgatgaccaagctgctttcctgctgggggaaggaggcattccccctgggttgtttttctcttctggcccccacacactggcagacccgaaggcagggtgctcaggagctgcagagcctggcagggtttgctggacatgctcagggacgggccatggtgctggctctgctttctaatcatggtgtcagtccttcacttcccttggaaatacccagagattttatttcctgaagataggacatgatgggtgctgtgagatggtatttaaagtacctgtctgcaaggaaaactttaaaataggaagtactaaggataaggtcctatgggatattggaatattttataaagccacaatagttaaagcacttagatgtggacagatgagcagagaatagaggactttgaaacgggccaaataaatatggaaatttagtacaggctagaggtgtttccaattaacgagtaaaatggattattcagtaaaagcagttggccctctggaaaatagtaaagccatgtatgtgcctcactctttatgccagtacatattccagattaaagatttcaatgttacaattatgaaagtactagaggaaaatatgggtgaatttttttttttttttttttgcctatgattccaggattttaaaagttttagatgcccagagttgtggaggtatggagaagtggaccttctcatactgttggtgggaatacacaataatataatttgaccacgtaacaattctaggcacatgcatgctgtgactacttgctaggtgcatgaaggctcttgccaggggtggtcatggttcggtaccactacatgggggtttagagcagggactggaggttggccttgcctcctcccctccccgcatgagctgagggtccttacctgacctttttgagctgtgaccagagtttttcctcatggggtggttagaagggttgaatgagaatgatgcccatgcagtgccttggctggggtctgggccctctaacacccacctcatgggtgtcactgttttttgaacagcagaactggaaaagcccaaagatccagcaataaaggagcaaggcaaataaagctgttaccctgcaggatcagtcagcatgagccagattgtgctgcagtaacaaagatctccaacagcgcagcggctacagttggcactgcttatttcttgcttgcacctgtgggccaccgtggctggggcctgtcagacctgtgctgacgacagcctacctggacatatttctccatgctcactgaggcaggggaaaggccacagcaggccacaagtaatgtgtgtcaccccacttccatttctgtggccaaaggaagccacagagccacacctgagttccataggacggcagcagctgatcatcctatgggctggggtgctcagtatggagaagtacaagcagccacccagcgtggggctggttggtgctgctgaggatgggaggatgggaggggcctgcatccatcccagggcaacatacctgtttgtctgctggggctgcctgacaaaggaccgcaggctaggggacttaaacaacagacatttcctcatgattctggagctagaagcctgagatcaaggtgtgggcagggttggtttctcctgaggcctcgctccttggcctgcagatagccatcttcttgccgtgtccctgtctgtgtctgtgtcctaatctctcataagctcactagtctattggatcagggcccaccctcatgacctcatttaaccctgaattacctctttaaagaccctgtcttcaaatgtaagtactaggggttaggacttgaacataaaaatattgaagggacatagttctgcccacagcggtgcccgcgataggcttctctggttttgtctttgctgttcctggcagcgctatattgggcaggcttctgtggtctccacatgcctgtgtgcagagtcccccaggccctgggttctggggcccatactgaggagtggggatggccaagccttggctgttgagtaggcagtgcccagttgtgctgtatgggatgctgtttctcacttaagaaatctttccctacctggggggtacaaaggcattatcctgtattcccaggttgtaactttctgcctttgacattcaaccttgagtccacctgtaagtgtaactgcggcagaagggaggggtctgctgtcatccttgatagcctgtgatgagcagagcccctctgccgaccgcgatgcacatgtaatatgagcagagcccctctgccgaccgcgatgcacatgtaatatgagcaagaaataaatttttgatgtgcgaagccactgaaa

SEQ ID NO: 360115 - DNA, 1298 bp, Homo sapiens
catgcgccgggtcgtacacggcggccgcgcgcacgctgggggcgtggctgcgcgatgtaatcggtctctggacgctgcgcggcgctcctaggagcaggcgttcccgactccggcaagagggtggcgcctggactctcgccctcagagggaggcccgtcccacggtctgtggctacggatcccaggaccctcttcgcgggcgattcgcgtagcctcaggtaactgcatcctgcccagcatgacggccccctgcccgccgccacctccagacccccagtttgtcctccgaggcacccagtcaccggtgcatgcgctgcacttctgcgaaggagcccaggctcaggggcgcccgctcctcttctcagggtctcagagtggcctggtacacatctggagcctgcagacgcggagagcggttaccaccctggatggccacggcggccagtgtgtgacctggctgcagacgctgccccaggggcgccagctcctcagtcagggccgggacctgaagctgtgcctgtgggacctcgcggagggcaggagcgctgtcgtggactccgtgtgcttggagagtgtgggcttctgccggagcagcatcctggccgggggccagccacgctggacgcttgccgtgccagggaggggcagcgacgaggttcagattctggagatgccctccaagacgtcagtgtgcgccctgaagccgaaggcagatgccaagctgggcatgcccatgtgcctgcggctgtggcaggccgactgcagctcccgcccactccttctggccggctatgaggatggatcggtggtcctgtgggacgtctctgagcagaaggtgtgcagccgcatcgcctgccatgaggagcccgtcatggaccttgactttgactcccagaaggccaggggcatctcaggctccgcggggaaggcgctggctgtctggagctggccgcgggctccaaggatcagcggatcagcctctggtcactctacccacgcgcatgactcacccactcccttcccgggagacgaggagggcgggcagggaggtgggcatcaggccccagccttggcctgaaacctcaagggcctctgaggaccagcaagtcatggcccaaggaccatggagtccccgctgtcttcatgaggttggtatttccttttgtggagtgcctcatcacaggacggtgactctgggggccagccagagccctggccgtccgaggcctgcaggagacgttggcttgggcctgctgtgttgccagctgagggtattttataataaatttccattgccaa

SEQ ID NO: 360116 - DNA, 948 bp, Homo sapiens
tgggaaccggcgggagggcgcctcctcctcccccgccctctctgctgaggatggaagtgacgaaagcagccgaggaggtcacttcctgctggggtggatgaggaggagccggagacgccgcggaggagaccggaccgaagacggaccgtgccgggaagagcaggcgggtgaaaatgaaagccggctgtagcatcgtggaaaagccagaaggaggtggagggtatcagtttcctgactgggcctacaaaacagagtcatccccaggctcccggcagatccagctgtggcacttcatcctggagctgctgcagaaggaagagttccgccatgtcatcgcctggcagcagggagagtacggggaatttgtcatcaaggatccagatgaggtggcccgcctctggggccgcaggaaatgcaaaccacagatgaattatgacaagctgagccgggccctcagatactattacaacaagaggatccttcataaaacaaaagggaaaagatttacctataaatttaacttcaacaagctggtgatgcccaactacccattcatcaacattcggtcaagtggtaagatacaaactcttttggtagggaattaattttgaattgaaaagaatttttaaaaatccaaatctaagacatggcatgtttaggaagattttagaaacactaaaataatgtgatcctttggattgcctcaatgttcttactcaagtcatctcacttataaggagagttataggctattcagtatcaagatagatttctttggtttatttggttggttcccttttcttcatattggttgtaatctcctagatactattacgctatcttgtttgggaatgatgtttcataggtttgtgatgatctttacgttcaggactcagttttaacacccagcccagtggttctttcatagatgggaacctgtttctacaa

SEQ ID NO: 360117 - DNA, 836 bp, Homo sapiens
tgggaaccggcgggagggcgcctcctcctcccccgccctctctgctgaggatggaagtgacgaaagcagccgaggaggtcacttcctgctggggtggatgaggaggagccggagacgccgcggaggagaccggaccgaagacggaccgtgccgggaagagcaggcgggtgaaaatgaaagccggctgtagcatcgtggaaaagccagaaggaggtggagggtatcagtttcctgactgggcctacaaaacagagtcatccccaggctcccggcagatccagctgtggcacttcatcctggagctgctgcagaaggaagagttccgccatgtcatcgcctggcagcagggagagtacggggaatttgtcatcaaggatccagatgaggtggcccgcctctggggccgcaggaaatgcaaaccacagatgaattatgacaagctgagccgggccctcaggtaaggaaaaggattcccaaatctgtgttaacagattggaaggagactaagctgtttggtgaatgctagataaaaagggtatcaggtaataaaagactacactatcttagtgaataatgtgtcactttaaagtgggagtagaagagctgttgaatgtgagtagcataggcacaggaggagaaaaggcatatctttggttatacgtaggaggggattccaatgtggctggcactggatcctgacagacagctgattctgctctgtagtgggcgagagtatatggtgaaacatggattggagttcatttataatccaaaggattagtttagacttctctattagaatctgttagaatttctttctttgggcttccctgaaa

SEQ ID NO: 360118 - DNA, 1217 bp, Homo sapiens
tgggaaccggcgggagggcgcctcctcctcccccgccctctctgctgaggatggaagtgacgaaagcagccgaggaggtcacttcctgctggggtggatgaggaggagccggagacgccgcggaggagaccggaccgaagacggaccgtgccgggaagagcaggcgggtgaaaatgaaagccggctgtagcatcgtggaaaagccagaaggaggtggagggtatcagtttcctgactgggcctacaaaacagagtcatccccaggctcccggcagatccagctgtggcacttcatcctggagctgctgcagaaggaagagttccgccatgtcatcgcctggcagcagggagagtacggggaatttgtcatcaaggatccagatgaggtggcccgcctctggggccgcaggaaatgcaaaccacagatgaattatgacaagctgagccgggccctcagatactattacaacaagaggatccttcataaaacaaaagggaaaagatttacctataaatttaacttcaacaagctggtgatgcccaactacccattcatcaacattcggtcaagtggtgtggttcctcagagtgcaccaccagtgccaacagcctcttcccggttccatttcccacctctggacacccattctccaaccaatgatgtgcagccgggacggttctctgctagctccctaactgcttctggccaggagtccagtaatggtactgatagaaagactgagctttcagagctggaggatggctcagctgctgactggcgccggggtgtggatcccgtgtcctccaggaatgccattggtggaggagggattggccatcagaaacgcaagcctgacataatgcttcctctgtttgctaggccagggatgtaccctgacccccacagtcccttcgctgtctctccaatccctggccgcggaggtgtccttaatgtccccatttcaccagccctctccctgactcccaccatcttctcctatagcccatcaccaggcctgagccctttcaccagcagcagctgcttctccttcaaccctgaggaaatgaaacactaccttcattctcaagcttgttctgtgttcaactaccatctgagtcctcggacttttccccgttacccagggctcatggttccaccactgcagtgccaaatgcatcctgaggagtcaactcagttctccatcaagctgcagccc

SEQ ID NO: 360119 - DNA, 895 bp, Homo sapiens
tgggaaccggcgggagggcgcctcctcctcccccgccctctctgctgaggatggaagtgacgaaagcagccgaggaggtcacttcctgctggggtggatgaggaggagccggagacgccgcggaggagaccggaccgaagacggaccgtgccgggaagagcaggcgggtgaaaatgaaagccggctgtagcatcgtggaaaagccagaaggaggtggagggtatcagtttcctgactgggcctacaaaacagagtcatccccaggctcccggcagatccagctgtggcacttcatcctggagctgctgcagaaggaagagttccgccatgtcatcgcctggcagcagggagagtacggggaatttgtcatcaaggatccagatgaggtggcccgcctctggggccgcaggaaatgcaaaccacagatgaattatgacaagctgagccgggccctcagatactattacaacaagaggatccttcataaaacaaaagggaaaagatttacctataaatttaacttcaacaagctggtgatgcccaactacccattcatcaacattcggtcaagtggtaagatacaaactcttttggtagggaattaattttgaattgaaaagaatttttaaaaatccaaatctaagacatggcatgtttaggaagattttagaaacactttataaggagagttataggctattcagtatcaagatagatttctttggtttatttggttggttcccttttcttcatattggttgtaatctcctagatactattacgctatcttgtttgggaatgatgtttcataggtttgtgatgatctttacgttcaggactcagttttaacacccagcccagtggttctttcatagatgggaacctgtttctacaa

SEQ ID NO: 360120 - DNA, 471 bp, Homo sapiens
ttgccagttcgtctggagcagttctcatctgggggctcttttgctactaaagggacatctggtaaggcctgcagacatgtttggttgtaactgagagctgctgccagcttgcagtgggtggaggccaggggtgctgctaagtaccctacaacgcacaggacggccccccacaaacggttatcttgaccaacatgtgactagtgctgggctgacaagccctgctccagagacccagccctgtgtttcagcattgttcccttctcctccactttttcctttctatgtattatcgagggacagcctggtgttggtaacattcggcttctgttgggaggaggaaagaagcggaaactcaggttatcaaacacagatgtgccagggcaacaggacccaacagctactacacagaattctgaacatgggcccagaacaagatgcatgagaagtccaggcaggaacggtgggaaacca

SEQ ID NO: 360121 - DNA, 761 bp, Homo sapiens
gcggccgcctactactactaaattcgcggccgctgatctcactcccacagtgctctgctaacaatgcttggtttagatccaggtagtctatagacagaactcagacctgccccaggtcataagcttctccacatagaaagctgccatggctttcaaaaagccatgcccctcttcgtcttcccaggcatggccaggcacccagctcctatgctcctgtctgcagcacacttcccacttgccgcaactcctccctccccattctgttcaagggaatttgttccactcgagattatattacaaaattcagttgggaggttctttcaccctgtgtcctttccctgagctcattggctgacttccagagggtccctgtgagatatattcaggaatagcttccctgggttcatgctggagattgggaagtcctgctgcggctcctacttttttatttccctaaatctgttccagctattggaagggtgaagggcttctccagtggcctggattttcagattccctggtggggatgtgtacttggaggcagactcttcccctctcgcactctgaggacttaggagtttttcacctgtctcacgtagtaggctatagcctcccaattctttcacagggtctgtggattctgttttcctaagttcctgtgttggttctttgggaaaaaattcacactgaatctctgcacattattctgtccttccaagtgggagaagcatgctgacactgcctccagtctgccatcttga

SEQ ID NO: 360122 - DNA, 1083 bp, Homo sapiens
ctttctggcccagcgagagcgcccagggggtgggcgtcttgccccgggcgtcgagagtttggggccgtcccgtacgcggcgcgccgcaacccagtccccgcgaccacagcagcctgctccccaccgcgcttgcagagcccggacgcgcgtgagtcgggggcccgcagaggcctcacccttggaggtcgccgcttgtcaggcctgactgctgttggcgcccaccccgccgcccccgaggggccgctcgaggccggactgctgctttgccgtggcaggccccacccgggacgtggcgctgcgggccggggcggtccagctgcaatccctactccctgccaaaggagaacccagttactgaacatcggatgagaccatggatagtaaattgggagtgaaggtccatacctgggtctcagaagcacagtacaggtttttagaacaagccaccttatacaagttaaaattcatgaaggaatggatacaggttaagttacaccagcctcctgagtatgacagcaacattccttcagggattaaagaaaatgcttcagaagattggaacactgctcagccttcccaaccttcttttaccactgatgtttctaccttagtgatcttcctccttattttaatgcttctttctctttacaattaaaagttcataaaatctttcaacattatttttcactacaaaagtctgaagttctctgtgaaatgcctacatgtaagaattaagatagattttaaagactgtcagtctcaaaattccatgctcatcagttagtgcatgatattaaattatgcttttttcctccttttaaatataccaacattatattgctgatttttttatttacctgggtaagagcactgactcggttctcactaggaaacaaaggtgggtcttctccaacttgaaaatcaaaatatacagttttatgtgtgaaagtagaaaattcattgctgaagcaaaatttgtatgtcccatttttggaggctgtgaaggtaaaactatcatactgtttcttcatctctttgtataacactttaccatcaggatcttctaatcgacaatctacatca

SEQ ID NO: 360123 - DNA, 825 bp, Homo sapiens
ctttctggcccagcgagagcgcccagggggtgggcgtcttgccccgggcgtcgagagtttggggccgtcccgtacgcggcgcgccgcaacccagtccccgcgaccacagcagcctgctccccaccgcgcttgcagagcccggacgcgcgtgagtcgggggcccgcagaggcctcacccttggaggtcgccgcttgtcaggcctgactgctgttggcgcccaccccgccgcccccgaggggccgctcgaggccggactgctgctttgccgtggcaggccccacccgggacgtggcgctgcgggccggggcggtccagctgcaatccctactccctgccaaaggagaacccagttactgaacatcggatgagaccatggatagtaaattgggagtgaaggtccatacctgggtctcagaagcacagtacaggtttttagaacaagccaccttatacaagttaaaattcatgaaggaatggatacaggttaagttacaccagcctcctgagtatgacagcaacattccttcagggattaaagaaaatgcttcagaagattggaacactgctcagccttcccaaccttcttttaccactgatgtttctaccttagtgatcttcctccttattttaatgcttctttctctttacaattaaaagttcataaaatctttcaacattatttttcactacaaaagtctgaagttctctgtgaaatgcctacatgtaagaattaagatagattttaaagactgtcagtctcaaaattccatgctcatcagttagtgcatgatattaaattatgcttttttcctccttttaaatat

SEQ ID NO: 360124 - DNA, 1022 bp, Homo sapiens
ctttctggcccagcgagagcgcccagggggtgggcgtcttgccccgggcgtcgagagtttggggccgtcccgtacgcggcgcgccgcaacccagtccccgcgaccacagcagcctgctccccaccgcgcttgcagagcccggacgcgcgtgagtcgggggcccgcagaggcctcacccttggaggtcgccgcttgtcaggcctgactgctgttggcgcccaccccgccgcccccgaggggccgctcgaggccggactgctgctttgccgtggcaggccccacccgggacgtggcgctgcgggccggggcggtccagctgcaatccctactccctgccaaaggagaacccagttactgaacatcggatgagaccatggatagtaaattgggagtgaaggtccatacctgggtctcagaagcacagtacagttacaccagcctcctgagtatgacagcaacattccttcagggattaaagaaaatgcttcagaagattggaacactgctcagccttcccaaccttcttttaccactgatgtttctaccttagtgatcttcctccttattttaatgcttctttctctttacaattaaaagttcataaaatctttcaacattatttttcactacaaaagtctgaagttctctgtgaaatgcctacatgtaagaattaagatagattttaaagactgtcagtctcaaaattccatgctcatcagttagtgcatgatattaaattatgcttttttcctccttttaaatataccaacattatattgctgatttttttatttacctgggtaagagcactgactcggttctcactaggaaacaaaggtgggtcttctccaacttgaaaatcaaaatatacagttttatgtgtgaaagtagaaaattcattgctgaagcaaaatttgtatgtcccatttttggaggctgtgaaggtaaaactatcatactgtttcttcatctctttgtataacactttaccatcaggatcttctaatcgacaatctacatca

SEQ ID NO: 360125 - DNA, 371 bp, Homo sapiens
actcaatacccttcagaagcctgagaggcgagtgtgaggctgcttagtgcccctaaaataggtacgactgtacagaaaggaagagcgtttaagaaaacagtgaacaggctctgcctgccaagtctgtgcttgagctgcagtttctcatgtgcacgggtgttgagaataaagaaagcatgtctaaaaacccaagtctaggcaggaatttctatagcctctggttattttaccgagttactataatagatgcatgtccatgcataagtgtgaatatacacaaacatgacattataaaaggagatagctttgccatgttacacacccaattcacaaaatggcatcagttccttaagccttatttgctattgtaa

SEQ ID NO: 360126 - DNA, 505 bp, Homo sapiens
tgaactctgtttgtgaaatgaaagagactatgcatctgcgcgtaaccatcacaatcgtgtttctgttttggccttaccagtgaaacatgtttcgcagaacagccaggtttttggagtgagatgaaaacgaactggaaacagttcctgatctatctaactgtcacctaattacaagcatttagcattctttatgaagtgtgcaatgaggcagatactttctgggaaaacaaaaatggggtctatcttattaggtcaggtttttgagacagacacatgagataaaggcttggtacagaaacgctggctataaaaagcaaaattagggcaccttggcatccagttggagtgaatagtttcagtgatgtaataagatactctggcacattctgtctgctagaaagggtgtatagaaattcaggtgtgcccctgctgatgtgatttttctgtcaggaccttgcaaaatggaaagatcgtcgaaaaagttacacttcagatctgcagaaga

SEQ ID NO: 360127 - DNA, 1125 bp, Homo sapiens
gtcacaaagatcacagaaacagtgtatgcccgggcataagatagcacgactgtgtatgctctggaggactgaaaggctgtacaagccctatgtattttttttcaaatatacatatgcatgggtcttgctgctgcctcttttgctgactgtaattggactttgaagcttcgaagttatatcataaaaatttgtaacctttgtctgagagagagctcagctaagcaatcactttccacttcttttcacaggataatataaacgttttcttgaaagcttgtgaacagattggattgaaagaagcccagcttttccatcctggagatctacaggatttatcaaatcgagtcactgtcaagcaagaagagactgacaggagagtgaaaaatgttttgataacattgtactggctgggaagaaaagcacaaagcaacccgtactataatggtccccatcttaatttgaaagcgtttgagaatcttttaggacaagcactgacgaaggcactcgaagactccagcttcctgaaaagaagtggcagggacagtggctacggtgacatctggtgtcctgaacgtggagaatttcttgctcctccaaggcaccataagagagaagattcctttgaaagcttggactctttgggctcgaggtcattgacaagctgctcctctgatatcacgttgagaggggggcgtgaaggttttgaaagtgacacagattcggaatttacattcaagatgcaggattataataaagatgatatgtcgtatcgaaggatttcggctgttgagccaaagactgcgttacccttcaatcgttttttacccaacaaaagtagacagccatcctatgtaccagcacctctgagaaagaaaaagccagacaaacatgaggataacagaagaagttgggcaagcccggtttatacagaagcagatggaacattttcaaggagtaagtccatgagtgatgtcagcgcagaagatgttcaaaacttgcgtcagctgcgttacgaggagatgcagaaaataaaatcacaattaaaagaacaagatcagaaatggcaggatgaccttgcaaaatggaaagatcgtcgaaaaagttacacttcagatctgcagaaga

SEQ ID NO: 360128 - DNA, 1101 bp, Homo sapiens
acagtcgttctgtaatttgtaatcatagaaacagaatgttcctcctcttatttcttccctgccaacagtttctgggtgggtgaatgtcagtagctggagttatttttaaagaggagaggtgaggcttgccgtgcaaagctggaaagagggcgtttgtttgcagagcagagctgacatcaaagtgtagattactgctcagtggctaggcacttgtcctgtaacaggataatataaacgttttcttgaaagcttgtgaacagattggattgaaagaagcccagcttttccatcctggagatctacaggatttatcaaatcgagtcactgtcaagcaagaagagactgacaggagagtgaaaaatgttttgataacattgtactggctgggaagaaaagcacaaagcaacccgtactataatggtccccatcttaatttgaaagcgtttgagaatcttttaggacaagcactgacgaaggcactcgaagactccagcttcctgaaaagaagtggcagggacagtggctacggtgacatctggtgtcctgaacgtggagaatttcttgctcctccaaggcaccataagagagaagattcctttgaaagcttggactctttgggctcgaggtcattgacaagctgctcctctgatatcacgttgagaggggggcgtgaaggttttgaaagtgacacagattcggaatttacattcaagatgcaggattataataaagatgatatgtcgtatcgaaggatttcggctgttgagccaaagactgcgttacccttcaatcgttttttacccaacaaaagtagacagccatcctatgtaccagcacctctgagaaagaaaaagccagacaaacatgaggataacagaagaagttgggcaagcccggtttatacagaagcagatggaacattttcaaggagtaagtccatgagtgatgtcagcgcagaagatgttcaaaacttgcgtcagctgcgttacgaggagatgcagaaaataaaatcacaattaaaagaacaagatcagaaatggcaggatgaccttgcaaaatggaaagatcgtcgaaaaagttacacttcagatctgcagaaga

SEQ ID NO: 360129 - DNA, 1020 bp, Homo sapiens
gacttttgaagggtggggtctgtaggaagaatccatgcattgctctgggaagtggcctcaggaagtagagggctggggacagaatcactcatgagttgcagttgttctgggcaacaaagcaaggcggatacttattctggtagcagggtggagtttgaactgggcagttacctctgctcaagccccttgaagaatttcagattccctgttaaccatggaggcatgggctggaagctgggtgtgggggcaggcaagaagagactgacaggagagtgaaaaatgttttgataacattgtactggctgggaagaaaagcacaaagcaacccgtactataatggtccccatcttaatttgaaagcgtttgagaatcttttaggacaagcactgacgaaggcactcgaagactccagcttcctgaaaagaagtggcagggacagtggctacggtgacatctggtgtcctgaacgtggagaatttcttgctcctccaaggcaccataagagagaagattcctttgaaagcttggactctttgggctcgaggtcattgacaagctgctcctctgatatcacgttgagaggggggcgtgaaggttttgaaagtgacacagattcggaatttacattcaagatgcaggattataataaagatgatatgtcgtatcgaaggatttcggctgttgagccaaagactgcgttacccttcaatcgttttttacccaacaaaagtagacagccatcctatgtaccagcacctctgagaaagaaaaagccagacaaacatgaggataacagaagaagttgggcaagcccggtttatacagaagcagatggaacattttcaaggagtaagtccatgagtgatgtcagcgcagaagatgttcaaaacttgcgtcagctgcgttacgaggagatgcagaaaataaaatcacaattaaaagaacaagatcagaaatggcaggatgaccttgcaaaatggaaagatcgtcgaaaaagttacacttcagatctgcagaaga

SEQ ID NO: 360130 - DNA, 738 bp, Homo sapiens
  misc_feature (418)..(418): n is a, c, g, or t
  misc_feature (662)..(662): n is a, c, g, or t
gtcacaaagatcacagaaacagtgtatgcccgggcataagatagcacgactgtgtatgctctggaggactgaaaggctgtacaagccctatgtattttttttcaaatatacatatgcatgggtcttgctgctgcctcttttgctgactgataatataaacgttttcttgaaagcttgtgaacagattggattgaaagaagcccagcttttccatcctggagatctacaggatttatcaaatcgagtcactgtcaagctggactccctggtcagcaatgtcaacattgagctgctcaatgccctccgctaccatatggtgggcaggcgagtcctgactgatgagctgaaacacggcatgaccctcacctctatgtaccagaattccaacatccagatccaccactatcctaatgggatngtaactgtgaactgtgcccggctcctgaaagccgacaccatgcaacaacggggtggtgcacctcatcgataaggtcatctccaccatcaccaacaacatccagcagatcattgagatcgaggacacctttgagacccttcgggctgctgtggctgcatcagggctcaacacgatgcttgaaggtaacggcagtacacgcttttggcccgaccaatgaggccttcgagaagatccctagtgagantttgaaccgtatcctgggcgaccagaagccctgagagactgttgatacagcaatcttgaagtcagctatgtgtgtg

SEQ ID NO: 360131 - DNA, 766 bp, Homo sapiens
gcagccctggatcctgacttagagaatgatgatttctttgtcagaaagactggggctttccatgcaaatccatatgttctccgagcttttgaagactttagaaagttctctgagcaagatgattctgtagagcgagatataattttacagtgtagagaaggtgaacttgtacttccggatttggaaaaagatgatatgattgttcgccgaatcccagcacagaagaaagaagtgccgctgtctggggccccagatagataccacccagtcccttttcccgaaccctggactcttcctccagaaattcaagcaaaatttctctgtgtacttgaaaggacatgcccatccaaagaaaaaagtaatagctgtagaatattagttccttcatatcggcagaagaaagatgacatgctgacacgtaagattcagtcctggaaactgggaactaccgtgcctcccatcagtttcacccctggcccctgcagtgaggctgacttgaagagatgggaggccatccgggaggccagcagactcaggcacaagaaaaggctgatggtggagagactctttcaaaagatttatggtgagaatgggagtaagtccatgagtgatgtcagcgcagaagatgttcaaaacttgcgtcagctgcgttacgaggagatgcagaaaataaaatcacaattaaaagaacaagatcagaaatggcaggatgaccttgcaaaatggaaagatcgtcgaaaaagttacacttcagatctgcagaaga

SEQ ID NO: 360132 - DNA, 1417 bp, Homo sapiens
aaacggctacgtcggggctggtgccgcgcgctgccgctgggcacccgcttcgcttcccgcgtcctgcctgactgcccgggtccccgcgggccttgggtcgctttcaggagtttagagaaagccaggtcttcacgttcgtgtaggttcgagaccttaacgaactgcagagcgcaacaaagggaactagagccccggcgccttcgcagccggagcggaagccggagttgtgggaggcccgcgtgccctccccgcccgtggggcccagacgcgcggggacaacccctcccctccacgcatcccgagtctctctctccctcccttgtcctagccatggaagggctggaggaggcagaggccaactgctccgtggcgttcgctgaggctcagagatgggtggaggcagtaacagagaagaattttgaaacaaaagattttcgagcctctctagaaaatggtgttctgctgtgtgatttgattaataagcttaaacctggcgtcattaagaagatcaatagactgtctacaccaatagcaggattggataatataaacgttttcttgaaagcttgtgaacagattggattgaaagaagcccagcttttccatcctggagatctacaggatttatcaaatcgagtcactgtcaagcaagaagagactgacaggagagtgaaaaatgttttgataacattgtactggctgggaagaaaagcacaaagcaacccgtactataatggtccccatcttaatttgaaagcgtttgagaatcttttaggacaagcactgacgaaggcactcgaagactccagcttcctgaaaagaagtggcagggacagtggctacggtgacatctggtgtcctgaacgtggagaatttcttgctcctccaaggcaccataagagagaagattcctttgaaagcttggactctttgggctcgaggtcattgacaagctgctcctctgatatcacgttgagaggggggcgtgaaggttttgaaagtgacacagattcggaatttacattcaagatgcaggattataataaagatgatatgtcgtatcgaaggatttcggctgttgagccaaagactgcgttacccttcaatcgttttttacccaacaaaagtagacagccatcctatgtaccagcacctctgagaaagaaaaagccagacaaacatgaggataacagaagaagttgggcaagcccggtttatacagaagcagatggaacattttcaaggagtaagtccatgagtgatgtcagcgcagaagatgttcaaaacttgcgtcagctgcgttacgaggagatgcagaaaataaaatcacaattaaaagaacaagatcagaaatggcaggatgaccttgcaaaatggaaagatcgtcgaaaaagttacacttcagatctgcagaaga

SEQ ID NO: 360133 - DNA, 1155 bp, Homo sapiens
gtcacaaagatcacagaaacagtgtatgcccgggcataagatagcacgactgtgtatgctctggaggactgaaaggctgtacaagccctatgtattttttttcaaatatacatatgcatgggtcttgctgctgcctcttttgctgactgtaattggactttgaagcttcgaagttatatcataaaaatttgtaacctttgtctgagagagagctcagctaagcaatcactttccacttcttttcacaggataatataaacgttttcttgaaagcttgtgaacagattggattgaaagaagcccagcttttccatcctggagatctacaggatttatcaaatcgagtcactgtcaagcaagaagagactgacaggagagtgaaaaatgttttgataacattgtactggctgggaagaaaagcacaaagcaacccgtactataatggtccccatcttaatttgaaagcgtttgagaatcttttaggacaagcactgacgaaggcactcgaagactccagcttcctgaaaagaagtggcagggacagtggctacggtgacatctggtgtcctgaacgtggagaatttcttgctcctccaaggcaccataagagagaagattcctttgaaagcttggactctttgggctcgaggtcattgacaagctgctcctctgatatcacgttgagaggggggcgtgaaggttttgaaagtgacacagattcggaatttacattcaagatgcaggattataataaagatgatatgtcgtatcgaaggatttcggctgttgagccaaagactgcgttacccttcaatcgttttttacccaacaaaagtagacagccatcctatgtaccagcacctctgagaaagaaaaagccagacaaacatgaggataacagaagaagttgggcaagcccggtttatacagaagcagatggaacattttcaagactctttcaaaagatttatggtgagaatgggagtaagtccatgagtgatgtcagcgcagaagatgttcaaaacttgcgtcagctgcgttacgaggagatgcagaaaataaaatcacaattaaaagaacaagatcagaaatggcaggatgaccttgcaaaatggaaagatcgtcgaaaaagttacacttcagatctgcagaaga

SEQ ID NO: 360134 - DNA, 721 bp, Homo sapiens
tcctccagaaattcaagcaaaatttctctgtgtacttgaaaggacatgcccatccaaagaaaaaagtaatagctgtagaatattagttccttcatatcggcagaagaaagatgacatgctgacacgtaagattcagtcctggaaactgggaactaccgtgcctcccatcagtttcacccctggcccctgcagtgaggctgacttgaagagatgggaggccatccgggaggccagcagactcaggcacaagaaaaggctgatggtggagaggtcagagtgtgtttctgcaaggattttgcttgtaatggatggtcttgtgtaacttttctcatgcgagaaagcagctcatcgtgttgctcaactctgcatgtcgcgtgccattttgaagcatcccgtaaaatttaatttgctttgaaaaaccctcagtcgttttgtacaaaaagtgcaattccatatttgcatatctctaaataacttatttaggcctgtttaagactgtatatacataaaccttgcctttgacttaagcagtactgtggtactatccaccaatatgaagtttctggacttctcatgttcaggcatttttgtaacagtctggttatagtttggttttatgtgttgctcacattttagagtgtctgatttttttgggggggtgaaattttcccttaaaatatggcattgcaaatttcatttaacttaatttttggttttggcc

SEQ ID NO: 360135 - DNA, 453 bp, Homo sapiens
ctaacttgcagtctaacagtgaagaagattttttttctccttctgagttctctcccaccactgtctagttcttttggttgcctccatatgggctccatatagtacccagtccaagactgggtcttacataggtgatttctgatctagtggggctattctaaagctagtcactgagccagcaggcagcttggcccagttcctggctgcaaagctctgcctttaacctctaggctctctagatacatagttttaatataacttgtggcctcaggtggagagtgtagctttttcagcctccctgaggtaaggaacccctacctggactactgctttagacagcaagcttgtcctttgttcctttcctcagttggatgcttttagtccttattattctgcagaaactcctggccacctttactacttttggttttttttttttttaagccgagtctc

SEQ ID NO: 360136 - DNA, 4725 bp, Homo sapiens
ggcgttactggaacagcgtcattaagcaggaagcccaccctctcctagctggctcattaggagcttcccatttctggtgggaccacctcccggcctgggcgggcagagggagcaccctgctggtcggaggatgctccgaggcccgacgctgctcccggcgggctgtcatcctcctaggggtcggccggccggcctggagccgccccgcccacggccgaggtttcggtttcccttgggagccccgccctgtgtcccggggagccggaggaggtggagatgaatggcgggcgcggcgaccgggagccggacccctgggaggtcggagcttgtcgagggatgcggctggcgctgcccggagcatggcgaccgcgtggctgagctcttctgtcgccgctgccgccgctgcgtgtgcgcgctttgcccggtgctgggcgcgcaccgtggccaccctgtgggcctggcgctggaggcagcggtgcacgtgcagaaactcagccaagaatgtttaaagcagctggcaatcaagaagcagcagcacattgacaacataacccagatagaagatgccaccgagaagctcaaggctaatgcagagtcaagtaaaacctggctgaaggggaaattcactgaactcagattactacttgacgaagaggaagcgctggccaagaaattcattgataaaaacacgcagcttaccctccaggtgtacagggaacaagctgactcttgcagagagcaacttgacatcatgaatgatctctccaacagggtctggagtatcagccaggagcccgatcctgtccagaggcttcaggcatacacggccaccgagcaggagatgcagcagcagatgagcctcggggagctgtgccatcccgtgcccctctcctttgagcccgtcaagagcttctttaagggcctcgtggaagccgtggagagtacattacagacgccattggacattcgccttaaggaaagcataaactgccagctctcagacccttccagcaccaagccaggtaccttgttgaaaaccagcccctcaccagagcgatcgctattgctgaaatacgcgcgcacgcccacgctggatcctgacacgatgcacgcgcgcctgcgcctgtccgccgatcgcctgacggtgcgctgcggcctgctgggcagcctggggcccgtgcccgtgctgcggttcgacgcgctctggcaagtgctggctcgtgactgcttcgccaccggccgccactactgggaggttgacgtgcaggaggcgggcgccggctggtgggtgggcgcggcctacgcctcccttcggcgccgcggggcctcggccgccgcccgcctgggctgcaaccgccagtcctggtgcctcaagcgctacgaccttgagtactgggccttccacgacggccagcgcagccgcctgcggccccgcgacgacctcgaccggctcggcgtcttcctggactacgaggccggcgtcctcgccttctacgacgtgacgggcggcatgagccacctgcataccttccgcgccacgttccaggagccgctctacccggccctgcggctctgggagggggccatcagcatcccccggctgccctaggggccaggaccggcgtgacagcctccaggtacgccgcagctgcccagtctcgcctaatctacctagatcagcgtggctggtccccttactgcctgcttcttagggccctctccctgccccagctttccccgaccaatcacgcctacagtgctttgaaggtttcctctcctaggctagtttcaaacaggccctaaacaagtctgctgctgccctctcatcagacctccgcaccctcaccccaccatcacttacactactttaatccagttccttcaaagtgatacccccacaggtaagccctcagcatcctgaatacatcatccgcagcctgggaaccttctccctcgtacagcacaggaacctgacacatagtaggcacacagtaaacgtttgtgaatgaatgggagtcatccagtcctgactcttctgtctcttgaggtcccttgaatcttccgcttcctccccaccgatttcagcgtgtccacatcacagctccctccagaagctgcaagagcttcttagcagttcctggtctgaaccctctcccagtcctcatcttccaccctaaaactagagtgatcttcctaaaacttcacttaacccctcagctatgaaaaggcttccaggagtttccatgaaataacaaaaaaaaatacaagcgcctcaccttagcattcaaggcttgtctagtctgcccaaaattacttatcctcacctagctcctaccactcttcttagagactctccagtcagaaatgtgtcgcatagttccacctccacacctctctgctgccagcacattcatgcagaaaagtcttttcacctgtctcagtcttccgcaggcttacctgcgccaggaagtctaaccaaggaacaagaatctcactatcagagccacaaatctgggacctgtctttccaactaaattggaggctttggaagggcagctttgtcctatactctctccaccctgaaaagttcccagaaagccccttccctcccaagcagtgaattaataaccagcaggtgcctatcactgagtaacagaagagctgagttaggcgggcctcacaggtcacccagccagatctcatctggggagtctgaggtcctgaaagaaagcagagctgcgtaaagttaccccggggtgatataggggggccagacgtgtgccccgttcacccacccccaggcaagcatctgacctgtcccctggcccagcccttaggcccagctttcaacctgcttactcatttctcaggggattttgggaaggaatcagcaggtgacagttgctaagcaaccaaagggggtggtgtttcccaactgtcttgggacaaaaagggtaagagcacccttagatccagatgttgccaaggaaacccagagtgcccagctgtctggaatgaagtgacagaggtagaaaacagtaggccctcacaggaggccaccttcgctagcagggagtgggaggcttctttccagggatttgtgtctccgttctgaaggttctgcgtcctgttttgtcaattccctagacggttttgaagttatattctgttaaagcatcttcataggtgcttggtgggaggccaaggtcgccgaatcctcgtggtttaaatagactttcagtgcattagtttgaaccatataaaactgacaattttcaatagtttttgagttaaaaatggcacttttgatatgagacaatgtagcagaataccaggcagacagaaccttgcaaacaccttaacttctaaccaaagactttaaaactctggctggacagagttttaagcactatgctgcaggaatcctgagaaaaaggggaaattaattctattaggaatggcccaaactgaattgtgacaggcagagggtgttcctgacagagggaagatgaatacacttgaccccaacatttctgcccatccctgatgaccaagacctcttcccagacccacagctgcaggggccaagtaataacagctcttaatagtttataatgcactgttttaatgctttacgactaaactcatctgatcctttcatcagccctagagggtagaaagttttcccaattctacacatggcaaaatggagacccagagtcacttgcccaaggtcgcacagctagtggtggagctggagtctgggcccaggctgtgagttccaggtctgtgctcatggccaccaggccatactgctcagggtgaatgcagctggtctctggccagtgcctggtgctctggcccctctcgtggagctactgcccatgatgctttcctagtgcctggttactctgcgagacttgagtctacctttggactgccttccttgggggtctgagatgaggccttatggcccagaggggaacttgattcaaaaatttgggattcatgtagcagagacagagctagactgtaaaggtcacaaactagctgtgtcaaggcccgtgatagccagaaagcggcagtttcagtccatatcaattgtgtgaccagggctagtcactttttacttctcagtgccatctataaaatggggataatagcactacctaccaagtgctgtgaggctcaaatgagccaaaggttataaacttgccttaaaactatagtcctatacaaaaattagctgggcgtggtggtgcatgcctgtaatcccagctactagggaggctgaggcaagagagttgcttgaacccaggaggcggagattgcagtgagctgagattgcaccactgcactccagcctggggacagagcaagactcttgtctcaaaaaaaacaaaaaaaacatatatactgctgtatcatgccaggatttatcagcattcccaagggagcttgcacggtactgaccgagtgctgagactactggtattcccagctgccatgtggcagcagcaggagctactagaatattctcagcacaggaatgaggcttccttggtttccatgtctgtaagggttactgatcacttaccttcttctctttcagacttgaatctgtagacatttctttattgatatggcaaattgcttgcagatatttttaaatgacagcaattttctaatatttggtttaataaaatgtgaataatgtccctttta

SEQ ID NO: 360137 - DNA, 2033 bp, Homo sapiens
ggcgttactggaacagcgtcattaagcaggaagcccaccctctcctagctggctcattaggagcttcccatttctggtgggaccacctcccggcctgggcgggcagagggagcaccctgctggtcggaggatgctccgaggcccgacgctgctcccggcgggctgtcatcctcctaggggtcggccggccggcctggagccgccccgcccacggccgaggtttcggtttcccttgggagccccgccctgtgtcccggggagccggaggaggtggagatgaatggcgggcgcggcgaccgggagccggacccctgggaggtcggagcttgtcgagggatgcggctggcgctgcccggagcatggcgaccgcgtggctgagctcttctgtcgccgctgccgccgctgcgtgtgcgcgctttgcccggtgctgggcgcgcaccgtggccaccctgtgggcctggcgctggaggcagcggtgcacgtgcagaaactcagccaagaatgtttaaagcagctggcaatcaagaagcagcagcacattgacaacataacccagatagaagatgccaccgagaagctcaaggctaatgcagagtcaagtaaaacctggctgaaggggaaattcactgaactcagattactacttgacgaagaggaagcgctggccaagaaattcattgataaaaacacgcagcttaccctccaggtgtacagggaacaagctgactcttgcagagagcaacttgacatcatgaatgatctctccaacagggtctggagtatcagccaggagcccgatcctgtccagaggcttcaggcatacacggccaccgagcaggagatgcagcagcagatgagcctcggggagctgtgccatcccgtgcccctctcctttgagcccgtcaagagcttctttaagggcctcgtggaagccgtggagagtacattacagacgccattggacattcgccttaaggaaagcataaactgccagctctcagacccttccagcaccaagccaggtaccttgttgaaaaccagcccctcaccagagcgatcgctattgctgaaatacgcgcgcacgcccacgctggatcctgacacgatgcacgcgcgcctgcgcctgtccgccgatcgcctgacggtgcgctgcggcctgctgggcagcctggggcccgtgcccgtgctgcggttcgacgcgctctggcaagtgctggctcgtgactgcttcgccaccggccgccactactgggaggttgacgtgcaggaggcgggcgccggctggtgggtgggcgcggcctacgcctcccttcggcgccgcggggcctcggccgccgcccgcctgggctgcaaccgccagtcctggtgcctcaagcgctacgaccttgagtactgggccttccacgacggccagcgcagccgcctgcggccccgcgacgacctcgaccggctcggcgtcttcctggactacgaggccggcgtcctcgccttctacgacgtgacgggcggcatgagccacctgcataccttccgcgccacgttccaggagccgctctacccggccctgcggctctgggagggggccatcagcatcccccggctgccctaggggccaggaccggcgtgacagcctccagaatgtcatggaagcagaatcgtacagtatgttcccttctgcatatgctgctttctcactcagcatcatttccttgagatgcatccaggctgctgcacgcatcaatagttcattcctggctgggcgcggtggctcacgcctgtaatcccagcgctttgggaggccgatgtgggtggatcacaaggtcaggagtttgagactagcctggccaagatggtgaaaccccatctctgcaaaaaatacaaaaattagccgggcaccatggcatgtgcctgtaatccctgctactcaggaggctgaggaaggagaatcacttgaacccgggcagcggaggttgcagtgagccgagatcacaccactgcactccagcctgggcaatagagtgagactccgtttc

SEQ ID NO: 360138 - DNA, 1750 bp, Homo sapiens
ggcgttactggaacagcgtcattaagcaggaagcccaccctctcctagctggctcattaggagcttcccatttctggtgggaccacctcccggcctgggcgggcagagggagcaccctgctggtcggaggatgctccgaggcccgacgctgctcccggcgggctgtcatcctcctaggggtcggccggccggcctggagccgccccgcccacggccgaggtttcggtttcccttgggagccccgccctgtgtcccggggagccggaggaggtggagatgaatggcgggcgcggcgaccgggagccggacccctgggaggtcggagcttgtcgagggatgcggctggcgctgcccggagcatggcgaccgcgtggctgagctcttctgtcgccgctgccgccgctgcgtgtgcgcgctttgcccggtgctgggcgcgcaccgtggccaccctgtgggcctggcgctggaggcagcggtgcacgtgcagaaactcagccaagaatgtttaaagcagctggcaatcaagaagcagcagcacattgacaacataacccagatagaagatgccaccgagaagctcaaggctaatgcagagtcaagtaaaacctggctgaaggggaaattcactgaactcagattactacttgacgaagaggaagcgctggccaagaaattcattgataaaaacacgcagcttaccctccaggtgtacagggaacaagctgactcttgcagagagcaacttgacatcatgaatgatctctccaacagggtctggagtatcagccaggagcccgatcctgtccagaggcttcaggcatacacggccaccgagcaggagatgcagcagcagatgagcctcggggagctgtgccatcccgtgcccctctcctttgagcccgtcaagagcttctttaagggcctcgtggaagccgtggagagtacattacagacgccattggacattcgccttaaggaaagcataaactgccagctctcagacccttccagcaccaagccaggtaccttgttgaaaaccagcccctcaccagagcgatcgctattgctgaaatacgcgcgcacgcccacgctggatcctgacacgatgcacgcgcgcctgcgcctgtccgccgatcgcctgacggtgcgctgcggcctgctgggcagcctggggcccgtgcccgtgctgcggttcgacgcgctctggcaagtgctggctcgtgactgcttcgccaccggccgccactactgggaggttgacgtgcaggaggcgggcgccggctggtgggtgggcgcggcctacgcctcccttcggcgccgcggggcctcggccgccgcccgcctgggctgcaaccgccagtcctggtgcctcaagcgctacgaccttgagtactgggccttccacgacggccagcgcagccgcctgcggccccgcgacgacctcgaccggctcggcgtcttcctggactacgaggccggcgtcctcgccttctacgacgtgacgggcggcatgagccacctgcataccttccgcgccacgttccaggagccgctctacccggccctgcggctctgggagggggccatcagcatcccccggctgccctaggggccaggaccggcgtgacagcctccagacttgaatctgtagacatttctttattgatatggcaaattgcttgcagatatttttaaatgacagcaattttctaatatttggtttaataaaatgtgaataatgtccctttta

SEQ ID NO: 360139 - DNA, 523 bp, Homo sapiens
tgctgaaccctgccatcttagacacggctcctcccttttccatgcctctgtttctgcatctgtaaagtggagaccataatgcagtcgcctctcctgggctgctgtgaggattaaatgagctcttgggcgagattatgcgaatctccagttgtgtggtatttttagcacgtcttatttgtctgcttgcataagctccgggcgctcatttctcaacaattccttacaggcataaactgccagctctcagacccttccagcaccaagccaggtaccttgttgaaaaccagcccctcaccagagcgatcgctattgctgaaatgtaagacccccgggagtggggatagggtggagacggtggagatggtgggatgttgggtggaggaggatcatggaaatggaggtccctctttttttctcattagaatttatttatttatttatttattttaagaacttgttttttaaaaaatgtttattattaaaggcaataaaacaatacatgttcattgtagaaaaattagaa

SEQ ID NO: 360140 - DNA, 573 bp, Homo sapiens
agctcaatgattttttaaaaaggaaacatattttgtaaccaccttcagatcaagaaatggaaatttccactccccagaagtcttcctcatgtgccttcttgtttactatccccaaaggggatccactctccagacttctaggactataggttagttttacctgtttttgaactttcagtagatcattcacactatacccttctgtgttttgcttctttcactcaatatgagatttatccatttttgtatattgacatactgagtggctgttataaattcacttagtacttctaagctatctacagattatttgggtttttgtgtaaataagcatgtcacctatgaataataatctttcatttccccgatctttattctttcctttcacttctttttcgtgccttgagttactgtctactacatttagaacattgttgaatagaagtggttataatgagcagcattttctcccaccttagacatatatccaacagaaatgcatacatatgtgaatcaaaagacctgcacaagaatgttatgtgaccgaaacacaggttcagttgctcaacgctt

SEQ ID NO: 360141 - DNA, 4849 bp, Homo sapiens
ggcgttactggaacagcgtcattaagcaggaagcccaccctctcctagctggctcattaggagcttcccatttctggtgggaccacctcccggcctgggcgggcagagggagcaccctgctggtcggaggatgctccgaggcccgacgctgctcccggcgggctgtcatcctcctaggggtcggccggccggcctggagccgccccgcccacggccgaggtttcggtttcccttgggagccccgccctgtgtcccggggagccggaggaggtggagatgaatggcgggcgcggcgaccgggagccggacccctgggaggtcggagcttgtcgagggatgcggctggcgctgcccggagcatggcgaccgcgtggctgagctcttctgtcgccgctgccgccgctgcgtgtgcgcgctttgcccggtgctgggcgcgcaccgtggccaccctgtgggcctggcgctggaggcagcggtgcacgtgcagaaactcagccaagaatgtttaaagcagctggcaatcaagaagcagcagcacattgacaacataacccagatagaagatgccaccgagaagctcaaggctaatgcagagtcaagtaaaacctggctgaaggggaaattcactgaactcagattactacttgacgaagaggaagcgctggccaagaaattcattgataaaaacacgcagcttaccctccaggtgtacagggaacaagctgactcttgcagagagcaacttgacatcatgaatgatctctccaacagggtctggagtatcagccaggagcccgatcctgtccagaggcttcaggcatacacggccaccgagcaggagatgcagcagcagatgagcctcggggagctgtgccatcccgtgcccctctcctttgagcccgtcaagagcttctttaagggcctcgtggaagccgtggagagtacattacagacgccattggacattcgccttaaggaaagcataaactgccagctctcagacccttccagcaccaagccaggtaccttgttgaaaaccagcccctcaccagagcgatcgctattgctgaaatacgcgcgcacgcccacgctggatcctgacacgatgcacgcgcgcctgcgcctgtccgccgatcgcctgacggtgcgctgcggcctgctgggcagcctggggcccgtgcccgtgctgcggttcgacgcgctctggcaagtgctggctcgtgactgcttcgccaccggccgccactactgggaggttgacgtgcaggaggcgggcgccggctggtgggtgggcgcggcctacgcctcccttcggcgccgcggggcctcggccgccgcccgcctgggctgcaaccgccagtcctggtgcctcaagcgctacgaccttgagtactgggccttccacgacggccagcgcagccgcctgcggccccgcgacgacctcgaccggctcggcgtcttcctggactacgaggccggcgtcctcgccttctacgacgtgacgggcggcatgagccacctgcataccttccgcgccacgttccaggagccgctctacccggccctgcggctctgggagggggccatcagcatcccccggctgccctaggggccaggaccggcgtgacagcctccaggtacgccgcagctgcccagtctcgcctaatctacctagatcagcgtggctggtccccttactgcctgcttcttagggccctctccctgccccagctttccccgaccaatcacgcctacagtgctttgaaggtttcctctcctaggctagtttcaaacaggccctaaacaagtctgctgctgccctctcatcagacctccgcaccctcaccccaccatcacttacactactttaatccagttccttcaaagtgatacccccacaggtaagccctcagcatcctgaatacatcatccgcagcctgggaaccttctccctcgtacagcacaggaacctgacacatagtaggcacacagtaaacgtttgtgaatgaatgggagtcatccagtcctgactcttctgtctcttgaggtcccttgaatcttccgcttcctccccaccgatttcagcgtgtccacatcacagctccctccagaagctgcaagagcttcttagcagttcctggtctgaaccctctcccagtcctcatcttccaccctaaaactagagtgatcttcctaaaacttcacttaacccctcagctatgaaaaggcttccaggagtttccatgaaataacaaaaaaaaatacaagcgcctcaccttagcattcaaggcttgtctagtctgcccaaaattacttatcctcacctagctcctaccactcttcttagagactctccagtcagaaatgtgtcgcatagttccacctccacacctctctgctgccagcacattcatgcagaaaagtcttttcacctgtctcagtcttccgcaggcttacctgcgccaggaagtctaaccaaggaacaagaatctcactatcagagccacaaatctgggacctgtctttccaactaaattggaggctttggaagggcagctttgtcctatactctctccaccctgaaaagttcccagaaagccccttccctcccaagcagtgaattaataaccagcaggtgcctatcactgagtaacagaagagctgagttaggcgggcctcacaggtcacccagccagatctcatctggggagtctgaggtcctgaaagaaagcagagctgcgtaaagttaccccggggtgatataggggggccagacgtgtgccccgttcacccacccccaggcaagcatctgacctgtcccctggcccagcccttaggcccagctttcaacctgcttactcatttctcaggggattttgggaaggaatcagcaggtgacagttgctaagcaaccaaagggggtggtgtttcccaactgtcttgggacaaaaagggtaagagcacccttagatccagatgttgccaaggaaacccagagtgcccagctgtctggaatgaagtgacagaggtagaaaacagtaggccctcacaggaggccaccttcgctagcagggagtgggaggcttctttccagggatttgtgtctccgttctgaaggttctgcgtcctgttttgtcaattccctagacggttttgaagttatattctgttaaagcatcttcataggtgcttggtgggaggccaaggtcgccgaatcctcgtggtttaaatagactttcagtgcattagtttgaaccatataaaactgacaattttcaatagtttttgagttaaaaatggcacttttgatatgagacaatgtagcagaataccaggcagacagaaccttgcaaacaccttaacttctaaccaaagactttaaaactctggctggacagagttttaagcactatgctgcaggaatcctgagaaaaaggggaaattaattctattaggaatggcccaaactgaattgtgacaggcagagggtgttcctgacagagggaagatgaatacacttgaccccaacatttctgcccatccctgatgaccaagacctcttcccagacccacagctgcaggggccaagtaataacagctcttaatagtttataatgcactgttttaatgctttacgactaaactcatctgatcctttcatcagccctagagggtagaaagttttcccaattctacacatggcaaaatggagacccagagtcacttgcccaaggtcgcacagctagtggtggagctggagtctgggcccaggctgtgagttccaggtctgtgctcatggccaccaggccatactgctcagggtgaatgcagctggtctctggccagtgcctggtgctctggcccctctcgtggagctactgcccatgatgctttcctagtgcctggttactctgcgagacttgagtctacctttggactgccttccttgggggtctgagatgaggccttatggcccagaggggaacttgattcaaaaatttgggattcatgtagcagagacagagctagactgtaaaggtcacaaactagctgtgtcaaggcccgtgatagccagaaagcggcagtttcagtccatatcaattgtgtgaccagggctagtcactttttacttctcagtgccatctataaaatggggataatagcactacctaccaagtgctgtgaggctcaaatgagccaaaggttataaacttgccttaaaactatagtcctatacaaaaattagctgggcgtggtggtgcatgcctgtaatcccagctactagggaggctgaggcaagagagttgcttgaacccaggaggcggagattgcagtgagctgagattgcaccactgcactccagcctggggacagagcaagactcttgtctcaaaaaaaacaaaaaaaacatatatactgctgtatcatgccaggatttatcagcattcccaagggagcttgcacggtactgaccgagtgctgagactactggtattcccagctgccatgtggcagcagcaggagctactagaatattctcagcacaggaatgaggcttccttggtttccatgtctgtaagggttactgatcacttaccttcttctctttcagacttgaatctgtagacatttctttattgatatggcaaattgcttgcagatatttttaaatgacagcaattttctaatatttggtttaataaaatgtgaataatgtcccttttaaccatggtcttcactgggagttcatgttgcttcaagtccctagcacccagtgatacccccacaggtaagccctcagcatcctgaatacatcatccgcagcctgggaaccttctccctcgtacag

SEQ ID NO: 360142 - DNA, 4259 bp, Homo sapiens
ggcgttactggaacagcgtcattaagcaggaagcccaccctctcctagctggctcattaggagcttcccatttctggtgggaccacctcccggcctgggcgggcagagggagcaccctgctggtcggaggatgctccgaggcccgacgctgctcccggcgggctgtcatcctcctaggggtcggccggccggcctggagccgccccgcccacggccgaggtttcggtttcccttgggagccccgccctgtgtcccggggagccggaggaggtggagatgaatggcgggcgcggcgaccgggagccggacccctgggaggtcggagcttgtcgagggatgcggctggcgctgcccggagcatggcgaccgcgtggctgagctcttctgtcgccgctgccgccgctgcgtgtgcgcgctttgcccggtgctgggcgcgcaccgtggccaccctgtgggcctggcgctggaggcagcggtgcacgtgcagaaactcagccaagaatgtttaaagcagctggcaatcaagaagcagcagcacattgacaacataacccagatagaagatgccaccgagaagctcaaggctaatgcagagtcaagtaaaacctggctgaaggggaaattcactgaactcagattactacttgacgaagaggaagcgctggccaagaaattcattgataaaaacacgcagcttaccctccaggtgtacagggaacaagctgactcttgcagagagcaacttgacatcatgaatgatctctccaacagggtctggagtatcagccaggagcccgatcctgtccagaggcttcaggcatacacggccaccgagcaggagatgcagcagcagatgagcctcggggagctgtgccatcccgtgcccctctcctttgagcccgtcaagagcttctttaagggcctcgtggaagccgtggagagtacattacagacgccattggacattcgccttaaggaaagcataaactgccagctctcagacccttccagcaccaagccaggtaccttgttgaaaaccagcccctcaccagagcgatcgctattgctgaaatacgcgcgcacgcccacgctggatcctgacacgatgcacgcgcgcctgcgcctgtccgccgatcgcctgacggtgcgctgcggcctgctgggcagcctggggcccgtgcccgtgctgcggttcgacgcgctctggcaagtgctggctcgtgactgcttcgccaccggccgccactactgggaggttgacgtgcaggaggcgggcgccggctggtgggtgggcgcggcctacgcctcccttcggcgccgcggggcctcggccgccgcccgcctgggctgcaaccgccagtcctggtgcctcaagcgctacgaccttgagtactgggccttccacgacggccagcgcagccgcctgcggccccgcgacgacctcgaccggctcggcgtcttcctggactacgaggccggcgtcctcgccttctacgacgtgacgggcggcatgagccacctgcataccttccgcgccacgttccaggagccgctctacccggccctgcggctctgggagggggccatcagcatcccccggctgccctaggggccaggaccggcgtgacagcctccaggtacgccgcagctgcccagtctcgcctaatctacctagatcagcgtggctggtccccttactgcctgcttcttagggccctctccctgccccagctttccccgaccaatcacgcctacagtgctttgaaggtttcctctcctaggctagtttcaaacaggccctaaacaagtctgctgctgccctctcatcagacctccgcaccctcaccccaccatcacttacactactttaatccagttccttcaaagtgatacccccacaggtaagccctcagcatcctgaatacatcatccgcagcctgggaaccttctccctcgtacagcacaggaacctgacacatagtaggcacacagtaaacgtttgtgaatgaatgggagtcatccagtcctgactcttctgtctcttgaggtcccttgaatcttccgcttcctccccaccgatttcagcgtgtccacatcacagctccctccagaagctgcaagagcttcttagcagttcctggtctgaaccctctcccagtcctcatcttccaccctaaaactagagtgatcttcctaaaacttcacttaacccctcagctatgaaaaggcttccaggagtttccatgaaataacaaaaaaaaatacaagcgcctcaccttagcattcaaggcttgtctagtctgcccaaaattacttatcctcacctagctcctaccactcttcttagagactctccagtcagaaatgtgtcgcatagttccacctccacacctctctgctgccagcacattcatgcagaaaagtcttttcacctgtctcagtcttccgcaggcttacctgcgccaggaagtctaaccaaggaacaagaatctcactatcagagccacaaatctgggacctgtctttccaactaaattggaggctttggaagggcagctttgtcctatactctctccaccctgaaaagttcccagaaagccccttccctcccaagcagtgaattaataaccagcaggtgcctatcactgagtaacagaagagctgagttaggcgggcctcacaggtcacccagccagatctcatctggggagtctgaggtcctgaaagaaagcagagctgcgtaaagttaccccggggtgatataggggggccagacgtgtgccccgttcacccacccccaggcaagcatctgacctgtcccctggcccagcccttaggcccagctttcaacctgcttactcatttctcaggggattttgggaaggaatcagcaggtgacagttgctaagcaaccaaagggggtggtgtttcccaactgtcttgggacaaaaagggtaagagcacccttagatccagatgttgccaaggaaacccagagtgcccagctgtctggaatgaagtgacagaggtagaaaacagtaggccctcacaggaggccaccttcgctagcagggagtgggaggcttctttccagggatttgtgtctccgttctgaaggttctgcgtcctgttttgtcaattccctagacggttttgaagttatattctgttaaagcatcttcataggtgcttggtgggaggccaaggtcgccgaatcctcgtggtttaaatagactttcagtgcattagtttgaaccatataaaactgacaattttcaatagtttttgagttaaaaatggcacttttgatatgagacaatgtagcagaataccaggcagacagaaccttgcaaacaccttaacttctaaccaaagactttaaaactctggctggacagagttttaagcactatgctgcaggaatcctgagaaaaaggggaaattaattctattaggaatggcccaaactgaattgtgacaggcagagggtgttcctgacagagggaagatgaatacacttgaccccaacatttctgcccatccctgatgaccaagacctcttcccagacccacagctgcaggggccaagtaataacagctcttaatagtttataatgcactgttttaatgctttacgactaaactcatctgatcctttcatcagccctagagggtagaaagttttcccaattctacacatggcaaaatggagacccagagtcacttgcccaaggtcgcacagctagtggtggagctggagtctgggcccaggctgtgagttccaggtctgtgctcatggccaccaggccatactgctcagggtgaatgcagctggtctctggccagtgcctggtgctctggcccctctcgtggagctactgcccatgatgactccagcctggggacagagcaagactcttgtctcaaaaaaaacaaaaaaaacatatatactgctgtatcatgccaggatttatcagcattcccaagggagcttgcacggtactgaccgagtgctgagactactggtattcccagctgccatgtggcagcagcaggagctactagaatattctcagcacaggaatgaggcttccttggtttccatgtctgtaagggttactgatcacttaccttcttctctttcagacttgaatctgtagacatttctttattgatatggcaaattgcttgcagatatttttaaatgacagcaattttctaatatttggtttaataaaatgtgaataatgtccctttta

SEQ ID NO: 360143 - DNA, 3317 bp, Homo sapiens
ggcgttactggaacagcgtcattaagcaggaagcccaccctctcctagctggctcattaggagcttcccatttctggtgggaccacctcccggcctgggcgggcagagggagcaccctgctggtcggaggatgctccgaggcccgacgctgctcccggcgggctgtcatcctcctaggggtcggccggccggcctggagccgccccgcccacggccgaggtttcggtttcccttgggagccccgccctgtgtcccggggagccggaggaggtggagatgaatggcgggcgcggcgaccgggagccggacccctgggaggtcggagcttgtcgagggatgcggctggcgctgcccggagcatggcgaccgcgtggctgagctcttctgtcgccgctgccgccgctgcgtgtgcgcgctttgcccggtgctgggcgcgcaccgtggccaccctgtgggcctggcgctggaggcagcggtgcacgtgcagaaactcagccaagaatgtttaaagcagctggcaatcaagaagcagcagcacattgacaacataacccagatagaagatgccaccgagaagctcaaggctaatgcagagtcaagtaaaacctggctgaaggggaaattcactgaactcagattactacttgacgaagaggaagcgctggccaagaaattcattgataaaaacacgcagcttaccctccaggtgtacagggaacaagctgactcttgcagagagcaacttgacatcatgaatgatctctccaacagggtctggagtatcagccaggagcccgatcctgtccagaggcttcaggcatacacggccaccgagcaggagatgcagcagcagatgagcctcggggagctgtgccatcccgtgcccctctcctttgagcccgtcaagagcttctttaagggcctcgtggaagccgtggagagtacattacagacgccattggacattcgccttaaggaaagcataaactgccagctctcagacccttccagcaccaagccaggtaccttgttgaaaaccagcccctcaccagagcgatcgctattgctgaaatacgcgcgcacgcccacgctggatcctgacacgatgcacgcgcgcctgcgcctgtccgccgatcgcctgacggtgcgctgcggcctgctgggcagcctggggcccgtgcccgtgctgcggttcgacgcgctctggcaagtgctggctcgtgactgcttcgccaccggccgccactactgggaggttgacgtgcaggaggcgggcgccggctggtgggtgggcgcggcctacgcctcccttcggcgccgcggggcctcggccgccgcccgcctgggctgcaaccgccagtcctggtgcctcaagcgctacgaccttgagtactgggccttccacgacggccagcgcagccgcctgcggccccgcgacgacctcgaccggctcggcgtcttcctggactacgaggccggcgtcctcgccttctacgacgtgacgggcggcatgagccacctgcataccttccgcgccacgttccaggagccgctctacccggccctgcggctctgggagggggccatcagcatcccccggctgccctaggggccaggaccggcgtgacagcctccaggtacgccgcagctgcccagtctcgcctaatctacctagatcagcgtggctggtccccttactgcctgcttcttagggccctctccctgccccagctttccccgaccaatcacgcctacagtgctttgaaggtttcctctcctaggctagtttcaaacaggccctaaacaagtctgctgctgccctctcatcagacctccgcaccctcaccccaccatcacttacactactttaatccagttccttcaaagtgatacccccacaggtaagccctcagcatcctgaatacatcatccgcagcctgggaaccttctccctcgtacagcacaggaacctgacacatagtaggcacacagtaaacgtttgtgaatgaatgggagtcatccagtcctgactcttctgtctcttgaggtcccttgaatcttccgcttcctccccaccgatttcagcgtgtccacatcacagctccctccagaagctgcaagagcttcttagcagttcctggtctgaaccctctcccagtcctcatcttccaccctaaaactagagtgatcttcctaaaacttcacttaacccctcagctatgaaaaggcttccaggagtttccatgaaataacaaaaaaaaatacaagcgcctcaccttagcattcaaggcttgtctagtctgcccaaaattacttatcctcacctagctcctaccactcttcttagagactctccagtcagaaatgtgtcgcatagttccacctccacacctctctgctgccagcacattcatgcagaaaagtcttttcacctgtctcagtcttccgcaggcttacctgcgccaggaagtctaaccaaggaacaagaatctcactatcagagccacaaatctgggacctgtctttccaactaaattggaggctttggaagggcagctttgtcctatactctctccaccctgaaaagttcccagaaagccccttccctcccaagcagtgaattaataaccagcaggtgcctatcactgagtaacagaagagctgagttaggcgggcctcacaggtcacccagccagatctcatctggggagtctgaggtcctgaaagaaagcagagctgcgtaaagttaccccggggtgatataggggggccagacgtgtgccccgttcacccacccccaggcaagcatctgacctgtcccctggcccagcccttaggcccagctttcaacctgcttactcatttctcaggggattttgggaaggaatcagcaggtgacagttgctaagcaaccaaagggggtggtgtttcccaactgtcttgggacaaaaagggtaagagcacccttagatccagatgttgccaaggaaacccagagtgcccagctgtctggaatgaagtgacagaggtagaaaacagtaggccctcacaggaggccaccttcgctagcagggagtgggaggcttctttccagggatttgtgtctccgttctgaaggttctgcgtcctgttttgtcaattccctagacggttttgaagttatattctgttacattgtctcatatcaaaagtgccatttttaactcaaaaactattgaaaattgtcagttttatatggttcaaactaatgcactgaaagtctatttaaaccacgaggattcggcgaccttggcctcccaccaagcaccttttaagat

SEQ ID NO: 360144 - DNA, 1817 bp, Homo sapiens
  misc_feature (22)..(22): n is a, c, g, or t
tgcgggtgtctagaggatccgngttccttgtcttgggacaaaaagggtaagagcacccttagatccagatgttgccaaggaaacccagagtgcccagctgtctggaatgaagtgacagaggtagaaaacagtaggccctcacaggaggccaccttcgctagcagggagtgggaggcttctttccagggatttgtgtctccgttctgaaggttctgcgtcctgttttgtcaattccctagacggttttgaagttatattctgttaaagcatcttcataggtgcttggtgggaggccaaggtcgccgaatcctcgtggtttaaatagactttcagtgcattagtttgaaccatataaaactgacaattttcaatagtttttgagttaaaaatggcacttttgatatgagacaatgtagcagaataccaggcagacagaaccttgcaaacaccttaacttctaaccaaagactttaaaactctggctggacagagttttaagcactatgctgcaggaatcctgagaaaaaggggaaattaattctattaggaatggcccaaactgaattgtgacaggcagagggtgttcctgacagagggaagatgaatacacttgaccccaacatttctgcccatccctgatgaccaagacctcttcccagacccacagctgcaggggccaagtaataacagctcttaatagtttataatgcactgttttaatgctttacgactaaactcatctgatcctttcatcagccctagagggtagaaagttttcccaattctacacatggcaaaatggagacccagagtcacttgcccaaggtcgcacagctagtggtggagctggagtctgggcccaggctgtgagttccaggtctgtgctcatggccaccaggccatactgctcagggtgaatgcagctggtctctggccagtgcctggtgctctggcccctctcgtggagctactgcccatgatgctttcctagtgcctggttactctgcgagacttgagtctacctttggactgccttccttgggggtctgagatgaggccttatggcccagaggggaacttgattcaaaaatttgggattcatgtagcagagacagagctagactgtaaaggtcacaaactagctgtgtcaaggcccgtgatagccagaaagcggcagtttcagtccatatcaattgtgtgaccagggctagtcactttttacttctcagtgccatctataaaatggggataatagcactacctaccaagtgctgtgaggctcaaatgagccaaaggttataaacttgccttaaaactatagtcctatacaaaaattagctgggcgtggtggtgcatgcctgtaatcccagctactagggaggctgaggcaagagagttgcttgaacccaggaggcggagattgcagtgagctgagattgcaccactgcactccagcctggggacagagcaagactcttgtctcaaaaaaaacaaaaaaaacatatatactgctgtatcatgccaggatttatcagcattcccaagggagcttgcacggtactgaccgagtgctgagactactggtattcccagctgccatgtggcagcagcaggagctactagaatattctcagcacaggaatgaggcttccttggtttccatgtctgtaagggttactgatcacttaccttcttctctttcagacttgaatctgtagacatttctttattgatatggcaaattgcttgcagatatttttaaatgacagcaattttctaatatttggtttaataaaatgtgaataatgtccctttta

SEQ ID NO: 360145 - DNA, 2018 bp, Homo sapiens
  misc_feature (141)..(141): n is a, c, g, or t
  misc_feature (162)..(162): n is a, c, g, or t
ttgtcctcaccggagaagagcatatcaggaatgagctacattgtcctcttcagcatctggcatcctttttagctgacctcagctccacattgacctctattctgcgacgcctcatttctgtactgtcttttcccttgttcntgaatctgtgaagacgggcanctggtgtagtagcattctcgttggtggacatggttatgagacaaagggaaacaccggtgtttccctttgtcttgggacaaaaagggtaagagcacccttagatccagatgttgccaaggaaacccagagtgcccagctgtctggaatgaagtgacagaggtagaaaacagtaggccctcacaggaggccaccttcgctagcagggagtgggaggcttctttccagggatttgtgtctccgttctgaaggttctgcgtcctgttttgtcaattccctagacggttttgaagttatattctgttaaagcatcttcataggtgcttggtgggaggccaaggtcgccgaatcctcgtggtttaaatagactttcagtgcattagtttgaaccatataaaactgacaattttcaatagtttttgagttaaaaatggcacttttgatatgagacaatgtagcagaataccaggcagacagaaccttgcaaacaccttaacttctaaccaaagactttaaaactctggctggacagagttttaagcactatgctgcaggaatcctgagaaaaaggggaaattaattctattaggaatggcccaaactgaattgtgacaggcagagggtgttcctgacagagggaagatgaatacacttgaccccaacatttctgcccatccctgatgaccaagacctcttcccagacccacagctgcaggggccaagtaataacagctcttaatagtttataatgcactgttttaatgctttacgactaaactcatctgatcctttcatcagccctagagggtagaaagttttcccaattctacacatggcaaaatggagacccagagtcacttgcccaaggtcgcacagctagtggtggagctggagtctgggcccaggctgtgagttccaggtctgtgctcatggccaccaggccatactgctcagggtgaatgcagctggtctctggccagtgcctggtgctctggcccctctcgtggagctactgcccatgatgctttcctagtgcctggttactctgcgagacttgagtctacctttggactgccttccttgggggtctgagatgaggccttatggcccagaggggaacttgattcaaaaatttgggattcatgtagcagagacagagctagactgtaaaggtcacaaactagctgtgtcaaggcccgtgatagccagaaagcggcagtttcagtccatatcaattgtgtgaccagggctagtcactttttacttctcagtgccatctataaaatggggataatagcactacctaccaagtgctgtgaggctcaaatgagccaaaggttataaacttgccttaaaactatagtcctatacaaaaattagctgggcgtggtggtgcatgcctgtaatcccagctactagggaggctgaggcaagagagttgcttgaacccaggaggcggagattgcagtgagctgagattgcaccactgcactccagcctggggacagagcaagactcttgtctcaaaaaaaacaaaaaaaacatatatactgctgtatcatgccaggatttatcagcattcccaagggagcttgcacggtactgaccgagtgctgagactactggtattcccagctgccatgtggcagcagcaggagctactagaatattctcagcacaggaatgaggcttccttggtttccatgtctgtaagggttactgatcacttaccttcttctctttcagacttgaatctgtagacatttctttattgatatggcaaattgcttgcagatatttttaaatgacagcaattttctaatatttggtttaataaaatgtgaataatgtccctttta

SEQ ID NO: 360146 - DNA, 2231 bp, Homo sapiens
ggcgttactggaacagcgtcattaagcaggaagcccaccctctcctagctggctcattaggagcttcccatttctggtgggaccacctcccggcctgggcgggcagagggagcaccctgctggtcggaggatgctccgaggcccgacgctgctcccggcgggctgtcatcctcctaggggtcggccggccggcctggagccgccccgcccacggccgaggtttcggtttcccttgggagccccgccctgtgtcccggggagccggaggaggtggagatgaatggcgggcgcggcgaccgggagccggacccctgggaggtcggagcttgtcgagggatgcggctggcgctgcccggagcatggcgaccgcgtggctgagctcttctgtcgccgctgccgccgctgcgtgtgcgcgctttgcccggtgctgggcgcgcaccgtggccaccctgtgggcctggcgctggaggcagcggtgcacgtgcagaaactcagccaagaatgtttaaagcagctggcaatcaagaagcagcagcacattgacaacataacccagatagaagatgccaccgagaagctcaaggctaatgcagagtcaagtaaaacctggctgaaggggaaattcactgaactcagattactacttgacgaagaggaagcgctggccaagaaattcattgataaaaacacgcagcttaccctccaggtgtacagggaacaagctgactcttgcagagagcaacttgacatcatgaatgatctctccaacagggtctggagtatcagccaggagcccgatcctgtccagaggcttcaggcatacacggccaccgagcaggagatgcagcagcagatgagcctcggggagctgtgccatcccgtgcccctctcctttgagcccgtcaagagcttctttaagggcctcgtggaagccgtggagagtacattacagacgccattggacattcgccttaaggaaagcataaactgccagctctcagacccttccagcaccaagccaggtaccttgttgaaaaccagcccctcaccagagcgatcgctattgctgaaatacgcgcgcacgcccacgctggatcctgacacgatgcacgcgcgcctgcgcctgtccgccgatcgcctgacggtgcgctgcggcctgctgggcagcctggggcccgtgcccgtgctgcggttcgacgcgctctggcaagtgctggctcgtgactgcttcgccaccggccgccactactgggaggttgacgtgcaggaggcgggcgccggctggtgggtgggcgcggcctacgcctcccttcggcgccgcggggcctcggccgccgcccgcctgggctgcaaccgccagtcctggtgcctcaagcgctacgaccttgagtactgggccttccacgacggccagcgcagccgcctgcggccccgcgacgacctcgaccggctcggcgtcttcctggactacgaggccggcgtcctcgccttctacgacgtgacgggcggcatgagccacctgcataccttccgcgccacgttccaggagccgctctacccggccctgcggctctgggagggggccatcagcatcccccggctgccctaggggccaggaccggcgtgacagcctccaggagtgctttcagcattttctgcctacaagatcctttgaccagtcctttctctgatgtggagtgactgctatacaatgccaactaaacacagaggccaagggcaggaaagggataaagacaatggagaagtaaagggctgtaaggaagtgagaatgaaggcttaaaggaaaggacatgtgcagccagctctcacccctctctgcagccacccagcaactggaggatatggactttgtttggaaccaccccttcttctggtgctctgtttataatgcactgttggccagtgcactaagctggccaacttgaaggagagattgcatcactggatctttttctgtctccagtgggctgacacaggggcctagcccagaaacatctgctgtctaaggagcaggtggaggtggatgacagccaggtccctggagaccgccattcctgccctcgctcactcaaacacaacctgacagcatcagcaagggaactgagaattcagagaatggccttaactgcaaagacctgaaattcggcaaaataacaccaatactccagaagtgtcacccctcaagggcaagccttttcccacgacataag

SEQ ID NO: 360147 - DNA, 1874 bp, Homo sapiens
ggcgttactggaacagcgtcattaagcaggaagcccaccctctcctagctggctcattaggagcttcccatttctggtgggaccacctcccggcctgggcgggcagagggagcaccctgctggtcggaggatgctccgaggcccgacgctgctcccggcgggctgtcatcctcctaggggtcggccggccggcctggagccgccccgcccacggccgaggtttcggtttcccttgggagccccgccctgtgtcccggggagccggaggaggtggagatgaatggcgggcgcggcgaccgggagccggacccctgggaggtcggagcttgtcgagggatgcggctggcgctgcccggagcatggcgaccgcgtggctgagctcttctgtcgccgctgccgccgctgcgtgtgcgcgctttgcccggtgctgggcgcgcaccgtggccaccctgtgggcctggcgctggaggcagcggtgcacgtgcagaaactcagccaagaatgtttaaagcagctggcaatcaagaagcagcagcacattgacaacataacccagatagaagatgccaccgagaagctcaaggctaatgcagagtcaagtaaaacctggctgaaggggaaattcactgaactcagattactacttgacgaagaggaagcgctggccaagaaattcattgataaaaacacgcagcttaccctccaggtgtacagggaacaagctgactcttgcagagagcaacttgacatcatgaatgatctctccaacagggtctggagtatcagccaggagcccgatcctgtccagaggcttcaggcatacacggccaccgagcaggagatgcagcagcagatgagcctcggggagctgtgccatcccgtgcccctctcctttgagcccgtcaagagcttctttaagggcctcgtggaagccgtggagagtacattacagacgccattggacattcgccttaaggaaagcataaactgccagctctcagacccttccagcaccaagccaggtaccttgttgaaaaccagcccctcaccagagcgatcgctattgctgaaatacgcgcgcacgcccacgctggatcctgacacgatgcacgcgcgcctgcgcctgtccgccgatcgcctgacggtgcgctgcggcctgctgggcagcctggggcccgtgcccgtgctgcggttcgacgcgctctggcaagtgctggctcgtgactgcttcgccaccggccgccactactgggaggttgacgtgcaggaggcgggcgccggctggtgggtgggcgcggcctacgcctcccttcggcgccgcggggcctcggccgccgcccgcctgggctgcaaccgccagtcctggtgcctcaagcgctacgaccttgagtactgggccttccacgacggccagcgcagccgcctgcggccccgcgacgacctcgaccggctcggcgtcttcctggactacgaggccggcgtcctcgccttctacgacgtgacgggcggcatgagccacctgcataccttccgcgccacgttccaggagccgctctacccggccctgcggctctgggagggggccatcagcatcccccggctgccctaggggccaggaccggcgtgacagcctccagacttgaatctgtagacatttctttattgatatggcaaattgcttgcagatatttttaaatgacagcaattttctaatatttggtttaataaaatgtgaataatgtcccttttaaccatggtcttcactgggagttcatgttgcttcaagtccctagcacccagtgatacccccacaggtaagccctcagcatcctgaatacatcatccgcagcctgggaaccttctccctcgtacag

SEQ ID NO: 360148 - DNA, 953 bp, Homo sapiens
ttctcacttacgtgtaaacaaaccctgactcccacctgttcccatccaagatcgtattatagcttgaactcctggtctcaagcaatcctcccacctcagcctcctaagtagttgggattacaggctcacacaagcacgcctggctcacataccaccttctaacatattgtgtgactgaatcactatgctatggatttttatgcatctgcccccatctgaatggaagttctctgaggaagggattggggcttgttcatggccatatactctgtgcctaaagcagtgcctggcacaaagatggccctcaatatttgttcagagaaggaacacatgccatttccctctctttgctctgaaaggagtgctttcagcattttctgcctacaagatcctttgaccagtcctttctctgatgtggagtgactgctatacaatgccaactaaacacagaggccaagggcaggaaagggataaagacaatggagaagtaaagggctgtaaggaagtgagaatgaaggcttaaaggaaaggacatgtgcagccagctctcacccctctctgcagccacccagcaactggaggatatggactttgtttggaaccaccccttcttctggtgctctgtttataatgcactgttggccagtgcactaagctggccaacttgaaggagagattgcatcactggatctttttctgtctccagtgggctgacacaggggcctagcccagaaacatctgctgtctaaggagcaggtggaggtggatgacagccaggtccctggagaccgccattcctgccctcgctcactcaaacacaacctgacagcatcagcaagggaactgagaattcagagaatggccttaactgcaaagacctgaaattcggcaaaataacaccaatactccagaagtgtcacccctcaagggcaagccttttcccacgacataag

SEQ ID NO: 360149 - DNA, 243 bp, Homo sapiens
gcacatcttccctgagtcgccgcccatccttgagtgttggatccagtagttgttcgcgcctcagctcctcctcctatttaggactctcccacaccagccttgtcatcctggggttttcctgtccctgtgaattcacataaatcccttaaatctgcctggctcttgggcgagattatgcgaatctccagttgtgtggtatttttagcacgtcttatttgtctgcttgcataagctccgggcgct

SEQ ID NO: 360150 - DNA, 3974 bp, Homo sapiens
ggcgttactggaacagcgtcattaagcaggaagcccaccctctcctagctggctcattaggagcttcccatttctggtgggaccacctcccggcctgggcgggcagagggagcaccctgctggtcggaggatgctccgaggcccgacgctgctcccggcgggctgtcatcctcctaggggtcggccggccggcctggagccgccccgcccacggccgaggtttcggtttcccttgggagccccgccctgtgtcccggggagccggaggaggtggagatgaatggcgggcgcggcgaccgggagccggacccctgggaggtcggagcttgtcgagggatgcggctggcgctgcccggagcatggcgaccgcgtggctgagctcttctgtcgccgctgccgccgctgcgtgtgcgcgctttgcccggtgctgggcgcgcaccgtggccaccctgtgggcctggcgctggaggcagcggtgcacgtgcagaaactcagccaagaatgtttaaagcagctggcaatcaagaagcagcagcacattgacaacataacccagatagaagatgccaccgagaagctcaaggctaatgcagagtcaagtaaaacctggctgaaggggaaattcactgaactcagattactacttgacgaagaggaagcgctggccaagaaattcattgataaaaacacgcagcttaccctccaggtgtacagggaacaagctgactcttgcagagagcaacttgacatcatgaatgatctctccaacagggtctggagtatcagccaggagcccgatcctgtccagaggcttcaggcatacacggccaccgagcaggagatgcagcagcagatgagcctcggggagctgtgccatcccgtgcccctctcctttgagcccgtcaagagcttctttaagggcctcgtggaagccgtggagagtacattacagacgccattggacattcgccttaaggaaactttccccgaccaatcacgcctacagtgctttgaaggtttcctctcctaggctagtttcaaacaggccctaaacaagtctgctgctgccctctcatcagacctccgcaccctcaccccaccatcacttacactactttaatccagttccttcaaagtgatacccccacaggtaagccctcagcatcctgaatacatcatccgcagcctgggaaccttctccctcgtacagcacaggaacctgacacatagtaggcacacagtaaacgtttgtgaatgaatgggagtcatccagtcctgactcttctgtctcttgaggtcccttgaatcttccgcttcctccccaccgatttcagcgtgtccacatcacagctccctccagaagctgcaagagcttcttagcagttcctggtctgaaccctctcccagtcctcatcttccaccctaaaactagagtgatcttcctaaaacttcacttaacccctcagctatgaaaaggcttccaggagtttccatgaaataacaaaaaaaaatacaagcgcctcaccttagcattcaaggcttgtctagtctgcccaaaattacttatcctcacctagctcctaccactcttcttagagactctccagtcagaaatgtgtcgcatagttccacctccacacctctctgctgccagcacattcatgcagaaaagtcttttcacctgtctcagtcttccgcaggcttacctgcgccaggaagtctaaccaaggaacaagaatctcactatcagagccacaaatctgggacctgtctttccaactaaattggaggctttggaagggcagctttgtcctatactctctccaccctgaaaagttcccagaaagccccttccctcccaagcagtgaattaataaccagcaggtgcctatcactgagtaacagaagagctgagttaggcgggcctcacaggtcacccagccagatctcatctggggagtctgaggtcctgaaagaaagcagagctgcgtaaagttaccccggggtgatataggggggccagacgtgtgccccgttcacccacccccaggcaagcatctgacctgtcccctggcccagcccttaggcccagctttcaacctgcttactcatttctcaggggattttgggaaggaatcagcaggtgacagttgctaagcaaccaaagggggtggtgtttcccaactgtcttgggacaaaaagggtaagagcacccttagatccagatgttgccaaggaaacccagagtgcccagctgtctggaatgaagtgacagaggtagaaaacagtaggccctcacaggaggccaccttcgctagcagggagtgggaggcttctttccagggatttgtgtctccgttctgaaggttctgcgtcctgttttgtcaattccctagacggttttgaagttatattctgttaaagcatcttcataggtgcttggtgggaggccaaggtcgccgaatcctcgtggtttaaatagactttcagtgcattagtttgaaccatataaaactgacaattttcaatagtttttgagttaaaaatggcacttttgatatgagacaatgtagcagaataccaggcagacagaaccttgcaaacaccttaacttctaaccaaagactttaaaactctggctggacagagttttaagcactatgctgcaggaatcctgagaaaaaggggaaattaattctattaggaatggcccaaactgaattgtgacaggcagagggtgttcctgacagagggaagatgaatacacttgaccccaacatttctgcccatccctgatgaccaagacctcttcccagacccacagctgcaggggccaagtaataacagctcttaatagtttataatgcactgttttaatgctttacgactaaactcatctgatcctttcatcagccctagagggtagaaagttttcccaattctacacatggcaaaatggagacccagagtcacttgcccaaggtcgcacagctagtggtggagctggagtctgggcccaggctgtgagttccaggtctgtgctcatggccaccaggccatactgctcagggtgaatgcagctggtctctggccagtgcctggtgctctggcccctctcgtggagctactgcccatgatgctttcctagtgcctggttactctgcgagacttgagtctacctttggactgccttccttgggggtctgagatgaggccttatggcccagaggggaacttgattcaaaaatttgggattcatgtagcagagacagagctagactgtaaaggtcacaaactagctgtgtcaaggcccgtgatagccagaaagcggcagtttcagtccatatcaattgtgtgaccagggctagtcactttttacttctcagtgccatctataaaatggggataatagcactacctaccaagtgctgtgaggctcaaatgagccaaaggttataaacttgccttaaaactatagtcctatacaaaaattagctgggcgtggtggtgcatgcctgtaatcccagctactagggaggctgaggcaagagagttgcttgaacccaggaggcggagattgcagtgagctgagattgcaccactgcactccagcctggggacagagcaagactcttgtctcaaaaaaaacaaaaaaaacatatatactgctgtatcatgccaggatttatcagcattcccaagggagcttgcacggtactgaccgagtgctgagactactggtattcccagctgccatgtggcagcagcaggagctactagaatattctcagcacaggaatgaggcttccttggtttccatgtctgtaagggttactgatcacttaccttcttctctttcagacttgaatctgtagacatttctttattgatatggcaaattgcttgcagatatttttaaatgacagcaattttctaatatttggtttaataaaatgtgaataatgtccctttta

SEQ ID NO: 360151 - DNA, 835 bp, Homo sapiens
ggcgttactggaacagcgtcattaagcaggaagcccaccctctcctagctggctcattaggagcttcccatttctggtgggaccacctcccggcctgggcgggcagagggagcaccctgctggtcggaggatgctccgaggcccgacgctgctcccggcgggctgtcatcctcctaggggtcggccggccggcctggagccgccccgcccacggccgaggtttcggtttcccttgggagccccgccctgtgtcccggggagccggaggaggtggagatgaatggcgggcgcggcgaccgggagccggacccctgggaggtcggagcttgtcgagggatgcggctggcgctgcccggagcatggcgaccgcgtggctgagctcttctgtcgccgctgccgccgctgcgtgtgcgcgctttgcccggtgctgggcgcgcaccgtggccaccctgtgggcctggcgctggaggcagcggtgcacgtgcaggtggggacgatggggacggggttcgccgcgcgggagttgggggagccagcccaggcataacggccgaggagggggcgtgcctggccgtggccagtggcgggttacaacctggaaaccaaaggtgccccagagggcgtctaagcggtcgaccgaaagttcagagcgggagcctgagacccaaggaagggcaaaggcgagccaaagccatcagttgagcttcagaaaaggtgggtttaggagtgagaggttgggagcccaggctggtacccagatgtccttgaccgtgtccaccatggccgatccgccacactgccattgggctggaagacagtctgccttttagttaac

SEQ ID NO: 360152 - DNA, 4374 bp, Homo sapiens
tcaagattagaggcatacctgatgtggacctccgaggatcagagatgtcctagtcccagctcatccaccaacttgccatatgactttgggcaagttacctcaccttcagatgcctccattggaaaagaatacaaggaaactcagccaagaatgtttaaagcagctggcaatcaagaagcagcagcacattgacaacataacccagatagaagatgccaccgagaagctcaaggctaatgcagagtcaagtaaaacctggctgaaggggaaattcactgaactcagattactacttgacgaagaggaagcgctggccaagaaattcattgataaaaacacgcagcttaccctccaggtgtacagggaacaagctgactcttgcagagagcaacttgacatcatgaatgatctctccaacagggtctggagtatcagccaggagcccgatcctgtccagaggcttcaggcatacacggccaccgagcaggagatgcagcagcagatgagcctcggggagctgtgccatcccgtgcccctctcctttgagcccgtcaagagcttctttaagggcctcgtggaagccgtggagagtacattacagacgccattggacattcgccttaaggaaagcataaactgccagctctcagacccttccagcaccaagccaggtaccttgttgaaaaccagcccctcaccagagcgatcgctattgctgaaatacgcgcgcacgcccacgctggatcctgacacgatgcacgcgcgcctgcgcctgtccgccgatcgcctgacggtgcgctgcggcctgctgggcagcctggggcccgtgcccgtgctgcggttcgacgcgctctggcaagtgctggctcgtgactgcttcgccaccggccgccactactgggaggttgacgtgcaggaggcgggcgccggctggtgggtgggcgcggcctacgcctcccttcggcgccgcggggcctcggccgccgcccgcctgggctgcaaccgccagtcctggtgcctcaagcgctacgaccttgagtactgggccttccacgacggccagcgcagccgcctgcggccccgcgacgacctcgaccggctcggcgtcttcctggactacgaggccggcgtcctcgccttctacgacgtgacgggcggcatgagccacctgcataccttccgcgccacgttccaggagccgctctacccggccctgcggctctgggagggggccatcagcatcccccggctgccctaggggccaggaccggcgtgacagcctccaggtacgccgcagctgcccagtctcgcctaatctacctagatcagcgtggctggtccccttactgcctgcttcttagggccctctccctgccccagctttccccgaccaatcacgcctacagtgctttgaaggtttcctctcctaggctagtttcaaacaggccctaaacaagtctgctgctgccctctcatcagacctccgcaccctcaccccaccatcacttacactactttaatccagttccttcaaagtgatacccccacaggtaagccctcagcatcctgaatacatcatccgcagcctgggaaccttctccctcgtacagcacaggaacctgacacatagtaggcacacagtaaacgtttgtgaatgaatgggagtcatccagtcctgactcttctgtctcttgaggtcccttgaatcttccgcttcctccccaccgatttcagcgtgtccacatcacagctccctccagaagctgcaagagcttcttagcagttcctggtctgaaccctctcccagtcctcatcttccaccctaaaactagagtgatcttcctaaaacttcacttaacccctcagctatgaaaaggcttccaggagtttccatgaaataacaaaaaaaaatacaagcgcctcaccttagcattcaaggcttgtctagtctgcccaaaattacttatcctcacctagctcctaccactcttcttagagactctccagtcagaaatgtgtcgcatagttccacctccacacctctctgctgccagcacattcatgcagaaaagtcttttcacctgtctcagtcttccgcaggcttacctgcgccaggaagtctaaccaaggaacaagaatctcactatcagagccacaaatctgggacctgtctttccaactaaattggaggctttggaagggcagctttgtcctatactctctccaccctgaaaagttcccagaaagccccttccctcccaagcagtgaattaataaccagcaggtgcctatcactgagtaacagaagagctgagttaggcgggcctcacaggtcacccagccagatctcatctggggagtctgaggtcctgaaagaaagcagagctgcgtaaagttaccccggggtgatataggggggccagacgtgtgccccgttcacccacccccaggcaagcatctgacctgtcccctggcccagcccttaggcccagctttcaacctgcttactcatttctcaggggattttgggaaggaatcagcaggtgacagttgctaagcaaccaaagggggtggtgtttcccaactgtcttgggacaaaaagggtaagagcacccttagatccagatgttgccaaggaaacccagagtgcccagctgtctggaatgaagtgacagaggtagaaaacagtaggccctcacaggaggccaccttcgctagcagggagtgggaggcttctttccagggatttgtgtctccgttctgaaggttctgcgtcctgttttgtcaattccctagacggttttgaagttatattctgttaaagcatcttcataggtgcttggtgggaggccaaggtcgccgaatcctcgtggtttaaatagactttcagtgcattagtttgaaccatataaaactgacaattttcaatagtttttgagttaaaaatggcacttttgatatgagacaatgtagcagaataccaggcagacagaaccttgcaaacaccttaacttctaaccaaagactttaaaactctggctggacagagttttaagcactatgctgcaggaatcctgagaaaaaggggaaattaattctattaggaatggcccaaactgaattgtgacaggcagagggtgttcctgacagagggaagatgaatacacttgaccccaacatttctgcccatccctgatgaccaagacctcttcccagacccacagctgcaggggccaagtaataacagctcttaatagtttataatgcactgttttaatgctttacgactaaactcatctgatcctttcatcagccctagagggtagaaagttttcccaattctacacatggcaaaatggagacccagagtcacttgcccaaggtcgcacagctagtggtggagctggagtctgggcccaggctgtgagttccaggtctgtgctcatggccaccaggccatactgctcagggtgaatgcagctggtctctggccagtgcctggtgctctggcccctctcgtggagctactgcccatgatgctttcctagtgcctggttactctgcgagacttgagtctacctttggactgccttccttgggggtctgagatgaggccttatggcccagaggggaacttgattcaaaaatttgggattcatgtagcagagacagagctagactgtaaaggtcacaaactagctgtgtcaaggcccgtgatagccagaaagcggcagtttcagtccatatcaattgtgtgaccagggctagtcactttttacttctcagtgccatctataaaatggggataatagcactacctaccaagtgctgtgaggctcaaatgagccaaaggttataaacttgccttaaaactatagtcctatacaaaaattagctgggcgtggtggtgcatgcctgtaatcccagctactagggaggctgaggcaagagagttgcttgaacccaggaggcggagattgcagtgagctgagattgcaccactgcactccagcctggggacagagcaagactcttgtctcaaaaaaaacaaaaaaaacatatatactgctgtatcatgccaggatttatcagcattcccaagggagcttgcacggtactgaccgagtgctgagactactggtattcccagctgccatgtggcagcagcaggagctactagaatattctcagcacaggaatgaggcttccttggtttccatgtctgtaagggttactgatcacttaccttcttctctttcagacttgaatctgtagacatttctttattgatatggcaaattgcttgcagatatttttaaatgacagcaattttctaatatttggtttaataaaatgtgaataatgtccctttta

SEQ ID NO: 360153 - DNA, 4441 bp, Homo sapiens
ggcgttactggaacagcgtcattaagcaggaagcccaccctctcctagctggctcattaggagcttcccatttctggtgggaccacctcccggcctgggcgggcagagggagcaccctgctggtcggaggatgctccgaggcccgacgctgctcccggcgggctgtcatcctcctaggggtcggccggccggcctggagccgccccgcccacggccgaggtttcggtttcccttgggagccccgccctgtgtcccggggagccggaggaggtggagatgaatggcgggcgcggcgaccgggagccggacccctgggaggtcggagcttgtcgagggatgcggctggcgctgcccggagcatggcgaccgcgtggctgagctcttctgtcgccgctgccgccgctgcgtgtgcgcgctttgcccggtgctgggcgcgcaccgtggccaccctgtgggcctggcgctggaggcagcggtgcacgtgcagggtctggagtatcagccaggagcccgatcctgtccagaggcttcaggcatacacggccaccgagcaggagatgcagcagcagatgagcctcggggagctgtgccatcccgtgcccctctcctttgagcccgtcaagagcttctttaagggcctcgtggaagccgtggagagtacattacagacgccattggacattcgccttaaggaaagcataaactgccagctctcagacccttccagcaccaagccaggtaccttgttgaaaaccagcccctcaccagagcgatcgctattgctgaaatacgcgcgcacgcccacgctggatcctgacacgatgcacgcgcgcctgcgcctgtccgccgatcgcctgacggtgcgctgcggcctgctgggcagcctggggcccgtgcccgtgctgcggttcgacgcgctctggcaagtgctggctcgtgactgcttcgccaccggccgccactactgggaggttgacgtgcaggaggcgggcgccggctggtgggtgggcgcggcctacgcctcccttcggcgccgcggggcctcggccgccgcccgcctgggctgcaaccgccagtcctggtgcctcaagcgctacgaccttgagtactgggccttccacgacggccagcgcagccgcctgcggccccgcgacgacctcgaccggctcggcgtcttcctggactacgaggccggcgtcctcgccttctacgacgtgacgggcggcatgagccacctgcataccttccgcgccacgttccaggagccgctctacccggccctgcggctctgggagggggccatcagcatcccccggctgccctaggggccaggaccggcgtgacagcctccaggtacgccgcagctgcccagtctcgcctaatctacctagatcagcgtggctggtccccttactgcctgcttcttagggccctctccctgccccagctttccccgaccaatcacgcctacagtgctttgaaggtttcctctcctaggctagtttcaaacaggccctaaacaagtctgctgctgccctctcatcagacctccgcaccctcaccccaccatcacttacactactttaatccagttccttcaaagtgatacccccacaggtaagccctcagcatcctgaatacatcatccgcagcctgggaaccttctccctcgtacagcacaggaacctgacacatagtaggcacacagtaaacgtttgtgaatgaatgggagtcatccagtcctgactcttctgtctcttgaggtcccttgaatcttccgcttcctccccaccgatttcagcgtgtccacatcacagctccctccagaagctgcaagagcttcttagcagttcctggtctgaaccctctcccagtcctcatcttccaccctaaaactagagtgatcttcctaaaacttcacttaacccctcagctatgaaaaggcttccaggagtttccatgaaataacaaaaaaaaatacaagcgcctcaccttagcattcaaggcttgtctagtctgcccaaaattacttatcctcacctagctcctaccactcttcttagagactctccagtcagaaatgtgtcgcatagttccacctccacacctctctgctgccagcacattcatgcagaaaagtcttttcacctgtctcagtcttccgcaggcttacctgcgccaggaagtctaaccaaggaacaagaatctcactatcagagccacaaatctgggacctgtctttccaactaaattggaggctttggaagggcagctttgtcctatactctctccaccctgaaaagttcccagaaagccccttccctcccaagcagtgaattaataaccagcaggtgcctatcactgagtaacagaagagctgagttaggcgggcctcacaggtcacccagccagatctcatctggggagtctgaggtcctgaaagaaagcagagctgcgtaaagttaccccggggtgatataggggggccagacgtgtgccccgttcacccacccccaggcaagcatctgacctgtcccctggcccagcccttaggcccagctttcaacctgcttactcatttctcaggggattttgggaaggaatcagcaggtgacagttgctaagcaaccaaagggggtggtgtttcccaactgtcttgggacaaaaagggtaagagcacccttagatccagatgttgccaaggaaacccagagtgcccagctgtctggaatgaagtgacagaggtagaaaacagtaggccctcacaggaggccaccttcgctagcagggagtgggaggcttctttccagggatttgtgtctccgttctgaaggttctgcgtcctgttttgtcaattccctagacggttttgaagttatattctgttaaagcatcttcataggtgcttggtgggaggccaaggtcgccgaatcctcgtggtttaaatagactttcagtgcattagtttgaaccatataaaactgacaattttcaatagtttttgagttaaaaatggcacttttgatatgagacaatgtagcagaataccaggcagacagaaccttgcaaacaccttaacttctaaccaaagactttaaaactctggctggacagagttttaagcactatgctgcaggaatcctgagaaaaaggggaaattaattctattaggaatggcccaaactgaattgtgacaggcagagggtgttcctgacagagggaagatgaatacacttgaccccaacatttctgcccatccctgatgaccaagacctcttcccagacccacagctgcaggggccaagtaataacagctcttaatagtttataatgcactgttttaatgctttacgactaaactcatctgatcctttcatcagccctagagggtagaaagttttcccaattctacacatggcaaaatggagacccagagtcacttgcccaaggtcgcacagctagtggtggagctggagtctgggcccaggctgtgagttccaggtctgtgctcatggccaccaggccatactgctcagggtgaatgcagctggtctctggccagtgcctggtgctctggcccctctcgtggagctactgcccatgatgctttcctagtgcctggttactctgcgagacttgagtctacctttggactgccttccttgggggtctgagatgaggccttatggcccagaggggaacttgattcaaaaatttgggattcatgtagcagagacagagctagactgtaaaggtcacaaactagctgtgtcaaggcccgtgatagccagaaagcggcagtttcagtccatatcaattgtgtgaccagggctagtcactttttacttctcagtgccatctataaaatggggataatagcactacctaccaagtgctgtgaggctcaaatgagccaaaggttataaacttgccttaaaactatagtcctatacaaaaattagctgggcgtggtggtgcatgcctgtaatcccagctactagggaggctgaggcaagagagttgcttgaacccaggaggcggagattgcagtgagctgagattgcaccactgcactccagcctggggacagagcaagactcttgtctcaaaaaaaacaaaaaaaacatatatactgctgtatcatgccaggatttatcagcattcccaagggagcttgcacggtactgaccgagtgctgagactactggtattcccagctgccatgtggcagcagcaggagctactagaatattctcagcacaggaatgaggcttccttggtttccatgtctgtaagggttactgatcacttaccttcttctctttcagacttgaatctgtagacatttctttattgatatggcaaattgcttgcagatatttttaaatgacagcaattttctaatatttggtttaataaaatgtgaataatgtccctttta

SEQ ID NO: 360154 - DNA, 4826 bp, Homo sapiens
ggcgttactggaacagcgtcattaagcaggaagcccaccctctcctagctggctcattaggagcttcccatttctggtgggaccacctcccggcctgggcgggcagagggagcaccctgctggtcggaggatgctccgaggcccgacgctgctcccggcgggctgtcatcctcctaggggtcggccggccggcctggagccgccccgcccacggccgaggtttcggtttcccttgggagccccgccctgtgtcccggggagccggaggaggtggagatgaatggcgggcgcggcgaccgggagccggacccctgggaggtcggagcttgtcgagggatgcggctggcgctgcccggagcatggcgaccgcgtggctgagctcttctgtcgccgctgccgccgctgcgtgtgcgcgctttgcccggtgctgggcgcgcaccgtggccaccctgtgggcctggcgctggaggcagcggtgcacgtgcagaaactcagccaagaatgtttaaagcagctggcaatcaagaagcagcagcacattgacaacataacccagatagaagatgccaccgagaagctcaaggctaatgcagagtcaagtaaaacctggctgaaggggaaattcactgaactcagattactacttgacgaagaggaagcgctggccaagaaattcattgataaaaacacgcagcttaccctccaggtgtacagggaacaagctgactcttgcagagagcaacttgacatcatgaatgatctctccaacagggtctggagtatcagccaggagcccgatcctgtccagaggcttcaggcatacacggccaccgagcaggagatgcagcagcagatgagcctcggggagctgtgccatcccgtgcccctctcctttgagcccgtcaagagcttctttaagggcctcgtggaagccgtggagagtacattacagacgccattggacattcgccttaaggaaagcataaactgccagctctcagacccttccagcaccaagccaggtaccttgttgaaaaccagcccctcaccagagcgatcgctattgctgaaatatcaagaaatggaaatttccactccccagaagtcttcctcatgtgccttcttgtttactatccccaaaggggatccactctccagacttctaggactatagacgcgcgcacgcccacgctggatcctgacacgatgcacgcgcgcctgcgcctgtccgccgatcgcctgacggtgcgctgcggcctgctgggcagcctggggcccgtgcccgtgctgcggttcgacgcgctctggcaagtgctggctcgtgactgcttcgccaccggccgccactactgggaggttgacgtgcaggaggcgggcgccggctggtgggtgggcgcggcctacgcctcccttcggcgccgcggggcctcggccgccgcccgcctgggctgcaaccgccagtcctggtgcctcaagcgctacgaccttgagtactgggccttccacgacggccagcgcagccgcctgcggccccgcgacgacctcgaccggctcggcgtcttcctggactacgaggccggcgtcctcgccttctacgacgtgacgggcggcatgagccacctgcataccttccgcgccacgttccaggagccgctctacccggccctgcggctctgggagggggccatcagcatcccccggctgccctaggggccaggaccggcgtgacagcctccaggtacgccgcagctgcccagtctcgcctaatctacctagatcagcgtggctggtccccttactgcctgcttcttagggccctctccctgccccagctttccccgaccaatcacgcctacagtgctttgaaggtttcctctcctaggctagtttcaaacaggccctaaacaagtctgctgctgccctctcatcagacctccgcaccctcaccccaccatcacttacactactttaatccagttccttcaaagtgatacccccacaggtaagccctcagcatcctgaatacatcatccgcagcctgggaaccttctccctcgtacagcacaggaacctgacacatagtaggcacacagtaaacgtttgtgaatgaatgggagtcatccagtcctgactcttctgtctcttgaggtcccttgaatcttccgcttcctccccaccgatttcagcgtgtccacatcacagctccctccagaagctgcaagagcttcttagcagttcctggtctgaaccctctcccagtcctcatcttccaccctaaaactagagtgatcttcctaaaacttcacttaacccctcagctatgaaaaggcttccaggagtttccatgaaataacaaaaaaaaatacaagcgcctcaccttagcattcaaggcttgtctagtctgcccaaaattacttatcctcacctagctcctaccactcttcttagagactctccagtcagaaatgtgtcgcatagttccacctccacacctctctgctgccagcacattcatgcagaaaagtcttttcacctgtctcagtcttccgcaggcttacctgcgccaggaagtctaaccaaggaacaagaatctcactatcagagccacaaatctgggacctgtctttccaactaaattggaggctttggaagggcagctttgtcctatactctctccaccctgaaaagttcccagaaagccccttccctcccaagcagtgaattaataaccagcaggtgcctatcactgagtaacagaagagctgagttaggcgggcctcacaggtcacccagccagatctcatctggggagtctgaggtcctgaaagaaagcagagctgcgtaaagttaccccggggtgatataggggggccagacgtgtgccccgttcacccacccccaggcaagcatctgacctgtcccctggcccagcccttaggcccagctttcaacctgcttactcatttctcaggggattttgggaaggaatcagcaggtgacagttgctaagcaaccaaagggggtggtgtttcccaactgtcttgggacaaaaagggtaagagcacccttagatccagatgttgccaaggaaacccagagtgcccagctgtctggaatgaagtgacagaggtagaaaacagtaggccctcacaggaggccaccttcgctagcagggagtgggaggcttctttccagggatttgtgtctccgttctgaaggttctgcgtcctgttttgtcaattccctagacggttttgaagttatattctgttaaagcatcttcataggtgcttggtgggaggccaaggtcgccgaatcctcgtggtttaaatagactttcagtgcattagtttgaaccatataaaactgacaattttcaatagtttttgagttaaaaatggcacttttgatatgagacaatgtagcagaataccaggcagacagaaccttgcaaacaccttaacttctaaccaaagactttaaaactctggctggacagagttttaagcactatgctgcaggaatcctgagaaaaaggggaaattaattctattaggaatggcccaaactgaattgtgacaggcagagggtgttcctgacagagggaagatgaatacacttgaccccaacatttctgcccatccctgatgaccaagacctcttcccagacccacagctgcaggggccaagtaataacagctcttaatagtttataatgcactgttttaatgctttacgactaaactcatctgatcctttcatcagccctagagggtagaaagttttcccaattctacacatggcaaaatggagacccagagtcacttgcccaaggtcgcacagctagtggtggagctggagtctgggcccaggctgtgagttccaggtctgtgctcatggccaccaggccatactgctcagggtgaatgcagctggtctctggccagtgcctggtgctctggcccctctcgtggagctactgcccatgatgctttcctagtgcctggttactctgcgagacttgagtctacctttggactgccttccttgggggtctgagatgaggccttatggcccagaggggaacttgattcaaaaatttgggattcatgtagcagagacagagctagactgtaaaggtcacaaactagctgtgtcaaggcccgtgatagccagaaagcggcagtttcagtccatatcaattgtgtgaccagggctagtcactttttacttctcagtgccatctataaaatggggataatagcactacctaccaagtgctgtgaggctcaaatgagccaaaggttataaacttgccttaaaactatagtcctatacaaaaattagctgggcgtggtggtgcatgcctgtaatcccagctactagggaggctgaggcaagagagttgcttgaacccaggaggcggagattgcagtgagctgagattgcaccactgcactccagcctggggacagagcaagactcttgtctcaaaaaaaacaaaaaaaacatatatactgctgtatcatgccaggatttatcagcattcccaagggagcttgcacggtactgaccgagtgctgagactactggtattcccagctgccatgtggcagcagcaggagctactagaatattctcagcacaggaatgaggcttccttggtttccatgtctgtaagggttactgatcacttaccttcttctctttcagacttgaatctgtagacatttctttattgatatggcaaattgcttgcagatatttttaaatgacagcaattttctaatatttggtttaataaaatgtgaataatgtccctttta

SEQ ID NO: 360155 - DNA, 4383 bp, Homo sapiens
ggcgttactggaacagcgtcattaagcaggaagcccaccctctcctagctggctcattaggagcttcccatttctggtgggaccacctcccggcctgggcgggcagagggagcaccctgctggtcggaggatgctccgaggcccgacgctgctcccggcgggctgtcatcctcctaggggtcggccggccggcctggagccgccccgcccacggccgaggtttcggtttcccttgggagccccgccctgtgtcccggggagccggaggaggtggagatgaatggcgggcgcggcgaccgggagccggacccctgggaggtcggagcttgtcgagggatgcggctggcgctgcccggagcatggcgaccgcgtggctgagctcttctgtcgccgctgccgccgctgcgtgtgcgcgctttgcccggtgctgggcgcgcaccgtggccaccctgtgggcctggcgctggaggcagcggtgcacgtgcagaaactcagccaagaatgtttaaagcagctggcaatcaagaagcagcagcacattgacaacataacccagatagaagatgccaccgagaagctcaaggctaatgcagagtcaagtaaaacctggctgaaggggaaattcactgaactcagattactacttgacgaagaggaagcgctggccaagaaattcattgataaaaacacgcagcttaccctccaggtgtacagggaacaagctgactcttgcagagagcaacttgacatcatgaatgatctctccaacagggtctggagtatcagccaggagcccgatcctgtccagaggcttcaggcatacacggccaccgagcaggagatgcagcagcagatgagcctcggggagctgtgccatcccgtgcccctctcctttgagcccgtcaagagcttctttaagggcctcgtggaagccgtggagagtacattacagacgccattggacattcgccttaaggaaagcataaactgccagctctcagacccttccagcaccaagccaggtaccttgttgaaaaccagcccctcaccagagcgatcgctattgctgaaatacgcgcgcacgcccacgctggatcctgacacgatgcacgcgcgcctgcgcctgtccgccgatcgcctgacggtgcgctgcggcctgctgggcagcctggggcccgtgcccgtgctgcggttcgacgcgctctggcaagtgctggctcgtgactgcttcgccaccggccgccactactgggaggttgacgtgcaggaggcgggcgccggctggtgggtgggcgcggcctacgcctcccttcggcgccgcggggcctcggccgccgcccgcctgggctgcaaccgccagtcctggtgcctcaagcgctacgaccttgagtactgggccttccacgacggccagcgcagccgcctgcggccccgcgacgacctcgaccggctcggcgtcttcctggactacgaggccggcgtcctcgccttctacgacgtgacgggcggcatgagccacctgcataccttccgcgccacgttccaggagccgctctacccggccctgcggctctgggagggggccatcagcatcccccggctgccctaggggccaggaccggcgtgacagcctccaggtacgccgcagctgcccagtctcgcctaatctacctagatcagcgtggctggtccccttactgcctgcttcttagggccctctccctgccccagctttccccgaccaatcacgcctacagtgctttgaaggtttcctctcctaggctagtttcaaacaggccctaaacaagtctgctgctgccctctcatcagacctccgcaccctcaccccaccatcacttacactactttaatccagttccttcaaagtgatacccccacaggtaagccctcagcatcctgaatacatcatccgcagcctgggaaccttctccctcgtacagcacaggaacctgacacatagtaggcacacagtaaacgtttgtgaatgaatgggagtcatccagtcctgactcttctgtctcttgaggtcccttgaatcttccgcttcctccccaccgatttcagcgtgtccacatcacagctccctccagaagctgcaagagcttcttagcagttcctggtctgaaccctctcccagtcctcatcttccaccctaaaactagagtgatcttcctaaaacttcacttaacccctcagctatgaaaaggcttccaggagtttccatgaaataacaaaaaaaaatacaagcgcctcaccttagcattcaaggcttgtctagtctgcccaaaattacttatcctcacctagctcctaccactcttcttagagactctccagtcagaaatgtgtcgcatagttccacctccacacctctctgctgccagcacattcatgcagaaaagtcttttcacctgtctcagtcttccgcaggcttacctgcgccaggaagtctaaccaaggaacaagaatctcactatcagagccacaaatctgggacctgtctttccaactaaattggaggctttggaagggcagctttgtcctatactctctccaccctgaaaagttcccagaaagccccttccctcccaagcagtgaattaataaccagcaggtgcctatcactgagtaacagaagagctgagttaggcgggcctcacaggtcacccagccagatctcatctggggagtctgaggtcctgaaagaaagcagagctgcgtaaagttaccccggggtgatataggggggccagacgtgtgccccgttcacccacccccaggcaagcatctgacctgtcccctggcccagcccttaggcccagctttcaacctgcttactcatttctcaggggattttgggaaggaatcagcaggtgacagttgctaagcaaccaaagggggtggtgtttcccaactgtcttgggacaaaaagggtaagagcacccttagatccagatgttgccaaggaaacccagagtgcccagctgtctggaatgaagtgacagaggtagaaaacagtaggccctcacaggaggccaccttcgctagcagggagtgggaggcttctttccagggatttgtgtctccgttctgaaggttctgcgtcctgttttgtcaattccctagacggttttgaagttatattctgttaaagcatcttcataggtgcttggtgggaggccaaggtcgccgaatcctcgtggtttaaatagactttcagtgcattagtttgaaccatataaaactgacaattttcaatagtttttgagttaaaaatggcacttttgatatgagacaatgtagcagaataccaggcagacagaaccttgcaaacaccttaacttctaaccaaagactttaaaactctggctggacagagttttaagcactatgctgcaggaatcctgagaaaaaggggaaattaattctattaggaatggcccaaactgaattgtgacaggcagagggtgttcctgacagagggaagatgaatacacttgaccccaacatttctgcccatccctgatgaccaagacctcttcccagacccacagctgcaggggccaagtaataacagctcttaatagtttataatgcactgttttaatgctttacgactaaactcatctgatcctttcatcagccctagagggtagaaagttttcccaattctacacatggcaaaatggagacccagagtcacttgcccaaggtcgcacagctagtggtggagctggagtctgggcccaggctgtgagttccaggtctgtgctcatggccaccaggccatactgctcagggtgaatgcagctggtctctggccagtgcctggtgctctggcccctctcgtggagctactgcccatgatgactccagcctggggacagagcaagactcttgtctcaaaaaaaacaaaaaaaacatatatactgctgtatcatgccaggatttatcagcattcccaagggagcttgcacggtactgaccgagtgctgagactactggtattcccagctgccatgtggcagcagcaggagctactagaatattctcagcacaggaatgaggcttccttggtttccatgtctgtaagggttactgatcacttaccttcttctctttcagacttgaatctgtagacatttctttattgatatggcaaattgcttgcagatatttttaaatgacagcaattttctaatatttggtttaataaaatgtgaataatgtcccttttaaccatggtcttcactgggagttcatgttgcttcaagtccctagcacccagtgatacccccacaggtaagccctcagcatcctgaatacatcatccgcagcctgggaaccttctccctcgtacag

SEQ ID NO: 360156 - DNA, 3213 bp, Homo sapiens
ggcgttactggaacagcgtcattaagcaggaagcccaccctctcctagctggctcattaggagcttcccatttctggtgggaccacctcccggcctgggcgggcagagggagcaccctgctggtcggaggatgctccgaggcccgacgctgctcccggcgggctgtcatcctcctaggggtcggccggccggcctggagccgccccgcccacggccgaggtttcggtttcccttgggagccccgccctgtgtcccggggagccggaggaggtggagatgaatggcgggcgcggcgaccgggagccggacccctgggaggtcggagcttgtcgagggatgcggctggcgctgcccggagcatggcgaccgcgtggctgagctcttctgtcgccgctgccgccgctgcgtgtgcgcgctttgcccggtgctgggcgcgcaccgtggccaccctgtgggcctggcgctggaggcagcggtgcacgtgcagaaactcagccaagaatgtttaaagcagctggcaatcaagaagcagcagcacattgacaacataacccagatagaagatgccaccgagaagctcaaggctaatgcagagtcaagtaaaacctggctgaaggggaaattcactgaactcagattactacttgacgaagaggaagcgctggccaagaaattcattgataaaaacacgcagcttaccctccaggtgtacagggaacaagctgactcttgcagagagcaacttgacatcatgaatgatctctccaacagggtctggagtatcagccaggagcccgatcctgtccagaggcttcaggcatacacggccaccgagcaggagatgcagcagcagatgagcctcggggagctgtgccatcccgtgcccctctcctttgagcccgtcaagagcttctttaagggcctcgtggaagccgtggagagtacattacagacgccattggacattcgccttaaggaaagcataaactgccagctctcagacccttccagcaccaagccaggtaccttgttgaaaaccagcccctcaccagagcgatcgctattgctgaaatacgcgcgcacgcccacgctggatcctgacacgatgcacgcgcgcctgcgcctgtccgccgatcgcctgacggtgcgctgcggcctgctgggcagcctggggcccgtgcccgtgctgcggttcgacgcgctctggcaagtgctggctcgtgactgcttcgccaccggccgccactactgggaggttgacgtgcaggaggcgggcgccggctggtgggtgggcgcggcctacgcctcccttcggcgccgcggggcctcggccgccgcccgcctgggctgcaaccgccagtcctggtgcctcaagcgctacgaccttgagtactgggccttccacgacggccagcgcagccgcctgcggccccgcgacgacctcgaccggctcggcgtcttcctggactacgaggccggcgtcctcgccttctacgacgtgacgggcggcatgagccacctgcataccttccgcgccacgttccaggagccgctctacccggccctgcggctctgggagggggccatcagcatcccccggctgccctaggggccaggaccggcgtgacagcctccaggtacgccgcagctgcccagtctcgcctaatctacctagatcagcgtggctggtccccttactgcctgcttcttagggccctctccctgccccagctttccccgaccaatcacgcctacagtgctttgaaggtttcctctcctaggctagtttcaaacaggccctaaacaagtctgctgctgccctctcatcagacctccgcaccctcaccccaccatcacttacactactttaatccagttccttcaaagtgatacccccacaggtaagccctcagcatcctgaatacatcatccgcagcctgggaaccttctccctcgtacagcacaggaacctgacacatagtaggcacacagtaaacgtttgtgaatgaatgggagtcatccagtcctgactcttctgtctcttgaggtcccttgaatcttccgcttcctccccaccgatttcagcgtgtccacatcacagctccctccagaagctgcaagagcttcttagcagttcctggtctgaaccctctcccagtcctcatcttccaccctaaaactagagtgatcttcctaaaacttcacttaacccctcagctatgaaaaggcttccaggagtttccatgaaataacaaaaaaaaatacaagcgcctcaccttagcattcaaggcttgtctagtctgcccaaaattacttatcctcacctagctcctaccactcttcttagagactctccagtcagaaatgtgtcgcatagttccacctccacacctctctgctgccagcacattcatgcagaaaagtcttttcacctgtctcagtcttccgcaggcttacctgcgccaggaagtctaaccaaggaacaagaatctcactatcagagccacaaatctgggacctgtctttccaactaaattggaggctttggaagggcagctttgtcctatactctctccaccctgaaaagttcccagaaagccccttccctcccaagcagtgaattaataaccagcaggtgcctatcactgagtaacagaagagctgagttaggcgggcctcacaggtcacccagccagatctcatctggggagtctgaggtcctgaaagaaagcagagctgcgtaaagttaccccggggtgatataggggggccagacgtgtgccccgttcacccacccccaggcaagcatctgacctgtcccctggcccagcccttaggcccagctttcaacctgcttactcatttctcaggggattttgggaaggaatcagcaggtgacagttgctaagcaaccaaagggggtggtgtttcccaactgtcttgggacaaaaagggtaagagcacccttagatccagatgttgccaaggaaacccagagtgcccagctgtctggaatgaagtgacagaggtagaaaacagtaggccctcacaggaggccaccttcgctagcagggagggtttgatgactcatcaaaccctgtcatcaacccttcatcaaacccttcatcaaacccttagaccactacaggccaattaacgcggttatttgggggccttcttatattgctttccgcagggttagggtttcgatga

SEQ ID NO: 360157 - DNA, 2059 bp, Homo sapiens
ggcgttactggaacagcgtcattaagcaggaagcccaccctctcctagctggctcattaggagcttcccatttctggtgggaccacctcccggcctgggcgggcagagggagcaccctgctggtcggaggatgctccgaggcccgacgctgctcccggcgggctgtcatcctcctaggggtcggccggccggcctggagccgccccgcccacggccgaggtttcggtttcccttgggagccccgccctgtgtcccggggagccggaggaggtggagatgaatggcgggcgcggcgaccgggagccggacccctgggaggtcggagcttgtcgagggatgcggctggcgctgcccggagcatggcgaccgcgtggctgagctcttctgtcgccgctgccgccgctgcgtgtgcgcgctttgcccggtgctgggcgcgcaccgtggccaccctgtgggcctggcgctggaggcagcggtgcacgtgcagaaactcagccaagaatgtttaaagcagctggcaatcaagaagcagcagcacattgacaacataacccagatagaagatgccaccgagaagctcaaggctaatgcagagtcaagtaaaacctggctgaaggggaaattcactgaactcagattactacttgacgaagaggaagcgctggccaagaaattcattgataaaaacacgcagcttaccctccaggtgtacagggaacaagctgactcttgcagagagcaacttgacatcatgaatgatctctccaacagggtctggagtatcagccaggagcccgatcctgtccagaggcttcaggcatacacggccaccgagcaggagatgcagcagcagatgagcctcggggagctgtgccatcccgtgcccctctcctttgagcccgtcaagagcttctttaagggcctcgtggaagccgtggagagtacattacagacgccattggacattcgccttaaggaaagcataaactgccagctctcagacccttccagcaccaagccaggtaccttgttgaaaaccagcccctcaccagagcgatcgctattgctgaaatacgcgcgcacgcccacgctggatcctgacacgatgcacgcgcgcctgcgcctgtccgccgatcgcctgacggtgcgctgcggcctgctgggcagcctggggcccgtgcccgtgctgcggttcgacgcgctctggcaagtgctggctcgtgactgcttcgccaccggccgccactactgggaggttgacgtgcaggaggcgggcgccggctggtgggtgggcgcggcctacgcctcccttcggcgccgcggggcctcggccgccgcccgcctgggctgcaaccgccagtcctggtgcctcaagcgctacgaccttgagtactgggccttccacgacggccagcgcagccgcctgcggccccgcgacgacctcgaccggctcggcgtcttcctggactacgaggccggcgtcctcgccttctacgacgtgacgggcggcatgagccacctgcataccttccgcgccacgttccaggagccgctctacccggccctgcggctctgggagggggccatcagcatcccccggctgccctaggggccaggaccggcgtgacagcctccaggccagagtgacatgcattactgaagagaagcctgaagaagctgacacgggtgggagcacattcactgatcatttcatcagcctggctcagggagggctggtcctgaccatccctctcaggccagcctatcctttttccacacacggcagcagaaccgagtagagtccggcaggacacaccttctcattgcaggccatctcacagggcagcagctgcttggttggggagcccagggcacgctccacaagacgcactgaccgcaccagctcggccagttctccaggctccagcgaggccgagtggtcactccccttccaggtcttgtccaaagttatgtgacgttccaacaccttggcccccagagccactgcggccacagatatcgctatgcctgtttcatgcccagaataccctatgggaat

SEQ ID NO: 360158 - DNA, 658 bp, Homo sapiens
gagggccaggagtccagtaatagaattcttgcaccatttctggaacattctagctctgggaggtcacgtaaccttcttggggtagttcagtggtttagtggtttataatccaggtgtgcgtcagaatcatctgaggaactttgctaaaatacaaaaatctggcctaagtagctccagatctaccttcataaaggaatctgaccactcctggatttggtaatttccaagttctgaaaattttacttaggatttaataactattaacatctgtccctacataggttttctttcctacttatataccttatgttctcttcattctaaccttcatcagtaatagggaaatgttttaattttatttttttagttgaagggtaatgtaccaaaaaatatagttcagtgaattaaaatgaacacacatgtgcaaccatcaattcaggtcaagaaatagaagattgtagcacacaaaagcctactcagccattctcccagtcactacttccttccttacccctgggttatttttgaaatgacacttgatgtatttccctctgttgctgttatgagaacattgctacagccaagtgttgtgtttctgtgtgcataggttgatacttaattatctccccactttttaataaacttttaatttggaaat

SEQ ID NO: 360159 - DNA, 966 bp, Homo sapiens
cctgtgccccccgtgaaaaatctcatccccaaatgcttgagtccctcagtgaaagaattagtttttgtttgtttgtttaagattttggggaagagatttgaggaggaaagaaaggagatggggtgagagggtttttaagtctgaaactctctgtcatgagctgtccccatggttactcaaggacaaggggggacagttttgcctacagctccagagacacagagaacaaaggggtgaccttcatttttcttcaagccggcctctgtgggggtctgtgagcagcttctactggatctttgtttggattctgtgtctgtatttataatttatttgaaatgtgctgggtagtgttctcatttgggggctgaagttagcaactgggccttcagctagggaaagcagttgcgggcagggggtggggggagattatattcactcctgccaaggactcccagcccaggactctctttagagcaaggaagcctcgttctctttcttctcaagaggctctcttgttctccatcaggagagccttgatttaggctacggcctcactctctatggccaccctaagaggaaaggctacttcacctcattacctccagagggctgggcagggccaagtgcctcataggactcatgttctctccaaccagggctggcatcactgctttgcaaagtggggcctgaggtagaagaaggtgtctggtttctccagctgctgtaggaggctaatgggcagggtacttgccctttgtcccactagactctaacccagcaccagggtgcccacctaggacctttcctggacatgagtttccttcactatcatagtcatgagcctcctacttctgggattgcagatcaggggtggggggagaatgttgcatgttgttttctggtgcttgttattatatatttgaataaacagtgctgcaagtacttgccatgaaggaaaaaaaaaag

SEQ ID NO: 360160 - DNA, 853 bp, Homo sapiens
cctgtgccccccgtgaaaaatctcatccccaaatgcttgagtccctcagtgaaagaattagtttttgtttgtttgtttaagattttggggaagagatttgaggaggaaagaaaggagatggggtgagagggtttttaagtctgaaactctctgtcatgagctgtccccatggttactcaaggacaaggggggacagttttgcctacagctccagagacacagagaacaaaggggtgaccttcatttttcttcaagccggcctctgtgggggtctgtgagcagcttctactggatctttgtttggattctgtgtctgtatttataatttatttgaaatgtgctgggtagtgttctcatttgggggctgaagttagcaactgggccttcagctagggaaagcagttgcgggcagggggtggggggagattatattcactcctgccaaggactcccagcccaggactctctttagagcaaggaagcctcgttctctttcttctcaagaggctctcttgttctccatcaggagagccttgatttaggctacggcctcactctctatggccaccctaagaggaaaggctacttcacctcattacctccagctgctgtaggaggctaatgggcagggtacttgccctttgtcccactagactctaacccagcaccagggtgcccacctaggacctttcctggacatgagtttccttcactatcatagtcatgagcctcctacttctgggattgcagatcaggggtggggggagaatgttgcatgttgttttctggtgcttgttattatatatttgaataaacagtgctgcaagtacttgccatgaaggaaaaaaaaaag

SEQ ID NO: 360161 - DNA, 432 bp, Homo sapiens
ggtacctgctggtcaaggccaagtgttgtgagccaaggtttctaaccttggctgcagttacacttaactgctcctctccgaagctggatttagcagagatttgatggaagccctgcaaacctcgattcaaatcaaagttcaaacctagtgactggttgagtgaactgctttaataataacagtgcaaaaattgaatttaaaataatccttttagggatgcaagatgcagtggtttagccttttattaatattcttttctttccactaataaagattttaagtcaacatctccttaaatttgattaattccattaggatcactccaaaaaaaggtttatcagtggctttgaaatccaaatgggatgaagaaaaaatcatttatatggcaaaatctcagttacactaactagattaaagaccttctgctgaatt

SEQ ID NO: 360162 - DNA, 757 bp, Homo sapiens
  misc_feature (691)..(691): n is a, c, g, or t
  misc_feature (693)..(693): n is a, c, g, or t
ccgggctgcaggaattctcgagatcatgcccacacatcccatggagagagaccaatgctttagtagattacagaacagctatgaaaagtccatgaatgaagatcacaaaaaggaaggctttcttatttcatactgtattcttcagggtggtaaaatttctgcttttggcaaaaacataacagacggttccaaacatcagcataaagatcactcatcccataccacccacaggtagggaggaaggatgctgtagtatatgaaaacaaaagttttcacctgagctgagagcatttagcatatcgtggttctgtaacaatatcaaggaccagtgcagaatctggctttcttttctgataggctaccagtgtgtgtttatgtgtgctcattttgtggttctaatcataatggtacatataattagggaaggatatggaagccactttagaatcttattcatttttaaatataaatatgccttgtttcaaactttgttttcttgattcaggctttctttcctgtgagggcttggtttccttattgttgactgctttgttctttgccttgtccttccctataaagcctgcatggaagacgtttaatagtgcaactaaaagagagtcagctgagtgaggcttgtcagccaaagctggaatgctgagctatctggaggagatctcgagaattctcgagntnttttttttttttttttttttttttttttttttttttttttttttttttttttaaggtagatctc

SEQ ID NO: 360163 - DNA, 578 bp, Homo sapiens
  misc_feature (560)..(560): n is a, c, g, or t
gattgggtgggtcattatgtgttgtcgtgcaggtagaggcttactagaagtgtgaaaacgtaggcttggatcaaggcgacagcgatttctaggatagtcagtagaattagaattgtgaagatgataagtgtagagggaaggttaatggttgatattgctagggtggcgcttccaattaggtgcatgagtaggtggcctgcagtaatgttagcaaactcatcactagacatcgtactacacgacacgtactacgttgtagctcacttccactgtgtcctatcaataggagctgtatttgccatcataggaggcttcattcactgatttcccctattctcaggctacaccctagaccaaacctacgccaaaatccatttcactatcatattcatcggcgtaaatctaactttcttcccacaacactttctcggcaactcgaaagccccaagcgagcaaagaagattttctgaatatctgcattgaacctgacaccatcagcaaaggagactttataactataggaactcactttgtagtcccaagcggcaactcgaaagcgncaagcgggggatcctctg

SEQ ID NO: 360164 - DNA, 4476 bp, Homo sapiens
gggaaaggcagagccgcgagctggaccagccgtgcaaatctctagaagatgacggtgttctttaaaacgcttcgaaatcactggaagaaaactacagctgggctctgcctgctgacctggggaggccattggctctatggaaaacactgtgataacctcctaaggagagcagcctgtcaagaagctcaggtgtttggcaatcaactcattcctcccaatgcacaagtgaagaaggccactgtttttctcaatcctgcagcttgcaaaggaaaagccaggactctatttgaaaaaaatgctgccccgattttacatttatctggcatggatgtgactattgttaagacagattatgagggacaagccaagaaactcctggaactgatggaaaacacggatgtgatcattgttgcaggaggagatgggacactgcaggaggttgttactggtgttcttcgacgaacagatgaggctaccttcagtaagattcccattggatttatcccactgggagagaccagtagtttgagtcataccctctttgccgaaagtggaaacaaagtccaacatattactgatgccacacttgccattgtgaaaggagagacagttccacttgatgtcttgcagatcaagggtgaaaaggaacagcctgtatttgcaatgaccggccttcgatggggatctttcagagatgctggcgtcaaagttagcaagtactggtatcttgggcctctaaaaatcaaagcagcccactttttcagcactcttaaggagtggcctcagactcatcaagcctctatctcatacacgggacctacagagagacctcccaatgaaccagaggagacccctgtacaaaggccttctttgtacaggagaatattacgaaggcttgcgtcctactgggcacaaccacaggatgccctttcccaagaggtgagcccggaggtctggaaagatgtgcagctgtccaccattgaactgtccatcacaacacggaataatcagcttgacccgacaagcaaagaagattttctgaatatctgcattgaacctgacaccatcagcaaaggagactttataactataggaagtcgaaaggtgagaaaccccaagctgcacgtggagggcacggagtgtctccaagccagccagtgcactttgcttatcccggagggagcagggggctcttttagcattgacagtgaggagtatgaagcgatgcctgtggaggtgaaactgctccccaggaagctgcagttcttctgtgatcctaggaagagagaacagatgctcacaagccccacccagtgagcagcagaagacaagcactctgagaccacactttaggccaccggtgggaccaaaagggaacaggtgcctcagccatcccaacagtgtcgtcagagggtccccagggcattttcatggcaagtacccctctgcccccactccagcagtgcttcccaaagtgtgctctgtcacctgctttgcaatcggcttccattagcgcatgttttattttggtgtgacggttggccctcctaaacacggactttcctcaggctggttcaagacggaaaaggactttcttctgttttcttccaaagtgcaaccacagtggagagcccacggtgggcttagcctgcctaggcccttccatttctcttctttgaccgtgctaggaattccaggaaagtgcattcctgccctggtgaccttttcctatgtctaggctcctccacaggtgctgctattttgtgagctccggctcctgtttagcttttatttcagttctaacctcagtccagaaacatatgtgaggttgtttccctcttcagccacggctacaataccggaaaatgctagtttttatttatttttttaagtagtgcttcctaaatggtttgcatgagagccacctggggtacatgttgaaaacttatttggggtctaccccaaacctaataacccaaatttggggatggggcccaggaatatgcatttttaaaaagtcatctgcccttcccaggtgattctgtaagttgtccctcaactgtacttggagaaatcgtgttttaaagcagtagtccacaaagtattctgctcatgtgcccccaaaagtattttgaaaaatcatgtataccctcacccatctaagttgatatctaaaattttatctaagttggtatctaaaatttttcatgggaagttaaatagttgacaaagtatgtatttgctggtgtcgtgtaaatattggtattttaaaataaaaactgttacatcactattttaaacatatccagtacaatttaaatatcacaacaatttgacacccttcattcatttataaaaataaatgagctagttctttagtagttaaacatttcttggcttttctccttctgtatttccataccacttttcagccaagaatcctatcataatgtaatctattatgcccgacatcttttaatcattcaccccattacttcttgtcaacaaaaaatataaatggaaattttttttttagctcttgctttaagtgtttgtttgttatctcagtccagaaccaatattatcgtaattaattattggtatataatgaaaacggtattaattcttggatgattaaaagtttttttattagaatgttctttatcctaattagttcatttatccaagaatacatgaatgtgatttacagctgagatggggttcaacctcagctgtattccttgtttctgtatagatgtaagcacataaattcgatggaatagaattacgttaacaatgtttttacagttctttggattcctttggcattttgacaaagatcacagtgctctatcatcaagaattattaatgatgatctatcaactaacaaacaacttgattagattctcctttagtctgttgaaagcagagaactgaaatccacctgatttaccatggctttgccagccagtcattagcaccatttacttttactatcgctgacattttcctttgttcagtggccctgaggttcttacactctagggggcagtgcaccacaggaagatagatcaatgagggaggattgcgagggggaaggggaggaagcagagctggcaggccttagctacaggctctctctcaggcagatcccttttaagatacatacaccatgcccacacatcccatggagagagaccaatgctttagtagattacagaacagctatgaaaagtccatgaatgaagatcacaaaaaggaaggctttcttatttcatactgtattcttcagggtggtaaaatttctgcttttggcaaaaacataacagacggttccaaacatcagcataaagatcactcatcccataccacccacaggtagggaggaaggatgctgtagtatatgaaaacaaaagttttcacctgagctgagagcatttagcatatcgtggttctgtaacaatatcaaggaccagtgcagaatctggctttcttttctgataggctaccagtgtgtgtttatgtgtgctcattttgtggttctaatcataatggtacatataattagggaaggatatggaagccactttagaatcttattcatttttaaatataaatatgccttgtttcaaactttgttttcttgattcaggctttctttcctgtgagggcttggtttccttattgttgactgctttgttctttgccttgtccttccctataaagcctgcatggaagacgtttaatagtgcaactaaaagagagtcagctgagtgaggcttgtcagccaaagctggaatgctgagctatctggaggagatcctaataacccaatttggggatggggcccaggaatctgcattgggaagtcggccacccttcccaggtgattgtttagtacaaactttttgacagattaatttcactcaaatgcaaagattaatcccagcactttgggaggccaaggaaggtggatcacctgaggtcaggagctcgagaccagcctggccaacgtggtgaaatcccatctctactaaaaatacaaaaattagctgggcatggtggcatgtgcctgtagtcccagctactctggaggctgaggcaggagaatcgcttgaacccgggaggcagaggttgcagtgagccgggatcgcaccactctgcactccagcctgggtgacagagcaagactccgtctcaaaaaaaaaaaaaaaaaaccgtagttgctttctattaagatagggttttaaataaagcttttttcctttccctcacagctgttttgcacatatctggatgcagttatatttcctaagtgccagtgcttcacatatgtaactgatgcatcagttctcacaacaaccctaggaagtagctacaggttgagcatccctaatctgaaaaggcgaaatctgaaatgctccaaaatccgaaagtttttgagtgccaccatgatccttaaaggaagtgcccag

SEQ ID NO: 360165 - DNA, 4425 bp, Homo sapiens
gggaaaggcagagccgcgagctggaccagccgtgcaaatctctagaagatgacggtgttctttaaaacgcttcgaaatcactggaagaaaactacagctgggctctgcctgctgacctggggaggccattggctctatggaaaacactgtgataacctcctaaggagagcagcctgtcaagaagctcaggtgtttggcaatcaactcattcctcccaatgcacaagtgaagaaggccactgtttttctcaatcctgcagcttgcaaaggaaaagccaggactctatttgaaaaaaatgctgccccgattttacatttatctggcatggatgtgactattgttaagacagattatgagggacaagccaagaaactcctggaactgatggaaaacacggatgtgatcattgttgcaggaggagatgggacactgcaggaggttgttactggtgttcttcgacgaacagatgaggctaccttcagtaagattcccattggatttatcccactgggagagaccagtagtttgagtcataccctctttgccgaaagtggaaacaaagtccaacatattactgatgccacacttgccattgtgaaaggagagacagttccacttgatgtcttgcagatcaagggtgaaaaggaacagcctgtatttgcaatgaccggccttcgatggggatctttcagagatgctggcgtcaaagttagcaagtactggtatcttgggcctctaaaaatcaaagcagcccactttttcagcactcttaaggagtggcctcagactcatcaagcctctatctcatacacgggacctacagagagacctcccaatgaaccagaggagacccctgtacaaaggccttctttgtacaggagaatattacgaaggcttgcgtcctactgggcacaaccacaggatgccctttcccaagaggtgagcccggaggtctggaaagatgtgcagctgtccaccattgaactgtccatcacaacacggaataatcagcttgacccgacaagcaaagaagattttctgaatatctgcattgaacctgacaccatcagcaaaggagactttataactataggaagtcgaaaggtgagaaaccccaagctgcacgtggagggcacggagtgtctccaagccagccagtgcactttgcttatcccggagggagcagggggctcttttagcattgacagtgaggagtatgaagcgatgcctgtggaggtgaaactgctccccaggaagctgcagttcttctgtgatcctaggaagagagaacagatgctcacaagccccacccagtgagcagcagaagacaagcactctgagaccacactttaggccaccggtgggaccaaaagggaacaggtgcctcagccatcccaacagtgtcgtcagagggtccccagggcattttcatggcaagtacccctctgcccccactccagcagtgcttcccaaagtgtgctctgtcacctgctttgcaatcggcttccattagcgcatgttttattttggtgtgacggttggccctcctaaacacggactttcctcaggctggttcaagacggaaaaggactttcttctgttttcttccaaagtgcaaccacagtggagagcccacggtgggcttagcctgcctaggcccttccatttctcttctttgaccgtgctaggaattccaggaaagtgcattcctgccctggtgaccttttcctatgtctaggctcctccacaggtgctgctattttgtgagctccggctcctgtttagcttttatttcagttctaacctcagtccagaaacatatgtgaggttgtttccctcttcagccacggctacaataccggaaaatgctagtttttatttatttttttaagtagtgcttcctaaatggtttgcatgagagccacctggggtacatgttgaaaacttatttggggtctaccccaaacctaataacccaaatttggggatggggcccaggaatatgcatttttaaaaagtcatctgcccttcccaggtgattctgtaagttgtccctcaactgtacttggagaaatcgtgttttaaagcagtagtccacaaagtattctgctcatgtgcccccaaaagtattttgaaaaatcatgtataccctcacccatctaagttgatatctaaaattttatctaagttggtatctaaaatttttcatgggaagttaaatagttgacaaagtatgtatttgctggtgtcgtgtaaatattggtattttaaaataaaaactgttacatcactattttaaacatatccagtacaatttaaatatcacaacaatttgacacccttcattcatttatcttctgtatttccataccacttttcagccaagaatcctatcataatgtaatctattatgcccgacatcttttaatcattcaccccattacttcttgtcaacaaaaaatataaatggaaattttttttttagctcttgctttaagtgtttgtttgttatctcagtccagaaccaatattatcgtaattaattattggtatataatgaaaacggtattaattcttggatgattaaaagtttttttattagaatgttctttatcctaattagttcatttatccaagaatacatgaatgtgatttacagctgagatggggttcaacctcagctgtattccttgtttctgtatagatgtaagcacataaattcgatggaatagaattacgttaacaatgtttttacagttctttggattcctttggcattttgacaaagatcacagtgctctatcatcaagaattattaatgatgatctatcaactaacaaacaacttgattagattctcctttagtctgttgaaagcagagaactgaaatccacctgatttaccatggctttgccagccagtcattagcaccatttacttttactatcgctgacattttcctttgttcagtggccctgaggttcttacactctagggggcagtgcaccacaggaagatagatcaatgagggaggattgcgagggggaaggggaggaagcagagctggcaggccttagctacaggctctctctcaggcagatcccttttaagatacatacaccatgcccacacatcccatggagagagaccaatgctttagtagattacagaacagctatgaaaagtccatgaatgaagatcacaaaaaggaaggctttcttatttcatactgtattcttcagggtggtaaaatttctgcttttggcaaaaacataacagacggttccaaacatcagcataaagatcactcatcccataccacccacaggtagggaggaaggatgctgtagtatatgaaaacaaaagttttcacctgagctgagagcatttagcatatcgtggttctgtaacaatatcaaggaccagtgcagaatctggctttcttttctgataggctaccagtgtgtgtttatgtgtgctcattttgtggttctaatcataatggtacatataattagggaaggatatggaagccactttagaatcttattcatttttaaatataaatatgccttgtttcaaactttgttttcttgattcaggctttctttcctgtgagggcttggtttccttattgttgactgctttgttctttgccttgtccttccctataaagcctgcatggaagacgtttaatagtgcaactaaaagagagtcagctgagtgaggcttgtcagccaaagctggaatgctgagctatctggaggagatcctaataacccaatttggggatggggcccaggaatctgcattgggaagtcggccacccttcccaggtgattgtttagtacaaactttttgacagattaatttcactcaaatgcaaagattaatcccagcactttgggaggccaaggaaggtggatcacctgaggtcaggagctcgagaccagcctggccaacgtggtgaaatcccatctctactaaaaatacaaaaattagctgggcatggtggcatgtgcctgtagtcccagctactctggaggctgaggcaggagaatcgcttgaacccgggaggcagaggttgcagtgagccgggatcgcaccactctgcactccagcctgggtgacagagcaagactccgtctcaaaaaaaaaaaaaaaaaaccgtagttgctttctattaagatagggttttaaataaagcttttttcctttccctcacagctgttttgcacatatctggatgcagttatatttcctaagtgccagtgcttcacatatgtaactgatgcatcagttctcacaacaaccctaggaagtagctacaggttgagcatccctaatctgaaaaggcgaaatctgaaatgctccaaaatccgaaagtttttgagtgccaccatgatccttaaaggaagtgcccag

SEQ ID NO: 360166 - DNA, 4479 bp, Homo sapiens
gcgtggtactggcccggaatctttgggatcagccgtacaaatctctagaagatgacggtgttctttaaaacgcttcgaaatcactggaagaaaactacagctgggctctgcctgctgacctggggaggccattggctctatggaaaacactgtgataacctcctaaggagagcagcctgtcaagaagctcaggtgtttggcaatcaactcattcctcccaatgcacaagtgaagaaggccactgtttttctcaatcctgcagcttgcaaaggaaaagccaggactctatttgaaaaaaatgctgccccgattttacatttatctggcatggatgtgactattgttaagacagattatgagggacaagccaagaaactcctggaactgatggaaaacacggatgtgatcattgttgcaggaggagatgggacactgcaggaggttgttactggtgttcttcgacgaacagatgaggctaccttcagtaagattcccattggatttatcccactgggagagaccagtagtttgagtcataccctctttgccgaaagtggaaacaaagtccaacatattactgatgccacacttgccattgtgaaaggagagacagttccacttgatgtcttgcagatcaagggtgaaaaggaacagcctgtatttgcaatgaccggccttcgatggggatctttcagagatgctggcgtcaaagttagcaagtactggtatcttgggcctctaaaaatcaaagcagcccactttttcagcactcttaaggagtggcctcagactcatcaagcctctatctcatacacgggacctacagagagacctcccaatgaaccagaggagacccctgtacaaaggccttctttgtacaggagaatattacgaaggcttgcgtcctactgggcacaaccacaggatgccctttcccaagaggtgagcccggaggtctggaaagatgtgcagctgtccaccattgaactgtccatcacaacacggaataatcagcttgacccgacaagcaaagaagattttctgaatatctgcattgaacctgacaccatcagcaaaggagactttataactataggaagtcgaaaggtgagaaaccccaagctgcacgtggagggcacggagtgtctccaagccagccagtgcactttgcttatcccggagggagcagggggctcttttagcattgacagtgaggagtatgaagcgatgcctgtggaggtgaaactgctccccaggaagctgcagttcttctgtgatcctaggaagagagaacagatgctcacaagccccacccagtgagcagcagaagacaagcactctgagaccacactttaggccaccggtgggaccaaaagggaacaggtgcctcagccatcccaacagtgtcgtcagagggtccccagggcattttcatggcaagtacccctctgcccccactccagcagtgcttcccaaagtgtgctctgtcacctgctttgcaatcggcttccattagcgcatgttttattttggtgtgacggttggccctcctaaacacggactttcctcaggctggttcaagacggaaaaggactttcttctgttttcttccaaagtgcaaccacagtggagagcccacggtgggcttagcctgcctaggcccttccatttctcttctttgaccgtgctaggaattccaggaaagtgcattcctgccctggtgaccttttcctatgtctaggctcctccacaggtgctgctattttgtgagctccggctcctgtttagcttttatttcagttctaacctcagtccagaaacatatgtgaggttgtttccctcttcagccacggctacaataccggaaaatgctagtttttatttatttttttaagtagtgcttcctaaatggtttgcatgagagccacctggggtacatgttgaaaacttatttggggtctaccccaaacctaataacccaaatttggggatggggcccaggaatatgcatttttaaaaagtcatctgcccttcccaggtgattctgtaagttgtccctcaactgtacttggagaaatcgtgttttaaagcagtagtccacaaagtattctgctcatgtgcccccaaaagtattttgaaaaatcatgtataccctcacccatctaagttgatatctaaaattttatctaagttggtatctaaaatttttcatgggaagttaaatagttgacaaagtatgtatttgctggtgtcgtgtaaatattggtattttaaaataaaaactgttacatcactattttaaacatatccagtacaatttaaatatcacaacaatttgacacccttcattcatttataaaaataaatgagctagttctttagtagttaaacatttcttggcttttctccttctgtatttccataccacttttcagccaagaatcctatcataatgtaatctattatgcccgacatcttttaatcattcaccccattacttcttgtcaacaaaaaatataaatggaaattttttttttagctcttgctttaagtgtttgtttgttatctcagtccagaaccaatattatcgtaattaattattggtatataatgaaaacggtattaattcttggatgattaaaagtttttttattagaatgttctttatcctaattagttcatttatccaagaatacatgaatgtgatttacagctgagatggggttcaacctcagctgtattccttgtttctgtatagatgtaagcacataaattcgatggaatagaattacgttaacaatgtttttacagttctttggattcctttggcattttgacaaagatcacagtgctctatcatcaagaattattaatgatgatctatcaactaacaaacaacttgattagattctcctttagtctgttgaaagcagagaactgaaatccacctgatttaccatggctttgccagccagtcattagcaccatttacttttactatcgctgacattttcctttgttcagtggccctgaggttcttacactctagggggcagtgcaccacaggaagatagatcaatgagggaggattgcgagggggaaggggaggaagcagagctggcaggccttagctacaggctctctctcaggcagatcccttttaagatacatacaccatgcccacacatcccatggagagagaccaatgctttagtagattacagaacagctatgaaaagtccatgaatgaagatcacaaaaaggaaggctttcttatttcatactgtattcttcagggtggtaaaatttctgcttttggcaaaaacataacagacggttccaaacatcagcataaagatcactcatcccataccacccacaggtagggaggaaggatgctgtagtatatgaaaacaaaagttttcacctgagctgagagcatttagcatatcgtggttctgtaacaatatcaaggaccagtgcagaatctggctttcttttctgataggctaccagtgtgtgtttatgtgtgctcattttgtggttctaatcataatggtacatataattagggaaggatatggaagccactttagaatcttattcatttttaaatataaatatgccttgtttcaaactttgttttcttgattcaggctttctttcctgtgagggcttggtttccttattgttgactgctttgttctttgccttgtccttccctataaagcctgcatggaagacgtttaatagtgcaactaaaagagagtcagctgagtgaggcttgtcagccaaagctggaatgctgagctatctggaggagatcctaataacccaatttggggatggggcccaggaatctgcattgggaagtcggccacccttcccaggtgattgtttagtacaaactttttgacagattaatttcactcaaatgcaaagattaatcccagcactttgggaggccaaggaaggtggatcacctgaggtcaggagctcgagaccagcctggccaacgtggtgaaatcccatctctactaaaaatacaaaaattagctgggcatggtggcatgtgcctgtagtcccagctactctggaggctgaggcaggagaatcgcttgaacccgggaggcagaggttgcagtgagccgggatcgcaccactctgcactccagcctgggtgacagagcaagactccgtctcaaaaaaaaaaaaaaaaaaccgtagttgctttctattaagatagggttttaaataaagcttttttcctttccctcacagctgttttgcacatatctggatgcagttatatttcctaagtgccagtgcttcacatatgtaactgatgcatcagttctcacaacaaccctaggaagtagctacaggttgagcatccctaatctgaaaaggcgaaatctgaaatgctccaaaatccgaaagtttttgagtgccaccatgatccttaaaggaagtgcccag

SEQ ID NO: 360167 - DNA, 4396 bp, Homo sapiens
gggaaaggcagagccgcgagctggaccagccgtgcaaatctctagaagatgacggtgttctttaaaacgcttcgaaatcactggaagaaaactacagctgggctctgcctgctgacctggggaggccattggctctatggaaaacactgtgataacctcctaaggagagcagcctgtcaagaagctcaggtgtttggcaatcaactcattcctcccaatgcacaagtgaagaaggccactgtttttctcaatcctgcagcttgcaaaggaaaagccaggactctatttgaaaaaaatgctgccccgattttacatttatctggcatggatgtgactattgttaagacagattatgagggacaagccaagaaactcctggaactgatggaaaacacggatgtgatcattgttgcaggaggagatgggacactgcaggaggttgttactggtgttcttcgacgaacagatgaggctaccttcagtaagattcccattggatttatcccactgggagagaccagtagtttgagtcataccctctttgccgaaagtggaaacaaagtccaacatattactgatgccacacttgccattgtgaaaggagagacagttccacttgatgtcttgcagatcaaggtactggtatcttgggcctctaaaaatcaaagcagcccactttttcagcactcttaaggagtggcctcagactcatcaagcctctatctcatacacgggacctacagagagacctcccaatgaaccagaggagacccctgtacaaaggccttctttgtacaggagaatattacgaaggcttgcgtcctactgggcacaaccacaggatgccctttcccaagaggtgagcccggaggtctggaaagatgtgcagctgtccaccattgaactgtccatcacaacacggaataatcagcttgacccgacaagcaaagaagattttctgaatatctgcattgaacctgacaccatcagcaaaggagactttataactataggaagtcgaaaggtgagaaaccccaagctgcacgtggagggcacggagtgtctccaagccagccagtgcactttgcttatcccggagggagcagggggctcttttagcattgacagtgaggagtatgaagcgatgcctgtggaggtgaaactgctccccaggaagctgcagttcttctgtgatcctaggaagagagaacagatgctcacaagccccacccagtgagcagcagaagacaagcactctgagaccacactttaggccaccggtgggaccaaaagggaacaggtgcctcagccatcccaacagtgtcgtcagagggtccccagggcattttcatggcaagtacccctctgcccccactccagcagtgcttcccaaagtgtgctctgtcacctgctttgcaatcggcttccattagcgcatgttttattttggtgtgacggttggccctcctaaacacggactttcctcaggctggttcaagacggaaaaggactttcttctgttttcttccaaagtgcaaccacagtggagagcccacggtgggcttagcctgcctaggcccttccatttctcttctttgaccgtgctaggaattccaggaaagtgcattcctgccctggtgaccttttcctatgtctaggctcctccacaggtgctgctattttgtgagctccggctcctgtttagcttttatttcagttctaacctcagtccagaaacatatgtgaggttgtttccctcttcagccacggctacaataccggaaaatgctagtttttatttatttttttaagtagtgcttcctaaatggtttgcatgagagccacctggggtacatgttgaaaacttatttggggtctaccccaaacctaataacccaaatttggggatggggcccaggaatatgcatttttaaaaagtcatctgcccttcccaggtgattctgtaagttgtccctcaactgtacttggagaaatcgtgttttaaagcagtagtccacaaagtattctgctcatgtgcccccaaaagtattttgaaaaatcatgtataccctcacccatctaagttgatatctaaaattttatctaagttggtatctaaaatttttcatgggaagttaaatagttgacaaagtatgtatttgctggtgtcgtgtaaatattggtattttaaaataaaaactgttacatcactattttaaacatatccagtacaatttaaatatcacaacaatttgacacccttcattcatttataaaaataaatgagctagttctttagtagttaaacatttcttggcttttctccttctgtatttccataccacttttcagccaagaatcctatcataatgtaatctattatgcccgacatcttttaatcattcaccccattacttcttgtcaacaaaaaatataaatggaaattttttttttagctcttgctttaagtgtttgtttgttatctcagtccagaaccaatattatcgtaattaattattggtatataatgaaaacggtattaattcttggatgattaaaagtttttttattagaatgttctttatcctaattagttcatttatccaagaatacatgaatgtgatttacagctgagatggggttcaacctcagctgtattccttgtttctgtatagatgtaagcacataaattcgatggaatagaattacgttaacaatgtttttacagttctttggattcctttggcattttgacaaagatcacagtgctctatcatcaagaattattaatgatgatctatcaactaacaaacaacttgattagattctcctttagtctgttgaaagcagagaactgaaatccacctgatttaccatggctttgccagccagtcattagcaccatttacttttactatcgctgacattttcctttgttcagtggccctgaggttcttacactctagggggcagtgcaccacaggaagatagatcaatgagggaggattgcgagggggaaggggaggaagcagagctggcaggccttagctacaggctctctctcaggcagatcccttttaagatacatacaccatgcccacacatcccatggagagagaccaatgctttagtagattacagaacagctatgaaaagtccatgaatgaagatcacaaaaaggaaggctttcttatttcatactgtattcttcagggtggtaaaatttctgcttttggcaaaaacataacagacggttccaaacatcagcataaagatcactcatcccataccacccacaggtagggaggaaggatgctgtagtatatgaaaacaaaagttttcacctgagctgagagcatttagcatatcgtggttctgtaacaatatcaaggaccagtgcagaatctggctttcttttctgataggctaccagtgtgtgtttatgtgtgctcattttgtggttctaatcataatggtacatataattagggaaggatatggaagccactttagaatcttattcatttttaaatataaatatgccttgtttcaaactttgttttcttgattcaggctttctttcctgtgagggcttggtttccttattgttgactgctttgttctttgccttgtccttccctataaagcctgcatggaagacgtttaatagtgcaactaaaagagagtcagctgagtgaggcttgtcagccaaagctggaatgctgagctatctggaggagatcctaataacccaatttggggatggggcccaggaatctgcattgggaagtcggccacccttcccaggtgattgtttagtacaaactttttgacagattaatttcactcaaatgcaaagattaatcccagcactttgggaggccaaggaaggtggatcacctgaggtcaggagctcgagaccagcctggccaacgtggtgaaatcccatctctactaaaaatacaaaaattagctgggcatggtggcatgtgcctgtagtcccagctactctggaggctgaggcaggagaatcgcttgaacccgggaggcagaggttgcagtgagccgggatcgcaccactctgcactccagcctgggtgacagagcaagactccgtctcaaaaaaaaaaaaaaaaaaccgtagttgctttctattaagatagggttttaaataaagcttttttcctttccctcacagctgttttgcacatatctggatgcagttatatttcctaagtgccagtgcttcacatatgtaactgatgcatcagttctcacaacaaccctaggaagtagctacaggttgagcatccctaatctgaaaaggcgaaatctgaaatgctccaaaatccgaaagtttttgagtgccaccatgatccttaaaggaagtgcccag

SEQ ID NO: 360168 - DNA, 3794 bp, Homo sapiens
gtgaaaaggacagcgagtttcagagatgctggcgtcaagtacagagtattggctctaaaatcaaagcagcccactttttcagcactcttaaggagtggcctcagactcatcaagcctctatctcatacacgggacctacagagagacctcccaatgaaccagaggagacccctgtacaaaggccttctttgtacaggagaatattacgaaggcttgcgtcctactgggcacaaccacaggatgccctttcccaagaggtgagcccggaggtctggaaagatgtgcagctgtccaccattgaactgtccatcacaacacggaataatcagcttgacccgacaagcaaagaagattttctgaatatctgcattgaacctgacaccatcagcaaaggagactttataactataggaagtcgaaaggtgagaaaccccaagctgcacgtggagggcacggagtgtctccaagccagccagtgcactttgcttatcccggagggagcagggggctcttttagcattgacagtgaggagtatgaagcgatgcctgtggaggtgaaactgctccccaggaagctgcagttcttctgtgatcctaggaagagagaacagatgctcacaagccccacccagtgagcagcagaagacaagcactctgagaccacactttaggccaccggtgggaccaaaagggaacaggtgcctcagccatcccaacagtgtcgtcagagggtccccagggcattttcatggcaagtacccctctgcccccactccagcagtgcttcccaaagtgtgctctgtcacctgctttgcaatcggcttccattagcgcatgttttattttggtgtgacggttggccctcctaaacacggactttcctcaggctggttcaagacggaaaaggactttcttctgttttcttccaaagtgcaaccacagtggagagcccacggtgggcttagcctgcctaggcccttccatttctcttctttgaccgtgctaggaattccaggaaagtgcattcctgccctggtgaccttttcctatgtctaggctcctccacaggtgctgctattttgtgagctccggctcctgtttagcttttatttcagttctaacctcagtccagaaacatatgtgaggttgtttccctcttcagccacggctacaataccggaaaatgctagtttttatttatttttttaagtagtgcttcctaaatggtttgcatgagagccacctggggtacatgttgaaaacttatttggggtctaccccaaacctaataacccaaatttggggatggggcccaggaatatgcatttttaaaaagtcatctgcccttcccaggtgattctgtaagttgtccctcaactgtacttggagaaatcgtgttttaaagcagtagtccacaaagtattctgctcatgtgcccccaaaagtattttgaaaaatcatgtataccctcacccatctaagttgatatctaaaattttatctaagttggtatctaaaatttttcatgggaagttaaatagttgacaaagtatgtatttgctggtgtcgtgtaaatattggtattttaaaataaaaactgttacatcactattttaaacatatccagtacaatttaaatatcacaacaatttgacacccttcattcatttataaaaataaatgagctagttctttagtagttaaacatttcttggcttttctccttctgtatttccataccacttttcagccaagaatcctatcataatgtaatctattatgcccgacatcttttaatcattcaccccattacttcttgtcaacaaaaaatataaatggaaattttttttttagctcttgctttaagtgtttgtttgttatctcagtccagaaccaatattatcgtaattaattattggtatataatgaaaacggtattaattcttggatgattaaaagtttttttattagaatgttctttatcctaattagttcatttatccaagaatacatgaatgtgatttacagctgagatggggttcaacctcagctgtattccttgtttctgtatagatgtaagcacataaattcgatggaatagaattacgttaacaatgtttttacagttctttggattcctttggcattttgacaaagatcacagtgctctatcatcaagaattattaatgatgatctatcaactaacaaacaacttgattagattctcctttagtctgttgaaagcagagaactgaaatccacctgatttaccatggctttgccagccagtcattagcaccatttacttttactatcgctgacattttcctttgttcagtggccctgaggttcttacactctagggggcagtgcaccacaggaagatagatcaatgagggaggattgcgagggggaaggggaggaagcagagctggcaggccttagctacaggctctctctcaggcagatcccttttaagatacatacaccatgcccacacatcccatggagagagaccaatgctttagtagattacagaacagctatgaaaagtccatgaatgaagatcacaaaaaggaaggctttcttatttcatactgtattcttcagggtggtaaaatttctgcttttggcaaaaacataacagacggttccaaacatcagcataaagatcactcatcccataccacccacaggtagggaggaaggatgctgtagtatatgaaaacaaaagttttcacctgagctgagagcatttagcatatcgtggttctgtaacaatatcaaggaccagtgcagaatctggctttcttttctgataggctaccagtgtgtgtttatgtgtgctcattttgtggttctaatcataatggtacatataattagggaaggatatggaagccactttagaatcttattcatttttaaatataaatatgccttgtttcaaactttgttttcttgattcaggctttctttcctgtgagggcttggtttccttattgttgactgctttgttctttgccttgtccttccctataaagcctgcatggaagacgtttaatagtgcaactaaaagagagtcagctgagtgaggcttgtcagccaaagctggaatgctgagctatctggaggagatcctaataacccaatttggggatggggcccaggaatctgcattgggaagtcggccacccttcccaggtgattgtttagtacaaactttttgacagattaatttcactcaaatgcaaagattaatcccagcactttgggaggccaaggaaggtggatcacctgaggtcaggagctcgagaccagcctggccaacgtggtgaaatcccatctctactaaaaatacaaaaattagctgggcatggtggcatgtgcctgtagtcccagctactctggaggctgaggcaggagaatcgcttgaacccgggaggcagaggttgcagtgagccgggatcgcaccactctgcactccagcctgggtgacagagcaagactccgtctcaaaaaaaaaaaaaaaaaaccgtagttgctttctattaagatagggttttaaataaagcttttttcctttccctcacagctgttttgcacatatctggatgcagttatatttcctaagtgccagtgcttcacatatgtaactgatgcatcagttctcacaacaaccctaggaagtagctacaggttgagcatccctaatctgaaaaggcgaaatctgaaatgctccaaaatccgaaagtttttgagtgccaccatgatccttaaaggaagtgcccag

SEQ ID NO: 360169 - DNA, 3085 bp, Homo sapiens
gcgtggtactggcccggaatctttgggatcagccgtacaaatctctagaagatgacggtgttctttaaaacgcttcgaaatcactggaagaaaactacagctgggctctgcctgctgacctggggaggccattggctctatggaaaacactgcctcctaaacacggactttcctcaggctggttcaagacggaaaaggactttcttctgttttcttccaaagtgcaaccacagtggagagcccacggtgggcttagcctgcctaggcccttccatttctcttctttgaccgtgctaggaattccaggaaagtgcattcctgccctggtgaccttttcctatgtctaggctcctccacaggtgctgctattttgtgagctccggctcctgtttagcttttatttcagttctaacctcagtccagaaacatatgtgaggttgtttccctcttcagccacggctacaataccggaaaatgctagtttttatttatttttttaagtagtgcttcctaaatggtttgcatgagagccacctggggtacatgttgaaaacttatttggggtctaccccaaacctaataacccaaatttggggatggggcccaggaatatgcatttttaaaaagtcatctgcccttcccaggtgattctgtaagttgtccctcaactgtacttggagaaatcgtgttttaaagcagtagtccacaaagtattctgctcatgtgcccccaaaagtattttgaaaaatcatgtataccctcacccatctaagttgatatctaaaattttatctaagttggtatctaaaatttttcatgggaagttaaatagttgacaaagtatgtatttgctggtgtcgtgtaaatattggtattttaaaataaaaactgttacatcactattttaaacatatccagtacaatttaaatatcacaacaatttgacacccttcattcatttataaaaataaatgagctagttctttagtagttaaacatttcttggcttttctccttctgtatttccataccacttttcagccaagaatcctatcataatgtaatctattatgcccgacatcttttaatcattcaccccattacttcttgtcaacaaaaaatataaatggaaattttttttttagctcttgctttaagtgtttgtttgttatctcagtccagaaccaatattatcgtaattaattattggtatataatgaaaacggtattaattcttggatgattaaaagtttttttattagaatgttctttatcctaattagttcatttatccaagaatacatgaatgtgatttacagctgagatggggttcaacctcagctgtattccttgtttctgtatagatgtaagcacataaattcgatggaatagaattacgttaacaatgtttttacagttctttggattcctttggcattttgacaaagatcacagtgctctatcatcaagaattattaatgatgatctatcaactaacaaacaacttgattagattctcctttagtctgttgaaagcagagaactgaaatccacctgatttaccatggctttgccagccagtcattagcaccatttacttttactatcgctgacattttcctttgttcagtggccctgaggttcttacactctagggggcagtgcaccacaggaagatagatcaatgagggaggattgcgagggggaaggggaggaagcagagctggcaggccttagctacaggctctctctcaggcagatcccttttaagatacatacaccatgcccacacatcccatggagagagaccaatgctttagtagattacagaacagctatgaaaagtccatgaatgaagatcacaaaaaggaaggctttcttatttcatactgtattcttcagggtggtaaaatttctgcttttggcaaaaacataacagacggttccaaacatcagcataaagatcactcatcccataccacccacaggtagggaggaaggatgctgtagtatatgaaaacaaaagttttcacctgagctgagagcatttagcatatcgtggttctgtaacaatatcaaggaccagtgcagaatctggctttcttttctgataggctaccagtgtgtgtttatgtgtgctcattttgtggttctaatcataatggtacatataattagggaaggatatggaagccactttagaatcttattcatttttaaatataaatatgccttgtttcaaactttgttttcttgattcaggctttctttcctgtgagggcttggtttccttattgttgactgctttgttctttgccttgtccttccctataaagcctgcatggaagacgtttaatagtgcaactaaaagagagtcagctgagtgaggcttgtcagccaaagctggaatgctgagctatctggaggagatcctaataacccaatttggggatggggcccaggaatctgcattgggaagtcggccacccttcccaggtgattgtttagtacaaactttttgacagattaatttcactcaaatgcaaagattaatcccagcactttgggaggccaaggaaggtggatcacctgaggtcaggagctcgagaccagcctggccaacgtggtgaaatcccatctctactaaaaatacaaaaattagctgggcatggtggcatgtgcctgtagtcccagctactctggaggctgaggcaggagaatcgcttgaacccgggaggcagaggttgcagtgagccgggatcgcaccactctgcactccagcctgggtgacagagcaagactccgtctcaaaaaaaaaaaaaaaaaaccgtagttgctttctattaagatagggttttaaataaagcttttttcctttccctcacagctgttttgcacatatctggatgcagttatatttcctaagtgccagtgcttcacatatgtaactgatgcatcagttctcacaacaaccctaggaagtagctacaggttgagcatccctaatctgaaaaggcgaaatctgaaatgctccaaaatccgaaagtttttgagtgccaccatgatccttaaaggaagtgcccag

SEQ ID NO: 360170 - DNA, 1275 bp, Homo sapiens
gggaaaggcagagccgcgagctggaccagccgtgcaaatctctagaagatgacggtgttctttaaaacgcttcgaaatcactggaagaaaactacagctgggctctgcctgctgacctggggaggccattggctctatggaaaacactgtgataacctcctaaggagagcagcctgtcaagaagctcaggtgtttggcaatcaactcattcctcccaatgcacaagtgaagaaggccactgtttttctcaatcctgcagcttgcaaaggaaaagccaggactctatttgaaaaaaatgctgccccgattttacatttatctggcatggatgtgactattgttaagacagattatgagggacaagccaagaaactcctggaactgatggaaaacacggatgtgatcattgttgcaggaggagatgggacactgcaggaggttgttactggtgttcttcgacgaacagatgaggctaccttcagtaagattcccattggatttatcccactgggagagaccagtagtttgagtcataccctctttgccgaaagtggaaacaaagtccaacatattactgatgccacacttgccattgtgaaaggagagacagttccacttgatgtcttgcagatcaagggtgaaaaggaacagcctgtatttgcaatgaccggccttcgatggggatctttcagagatgctggcgtcaaagttagcaagtactggtatcttgggcctctaaaaatcaaagcagcccactttttcagcactcttaaggagtggcctcagactcatcaagcctctatctcatacacgggacctacagagagacctcccaatgaaccagaggagacccctgtacaaaggccttctttgtacaggagaatattacgaaggcttgcgtcctactgggcacaaccacaggatgccctttcccaagaggtgagcccggaggtctggaaagatgtgcagctgtccaccattgaactgtccatcacaacacggaataatcagcttgacccgacaagcaaagaagattttctgaatatctgcattgaacctgacaccatcagcaaaggagactttataactataggaagtcgaaaggtgagaaaccccaagctgcacgtggagggcacggagtgtctccaagccagccagtgcactttgcttatcccggagggagcagggggctcttttagcattgacatgaggaagctggtccagaggaaggcaagggagggctgcctgccaaggaattcggctttgcatgaagtt

SEQ ID NO: 360171 - DNA, 1080 bp, Homo sapiens
gcgtggtactggcccggaatctttgggatcagccgtacaaatctctagaagatgacggtgttctttaaaacgcttcgaaatcactggaagaaaactacagctgggctctgcctgctgacctggggaggccattggctctatggaaaacactgtgataacctcctaaggagagcagcctgtcaagaagctcagcactatcaggatgaatcacgctgggagccaactctgagtagaactccaggaagttaaccatctggtgaagagcagttctgacgcccacccctatagactgtttgtttctggattggtcccaagaacacagaactggactggtagaagctctgggaatttgtttgtgtctgcagttgtctttgtagatttgtctaacccctgaatcatccctgatctgaataacccccaaggatatcagttcagagcaagtgttacctctaaaagtcaaatcttcttaaaattgttgattcatatttttaaagctcatctccaagttcaactgatccatatcatgtacactgttatattccatgagattttacttaaatattcatttatatggctaattatagctggattataatatttgtcctttcaaatataagacagcatttttgcccccccactgcaaaaatgtgcattataccttgcagatgaaattctgagactgagttgcctttttgttttatatcatttgagcttatgatgtcagaaataccaaaatagaaacatgaaaatcaaaagtggcaaatgtgtgaagcatttagtaataaaaataggtggcagacctcatgtttgtttctgaaatgttttaacggatgacagtgagaatagatactataaattaattcctctctttagcgattgttacaatagatactataaattaattcctctctttagcagttgttacagtatatactataattcctctttttagcgattgttatctagctgttctaaacctgtgttttacgaatttgattacttctttgtttaaatgtattatctttcatatggctctaagttgttttggaaatcaattcaaataaactttaatattaaacc

SEQ ID NO: 360172 - DNA, 4422 bp, Homo sapiens
gggaaaggcagagccgcgagctggaccagccgtgcaaatctctagaagatgacggtgttctttaaaacgcttcgaaatcactggaagaaaactacagctgggctctgcctgctgacctggggaggccattggctctatggaaaacactgtgataacctcctaaggagagcagcctgtcaagaagctcaggtgtttggcaatcaactcattcctcccaatgcacaagtgaagaaggccactgtttttctcaatcctgcagcttgcaaaggaaaagccaggactctatttgaaaaaaatgctgccccgattttacatttatctggcatggatgtgactattgttaagacagattatgagggacaagccaagaaactcctggaactgatggaaaacacggatgtgatcattgttgcaggaggagatgggacactgcaggaggttgttactggtgttcttcgacgaacagatgaggctaccttcagtaagattcccattggatttatcccactgggagagaccagtagtttgagtcataccctctttgccgaaagtggaaacaaagtccaacatattactgatgccacacttgccattgtgaaaggagagacagttccacttgatgtcttgcagatcaagggtgaaaaggaacagcctgtatttgcaatgaccggccttcgatggggatctttcagagatgctggcgtcaaagttagcaagtactggtatcttgggcctctaaaaatcaaagcagcccactttttcagcactcttaaggagtggcctcagactcatcaagcctctatctcatacacgggacctacagagagacctcccaatgaaccagaggagacccctgtacaaaggccttctttgtacaggagaatattacgaaggcttgcgtcctactgggcacaaccacaggatgccctttcccaagaggtgagcccggaggtctggaaagatgtgcagctgtccaccattgaactgtccatcacaacacggaataatcagcttgacccgacaagcaaagaagattttctgaatatctgcattgaacctgacaccatcagcaaaggagactttataactataggaagtcgaaaggtgagaaaccccaagctgcacgtggagggcacggagtgtctccaagccagccagtgcactttgcttatcccggagggagcagggggctcttttagcattgacagtgaggagtatgaagcgatgcctgtggaggtgaaactgctccccaggaagctgcagttcttctgtgatcctaggaagagagaacagatgctcacaagccccacccagtgagcagcagaagacaagcactctgagaccacactttaggccaccggtgggaccaaaagggaacaggtgcctcagccatcccaacagtgtcgtcagagggtccccagggcattttcatggcaagtacccctctgcccccactccagcagtgcttcccaaagtgtgctctgtcacctgctttgcaatcggcttccattagcgcatgttttattttggtgtgacggttggccctcctaaacacggactttcctcaggctggttcaagacggaaaaggactttcttctgttttcttccaaagtgcaaccacagtggagagcccacggtgggcttagcctgcctaggcccttccatttctcttctttgaccgtgctaggaattccaggaaagtgcattcctgccctggtgaccttttcctatgtctaggctcctccacaggtgctgctattttgtgagctccggctcctgtttagcttttatttcagttctaacctcagtccagaaacatatgtgaggttgtttccctcttcagccacggctacaataccggaaaatgctagtttttatttatttttttaagtagtgcttcctaaatggtttgcatgagagccacctggggtacatgttgaaaacttatttggggtctaccccaaacctaataacccaaatttggggatggggcccaggaatatgcatttttaaaaagtcatctgcccttcccaggtgattctgtaagttgtccctcaactgtacttggagaaatcgtgttttaaagcagtagtccacaaagtattctgctcatgtgcccccaaaagtattttgaaaaatcatgtataccctcacccatctaagttgatatctaaaattttatctaagttggtatctaaaatttttcatgggaagttaaatagttgacaaagtatgtatttgctggtgtcgtgtaaatattggtattttaaaataaaaactgttacatcactattttaaacatatccagtacaatttaaatatcacaacaatttgacacccttcattcatttataaaaataaatgagctagttctttagtagttaaacatttcttggcttttctccttctgtatttccataccacttttcagccaagaatcctatcataatgtaatctattatgcccgacatcttttaatcattcaccccattacttcttgtcaacaatctcagtccagaaccaatattatcgtaattaattattggtatataatgaaaacggtattaattcttggatgattaaaagtttttttattagaatgttctttatcctaattagttcatttatccaagaatacatgaatgtgatttacagctgagatggggttcaacctcagctgtattccttgtttctgtatagatgtaagcacataaattcgatggaatagaattacgttaacaatgtttttacagttctttggattcctttggcattttgacaaagatcacagtgctctatcatcaagaattattaatgatgatctatcaactaacaaacaacttgattagattctcctttagtctgttgaaagcagagaactgaaatccacctgatttaccatggctttgccagccagtcattagcaccatttacttttactatcgctgacattttcctttgttcagtggccctgaggttcttacactctagggggcagtgcaccacaggaagatagatcaatgagggaggattgcgagggggaaggggaggaagcagagctggcaggccttagctacaggctctctctcaggcagatcccttttaagatacatacaccatgcccacacatcccatggagagagaccaatgctttagtagattacagaacagctatgaaaagtccatgaatgaagatcacaaaaaggaaggctttcttatttcatactgtattcttcagggtggtaaaatttctgcttttggcaaaaacataacagacggttccaaacatcagcataaagatcactcatcccataccacccacaggtagggaggaaggatgctgtagtatatgaaaacaaaagttttcacctgagctgagagcatttagcatatcgtggttctgtaacaatatcaaggaccagtgcagaatctggctttcttttctgataggctaccagtgtgtgtttatgtgtgctcattttgtggttctaatcataatggtacatataattagggaaggatatggaagccactttagaatcttattcatttttaaatataaatatgccttgtttcaaactttgttttcttgattcaggctttctttcctgtgagggcttggtttccttattgttgactgctttgttctttgccttgtccttccctataaagcctgcatggaagacgtttaatagtgcaactaaaagagagtcagctgagtgaggcttgtcagccaaagctggaatgctgagctatctggaggagatcctaataacccaatttggggatggggcccaggaatctgcattgggaagtcggccacccttcccaggtgattgtttagtacaaactttttgacagattaatttcactcaaatgcaaagattaatcccagcactttgggaggccaaggaaggtggatcacctgaggtcaggagctcgagaccagcctggccaacgtggtgaaatcccatctctactaaaaatacaaaaattagctgggcatggtggcatgtgcctgtagtcccagctactctggaggctgaggcaggagaatcgcttgaacccgggaggcagaggttgcagtgagccgggatcgcaccactctgcactccagcctgggtgacagagcaagactccgtctcaaaaaaaaaaaaaaaaaaccgtagttgctttctattaagatagggttttaaataaagcttttttcctttccctcacagctgttttgcacatatctggatgcagttatatttcctaagtgccagtgcttcacatatgtaactgatgcatcagttctcacaacaaccctaggaagtagctacaggttgagcatccctaatctgaaaaggcgaaatctgaaatgctccaaaatccgaaagtttttgagtgccaccatgatccttaaaggaagtgcccag

SEQ ID NO: 360173 - DNA, 4490 bp, Homo sapiens
caggcggggagcgcagtgcgggtcgctgggactgagcgcgcgagcgggcaaatctctagaagatgacggtgttctttaaaacgcttcgaaatcactggaagaaaactacagctgggctctgcctgctgacctggggaggccattggctctatggaaaacactgtgataacctcctaaggagagcagcctgtcaagaagctcaggtgtttggcaatcaactcattcctcccaatgcacaagtgaagaaggccactgtttttctcaatcctgcagcttgcaaaggaaaagccaggactctatttgaaaaaaatgctgccccgattttacatttatctggcatggatgtgactattgttaagacagattatgagggacaagccaagaaactcctggaactgatggaaaacacggatgtgatcattgttgcaggaggagatgggacactgcaggaggttgttactggtgttcttcgacgaacagatgaggctaccttcagtaagattcccattggatttatcccactgggagagaccagtagtttgagtcataccctctttgccgaaagtggaaacaaagtccaacatattactgatgccacacttgccattgtgaaaggagagacagttccacttgatgtcttgcagatcaagggtgaaaaggaacagcctgtatttgcaatgaccggccttcgatggggatctttcagagatgctggcgtcaaagttagcaagtactggtatcttgggcctctaaaaatcaaagcagcccactttttcagcactcttaaggagtggcctcagactcatcaagcctctatctcatacacgggacctacagagagacctcccaatgaaccagaggagacccctgtacaaaggccttctttgtacaggagaatattacgaaggcttgcgtcctactgggcacaaccacaggatgccctttcccaagaggtgagcccggaggtctggaaagatgtgcagctgtccaccattgaactgtccatcacaacacggaataatcagcttgacccgacaagcaaagaagattttctgaatatctgcattgaacctgacaccatcagcaaaggagactttataactataggaagtcgaaaggtgagaaaccccaagctgcacgtggagggcacggagtgtctccaagccagccagtgcactttgcttatcccggagggagcagggggctcttttagcattgacagtgaggagtatgaagcgatgcctgtggaggtgaaactgctccccaggaagctgcagttcttctgtgatcctaggaagagagaacagatgctcacaagccccacccagtgagcagcagaagacaagcactctgagaccacactttaggccaccggtgggaccaaaagggaacaggtgcctcagccatcccaacagtgtcgtcagagggtccccagggcattttcatggcaagtacccctctgcccccactccagcagtgcttcccaaagtgtgctctgtcacctgctttgcaatcggcttccattagcgcatgttttattttggtgtgacggttggccctcctaaacacggactttcctcaggctggttcaagacggaaaaggactttcttctgttttcttccaaagtgcaaccacagtggagagcccacggtgggcttagcctgcctaggcccttccatttctcttctttgaccgtgctaggaattccaggaaagtgcattcctgccctggtgaccttttcctatgtctaggctcctccacaggtgctgctattttgtgagctccggctcctgtttagcttttatttcagttctaacctcagtccagaaacatatgtgaggttgtttccctcttcagccacggctacaataccggaaaatgctagtttttatttatttttttaagtagtgcttcctaaatggtttgcatgagagccacctggggtacatgttgaaaacttatttggggtctaccccaaacctaataacccaaatttggggatggggcccaggaatatgcatttttaaaaagtcatctgcccttcccaggtgattctgtaagttgtccctcaactgtacttggagaaatcgtgttttaaagcagtagtccacaaagtattctgctcatgtgcccccaaaagtattttgaaaaatcatgtataccctcacccatctaagttgatatctaaaattttatctaagttggtatctaaaatttttcatgggaagttaaatagttgacaaagtatgtatttgctggtgtcgtgtaaatattggtattttaaaataaaaactgttacatcactattttaaacatatccagtacaatttaaatatcacaacaatttgacacccttcattcatttataaaaataaatgagctagttctttagtagttaaacatttcttggcttttctccttctgtatttccataccacttttcagccaagaatcctatcataatgtaatctattatgcccgacatcttttaatcattcaccccattacttcttgtcaacaaaaaatataaatggaaattttttttttagctcttgctttaagtgtttgtttgttatctcagtccagaaccaatattatcgtaattaattattggtatataatgaaaacggtattaattcttggatgattaaaagtttttttattagaatgttctttatcctaattagttcatttatccaagaatacatgaatgtgatttacagctgagatggggttcaacctcagctgtattccttgtttctgtatagatgtaagcacataaattcgatggaatagaattacgttaacaatgtttttacagttctttggattcctttggcattttgacaaagatcacagtgctctatcatcaagaattattaatgatgatctatcaactaacaaacaacttgattagattctcctttagtctgttgaaagcagagaactgaaatccacctgatttaccatggctttgccagccagtcattagcaccatttacttttactatcgctgacattttcctttgttcagtggccctgaggttcttacactctagggggcagtgcaccacaggaagatagatcaatgagggaggattgcgagggggaaggggaggaagcagagctggcaggccttagctacaggctctctctcaggcagatcccttttaagatacatacaccatgcccacacatcccatggagagagaccaatgctttagtagattacagaacagctatgaaaagtccatgaatgaagatcacaaaaaggaaggctttcttatttcatactgtattcttcagggtggtaaaatttctgcttttggcaaaaacataacagacggttccaaacatcagcataaagatcactcatcccataccacccacaggtagggaggaaggatgctgtagtatatgaaaacaaaagttttcacctgagctgagagcatttagcatatcgtggttctgtaacaatatcaaggaccagtgcagaatctggctttcttttctgataggctaccagtgtgtgtttatgtgtgctcattttgtggttctaatcataatggtacatataattagggaaggatatggaagccactttagaatcttattcatttttaaatataaatatgccttgtttcaaactttgttttcttgattcaggctttctttcctgtgagggcttggtttccttattgttgactgctttgttctttgccttgtccttccctataaagcctgcatggaagacgtttaatagtgcaactaaaagagagtcagctgagtgaggcttgtcagccaaagctggaatgctgagctatctggaggagatcctaataacccaatttggggatggggcccaggaatctgcattgggaagtcggccacccttcccaggtgattgtttagtacaaactttttgacagattaatttcactcaaatgcaaagattaatcccagcactttgggaggccaaggaaggtggatcacctgaggtcaggagctcgagaccagcctggccaacgtggtgaaatcccatctctactaaaaatacaaaaattagctgggcatggtggcatgtgcctgtagtcccagctactctggaggctgaggcaggagaatcgcttgaacccgggaggcagaggttgcagtgagccgggatcgcaccactctgcactccagcctgggtgacagagcaagactccgtctcaaaaaaaaaaaaaaaaaaccgtagttgctttctattaagatagggttttaaataaagcttttttcctttccctcacagctgttttgcacatatctggatgcagttatatttcctaagtgccagtgcttcacatatgtaactgatgcatcagttctcacaacaaccctaggaagtagctacaggttgagcatccctaatctgaaaaggcgaaatctgaaatgctccaaaatccgaaagtttttgagtgccaccatgatccttaaaggaagtgcccag

SEQ ID NO: 360174 - DNA, 3806 bp, Homo sapiens
tagaggatcccggtggttcttgagaagatgctgggtcaagttagaagtactggtatcttgggcctctaaaaatcaaagcagcccactttttcagcactcttaaggagtggcctcagactcatcaagcctctatctcatacacgggacctacagagagacctcccaatgaaccagaggagacccctgtacaaaggccttctttgtacaggagaatattacgaaggcttgcgtcctactgggcacaaccacaggatgccctttcccaagaggtgagcccggaggtctggaaagatgtgcagctgtccaccattgaactgtccatcacaacacggaataatcagcttgacccgacaagcaaagaagattttctgaatatctgcattgaacctgacaccatcagcaaaggagactttataactataggaagtcgaaaggtgagaaaccccaagctgcacgtggagggcacggagtgtctccaagccagccagtgcactttgcttatcccggagggagcagggggctcttttagcattgacagtgaggagtatgaagcgatgcctgtggaggtgaaactgctccccaggaagctgcagttcttctgtgatcctaggaagagagaacagatgctcacaagccccacccagtgagcagcagaagacaagcactctgagaccacactttaggccaccggtgggaccaaaagggaacaggtgcctcagccatcccaacagtgtcgtcagagggtccccagggcattttcatggcaagtacccctctgcccccactccagcagtgcttcccaaagtgtgctctgtcacctgctttgcaatcggcttccattagcgcatgttttattttggtgtgacggttggccctcctaaacacggactttcctcaggctggttcaagacggaaaaggactttcttctgttttcttccaaagtgcaaccacagtggagagcccacggtgggcttagcctgcctaggcccttccatttctcttctttgaccgtgctaggaattccaggaaagtgcattcctgccctggtgaccttttcctatgtctaggctcctccacaggtgctgctattttgtgagctccggctcctgtttagcttttatttcagttctaacctcagtccagaaacatatgtgaggttgtttccctcttcagccacggctacaataccggaaaatgctagtttttatttatttttttaagtagtgcttcctaaatggtttgcatgagagccacctggggtacatgttgaaaacttatttggggtctaccccaaacctaataacccaaatttggggatggggcccaggaatatgcatttttaaaaagtcatctgcccttcccaggtgattctgtaagttgtccctcaactgtacttggagaaatcgtgttttaaagcagtagtccacaaagtattctgctcatgtgcccccaaaagtattttgaaaaatcatgtataccctcacccatctaagttgatatctaaaattttatctaagttggtatctaaaatttttcatgggaagttaaatagttgacaaagtatgtatttgctggtgtcgtgtaaatattggtattttaaaataaaaactgttacatcactattttaaacatatccagtacaatttaaatatcacaacaatttgacacccttcattcatttataaaaataaatgagctagttctttagtagttaaacatttcttggcttttctccttctgtatttccataccacttttcagccaagaatcctatcataatgtaatctattatgcccgacatcttttaatcattcaccccattacttcttgtcaacaaaaaatataaatggaaattttttttttagctcttgctttaagtgtttgtttgttatctcagtccagaaccaatattatcgtaattaattattggtatataatgaaaacggtattaattcttggatgattaaaagtttttttattagaatgttctttatcctaattagttcatttatccaagaatacatgaatgtgatttacagctgagatggggttcaacctcagctgtattccttgtttctgtatagatgtaagcacataaattcgatggaatagaattacgttaacaatgtttttacagttctttggattcctttggcattttgacaaagatcacagtgctctatcatcaagaattattaatgatgatctatcaactaacaaacaacttgattagattctcctttagtctgttgaaagcagagaactgaaatccacctgatttaccatggctttgccagccagtcattagcaccatttacttttactatcgctgacattttcctttgttcagtggccctgaggttcttacactctagggggcagtgcaccacaggaagatagatcaatgagggaggattgcgagggggaaggggaggaagcagagctggcaggccttagctacaggctctctctcaggcagatcccttttaagatacatacaccatgcccacacatcccatggagagagaccaatgctttagtagattacagaacagctatgaaaagtccatgaatgaagatcacaaaaaggaaggctttcttatttcatactgtattcttcagggtggtaaaatttctgcttttggcaaaaacataacagacggttccaaacatcagcataaagatcactcatcccataccacccacaggtagggaggaaggatgctgtagtatatgaaaacaaaagttttcacctgagctgagagcatttagcatatcgtggttctgtaacaatatcaaggaccagtgcagaatctggctttcttttctgataggctaccagtgtgtgtttatgtgtgctcattttgtggttctaatcataatggtacatataattagggaaggatatggaagccactttagaatcttattcatttttaaatataaatatgccttgtttcaaactttgttttcttgattcaggctttctttcctgtgagggcttggtttccttattgttgactgctttgttctttgccttgtccttccctataaagcctgcatggaagacgtttaatagtgcaactaaaagagagtcagctgagtgaggcttgtcagccaaagctggaatgctgagctatctggaggagatcctaataacccaatttggggatggggcccaggaatctgcattgggaagtcggccacccttcccaggtgattgtttagtacaaactttttgacagattaatttcactcaaatgcaaagattaatcccagcactttgggaggccaaggaaggtggatcacctgaggtcaggagctcgagaccagcctggccaacgtggtgaaatcccatctctactaaaaatacaaaaattagctgggcatggtggcatgtgcctgtagtcccagctactctggaggctgaggcaggagaatcgcttgaacccgggaggcagaggttgcagtgagccgggatcgcaccactctgcactccagcctgggtgacagagcaagactccgtctcaaaaaaaaaaaaaaaaaaccgtagttgctttctattaagatagggttttaaataaagcttttttcctttccctcacagctgttttgcacatatctggatgcagttatatttcctaagtgccagtgcttcacatatgtaactgatgcatcagttctcacaacaaccctaggaagtagctacaggttgagcatccctaatctgaaaaggcgaaatctgaaatgctccaaaatccgaaagtttttgagtgccaccatgatccttaaaggaagtgcccag

SEQ ID NO: 360175 - DNA, 3398 bp, Homo sapiens
  misc_feature (2)..(2): n is a, c, g, or t
anttgaaaaaaaagaaggctgtaccgtccggtattcccgggctgcacgtggagggcacggagtgtctccaagccagccagtgcactttgcttatcccggagggagcagggggctcttttagcattgacagtgaggagtatgaagcgatgcctgtggaggtgaaactgctccccaggaagctgcagttcttctgtgatcctaggaagagagaacagatgctcacaagccccacccagtgagcagcagaagacaagcactctgagaccacactttaggccaccggtgggaccaaaagggaacaggtgcctcagccatcccaacagtgtcgtcagagggtccccagggcattttcatggcaagtacccctctgcccccactccagcagtgcttcccaaagtgtgctctgtcacctgctttgcaatcggcttccattagcgcatgttttattttggtgtgacggttggccctcctaaacacggactttcctcaggctggttcaagacggaaaaggactttcttctgttttcttccaaagtgcaaccacagtggagagcccacggtgggcttagcctgcctaggcccttccatttctcttctttgaccgtgctaggaattccaggaaagtgcattcctgccctggtgaccttttcctatgtctaggctcctccacaggtgctgctattttgtgagctccggctcctgtttagcttttatttcagttctaacctcagtccagaaacatatgtgaggttgtttccctcttcagccacggctacaataccggaaaatgctagtttttatttatttttttaagtagtgcttcctaaatggtttgcatgagagccacctggggtacatgttgaaaacttatttggggtctaccccaaacctaataacccaaatttggggatggggcccaggaatatgcatttttaaaaagtcatctgcccttcccaggtgattctgtaagttgtccctcaactgtacttggagaaatcgtgttttaaagcagtagtccacaaagtattctgctcatgtgcccccaaaagtattttgaaaaatcatgtataccctcacccatctaagttgatatctaaaattttatctaagttggtatctaaaatttttcatgggaagttaaatagttgacaaagtatgtatttgctggtgtcgtgtaaatattggtattttaaaataaaaactgttacatcactattttaaacatatccagtacaatttaaatatcacaacaatttgacacccttcattcatttataaaaataaatgagctagttctttagtagttaaacatttcttggcttttctccttctgtatttccataccacttttcagccaagaatcctatcataatgtaatctattatgcccgacatcttttaatcattcaccccattacttcttgtcaacaaaaaatataaatggaaattttttttttagctcttgctttaagtgtttgtttgttatctcagtccagaaccaatattatcgtaattaattattggtatataatgaaaacggtattaattcttggatgattaaaagtttttttattagaatgttctttatcctaattagttcatttatccaagaatacatgaatgtgatttacagctgagatggggttcaacctcagctgtattccttgtttctgtatagatgtaagcacataaattcgatggaatagaattacgttaacaatgtttttacagttctttggattcctttggcattttgacaaagatcacagtgctctatcatcaagaattattaatgatgatctatcaactaacaaacaacttgattagattctcctttagtctgttgaaagcagagaactgaaatccacctgatttaccatggctttgccagccagtcattagcaccatttacttttactatcgctgacattttcctttgttcagtggccctgaggttcttacactctagggggcagtgcaccacaggaagatagatcaatgagggaggattgcgagggggaaggggaggaagcagagctggcaggccttagctacaggctctctctcaggcagatcccttttaagatacatacaccatgcccacacatcccatggagagagaccaatgctttagtagattacagaacagctatgaaaagtccatgaatgaagatcacaaaaaggaaggctttcttatttcatactgtattcttcagggtggtaaaatttctgcttttggcaaaaacataacagacggttccaaacatcagcataaagatcactcatcccataccacccacaggtagggaggaaggatgctgtagtatatgaaaacaaaagttttcacctgagctgagagcatttagcatatcgtggttctgtaacaatatcaaggaccagtgcagaatctggctttcttttctgataggctaccagtgtgtgtttatgtgtgctcattttgtggttctaatcataatggtacatataattagggaaggatatggaagccactttagaatcttattcatttttaaatataaatatgccttgtttcaaactttgttttcttgattcaggctttctttcctgtgagggcttggtttccttattgttgactgctttgttctttgccttgtccttccctataaagcctgcatggaagacgtttaatagtgcaactaaaagagagtcagctgagtgaggcttgtcagccaaagctggaatgctgagctatctggaggagatcctaataacccaatttggggatggggcccaggaatctgcattgggaagtcggccacccttcccaggtgattgtttagtacaaactttttgacagattaatttcactcaaatgcaaagattaatcccagcactttgggaggccaaggaaggtggatcacctgaggtcaggagctcgagaccagcctggccaacgtggtgaaatcccatctctactaaaaatacaaaaattagctgggcatggtggcatgtgcctgtagtcccagctactctggaggctgaggcaggagaatcgcttgaacccgggaggcagaggttgcagtgagccgggatcgcaccactctgcactccagcctgggtgacagagcaagactccgtctcaaaaaaaaaaaaaaaaaaccgtagttgctttctattaagatagggttttaaataaagcttttttcctttccctcacagctgttttgcacatatctggatgcagttatatttcctaagtgccagtgcttcacatatgtaactgatgcatcagttctcacaacaaccctaggaagtagctacaggttgagcatccctaatctgaaaaggcgaaatctgaaatgctccaaaatccgaaagtttttgagtgccaccatgatccttaaaggaagtgcccag

SEQ ID NO: 360176 - DNA, 1353 bp, Homo sapiens
gggaaaggcagagccgcgagctggaccagccgtgcaaatctctagaagatgacggtgttctttaaaacgcttcgaaatcactggaagaaaactacagctgggctctgcctgctgacctggggaggccattggctctatggaaaacactgtgataacctcctaaggagagcagcctgtcaagaagctcaggtgtttggcaatcaactcattcctcccaatgcacaagtgaagaaggccactgtttttctcaatcctgcagcttgcaaaggaaaagccaggactctatttgaaaaaaatgctgccccgattttacatttatctggcatggatgtgactattgttaagacagattatgagggacaagccaagaaactcctggaactgatggaaaacacggatgtgatcattgttgcaggaggagatgggacactgcaggaggttgttactggtgttcttcgacgaacagatgaggctaccttcagtaagattcccattggatttatcccactgggagagaccagtagtttgagtcataccctctttgccgaaagtggaaacaaagtccaacatattactgatgccacacttgccattgtgaaaggagagacagttccacttgatgtcttgcagatcaagggtgaaaaggaacagcctgtatttgcaatgaccggccttcgatggggatctttcagagatgctggcgtcaaagttagcaagtactggtatcttgggcctctaaaaatcaaagcagcccactttttcagcactcttaaggagtggcctcagactcatcaagcctctatctcatacacgggacctacagagagacctcccaatgaaccagaggagacccctgtacaaaggccttctttgtacaggagaatattacgaaggcttgcgtcctactgggcacaaccacaggatgccctttcccaagaggtgagcccggaggtctggaaagatgtgcagctgtccaccattgaactgtccatcacaacacggaataatcagcttgacccgacaagcaaagaagattttctgaatatctgcattgaacctgacaccatcagcaaaggagactttataactataggaagtcgaaaggtgagaaaccccaagctgcacgtggagggcacggagtgtctccaagccagccagtgcactttgcttatcccggagggagcagggggctcttttagcattgacagtgaggagtatgaagcgatgcctgtggaggtgaaactgctccccaggaagctgcagttcttctgtgatcctaggaagagagaacagatgctcatctagcaacatcatcctccgtgcccactactgcctgtgccccaccctgtctgc

SEQ ID NO: 360177 - DNA, 1037 bp, Homo sapiens
gggaaaggcagagccgcgagctggaccagccgtgcaaatctctagaagatgacggtgttctttaaaacgcttcgaaatcactggaagaaaactacagctgggctctgcctgctgacctggggaggccattggctctatggaaaacactgtgataacctcctaaggagagcagcctgtcaagaagctcaggtgtttggcaatcaactcattcctcccaatgcacaagtgaagaaggccactgtttttctcaatcctgcagcttgcaaaggaaaagccaggactctatttgaaaaaaatgctgccccgattttacatttatctggcatggatgtgactattgttaagacagattatgagggacaagccaagaaactcctggaactgatggaaaacacggatgtgatcattgttgcaggaggagatgggacactgcaggaggttgttactggtgttcttcgacgaacagatgaggctaccttcagtaagattcccattggatttatcccactgggagagaccagtagtttgagtcataccctctttgccgaaagtggaaacaaagtccagtaggttgtcaatgtggggaattagcatttgtgggtgagcgagactgggaatgaaacaatttcatgtgtatgctataactttcttgagttttgatagcctgaaacttcaaataattaagaggagcacctagatcagagttcagcctttcagttcctcgcggaagtctcccaacttggtgtgggactcttataattaagtctccccaggtccagtaagggcaggtgaaatacttgatgtcctttgtcaggtatgcagattatatcctgacctaaacgtttgtgccttgtacaattggtagcgatctttcactgacagacatatttgggctgaccactacggaggcctaagtattagccaggacacaataacaagtccccggtgaagactgacctagtcgcctggctacactacctgcactacaactactaaaacagtacattgcccaaccttgggaaaacacaactggcaac

SEQ ID NO: 360178 - DNA, 4664 bp, Homo sapiens
  misc_feature (30)..(30): n is a, c, g, or t
gcggggactagtctcgtccggagactggcngcggcggcggcggcggcggccggagctcgagccccagcggctgagggcgggcgggcgggcgcgggggagggaggggggccggtccgcgacgactccccggacggcgtttctcctccgagcggcgccggtttcggcttggggggggcggggtacagcccatccatgaccatgggcgacaagaagagcccgaccaggccaaaaagacaagcgaaacctgccgcagacgaagggttttgggattgtagcgtctgcaccttcagaaacagtgctgaagcctttaaatgcagcatctgcgatgtgaggaaaggcacctccaccagaaaacctcggatcaattctcagctggtggcacaacaagtggcacaacagtatgccaccccaccaccccctaaaaaggagaagaaggagaaagttgaaaagcaggacaaagagaaacctgagaaagacaaggaaattagtcctagtgttaccaagaaaaataccaacaagaaaaccaaaccaaagtctgacattctgaaagatcctcctagtgaagcaaacagcatacagtctgcaaatgctacaacaaagaccagcgaaacaaatcacacctcaaggccccggctgaaaaacgtggacaggagcactgcacagcagttggcagtaactgtgggcaacgtcaccgtcattatcacagactttaaggaaaagactcgctcctcatcgacatcctcatccacagtgacctccagtgcagggtcagaacagcagaaccagagcagctcggggtcagagagcacagacaagggctcctcccgttcctccacgccaaagggcgacatgtcagcagtcaatgatgaatctttctgaaattgcacatggaattgtgaaaactatgaatcagggtatgaaattcaaaacctccacctgcccatgctgcttgcatccctggagaatcttctgtggacatcgacctcttagtgatgctgccaggataatttctgcttgccatgggcatctggccaccaaggaatttcgcaccctgacgattactcttgacacttttatgtattccattgttttatatgattttcctaacaatcatttataattggatgtgctcctgaatctactttttataaaaaaaaaaaaaatctgctgtgcacaattttccatgtacattacaactggttttttgtttttgttttgttgccggtggggagggctgggagggggagggaacttttatttattgtgttcacaaactccatcctttcagcatatccttttaagtttagttctttcttccagttatactatgtactatcagttttgatataactatatatatataaatataaaattatatataaagggttatttgaaaccaatccatggcaacgctggtgcttgatacactgtgaagtgaatacaacattgaacagttacagatctgggacagtcccttctatgaaagtgctgaaatttaattaaaatcagtcttacatgaagtatgttccaatccatgtgggaacttgactctctcatctgtctaaagagtactggacgatataaaaatatatattttttaaacaatgtgatctcaaatttaaagactgctccagatagcctgcatttgcaatggaataactgacaaatcacaagtggtttagttgggcagggctttgatcattcaaaagtaactaaagtagctccagaatgccaagtattcgtgtaaattacggttacatgttatcatttgctgttcttacataagcactcatgaaaatatggtattctgtaacttgaattccatccattttccagacgtctactcatgtctgaggtaaatctagaaattgtcttagttttaggattgaaacagtctataaactgtatttttggtccatccaggaagctagtcccttgtttctcctttctacatgacattgcagtggtggtttctgtaattaaaatttgtttgcctcatgtccctttgtctgataaaccttcactctaccgattcagttgtgagcattctttttttccttctcaaaacctactatgatttgttttactgaacaaaggttatcaaccacacatccagtcctgacatggagcttttcagtgtttggagacatttctcaatcccctgctgtggtaggaactccagtggtgaacggcttgcgcgcctgcagccagagttgcagggaaagctcgtacttactgcgagcagcatgtaatcttttttcttcctggacataaagatagcttgagtaaactgttctatttcattctcttcactctttttactgtcttgcaaaaaaaaaaaaaataataataataatcaaagaccactaataagattccacctctccttattaaaataattttttaaaattttgttttgcttttgtttggatgtggggtctctcttctatttgacttttacatttagatacagagtttgtagtacttcagagacatttcaagcatgagaatttgaggttacctctctttatttgacctttagggactcacgggagggcagcctgatttgtaatgaagcaccacattttggtgttaaaaacctggtttgcttaataatagcagtaatttctgtctgtggaggcaacaaataaaaaaattaacagcttgaattgagtagccaacaggaaaggttcctttcacatttacattaaaactattctgtagtcactaatgtaccataatttaaattcttttctcaaaggtatagattataaagcagtgccatttgttgctgtggtcctattctcaaatgcatggacaatgttcccccctttttaaaataatgcttgtgtctgggatgcaagctttgcttatctttttaaatacatttttaaagtatttattaatgaaccaaaggaaatcagatgctttctataagcatcagaatatataatacatagtgatttgactatgaattttaaatccacattttaatattggtgggatattgcaaagacattccttctaaagttttaatattccttttattaagggtctcagggagggtaaattagtcagccatatttattttccagaggtttaagaaattgctgtttttaactttttgaaaaaacttaaatgccaccaaactcatgtaggttgcactgcttattgaaccaataactgttggtatgcactttgttcagacacactgtgtactttttcaaaaactagtttcatgtaaagtgattggaccccatagattagtggaaaaagctgattaaccagctactcataggctgctaattcattcatgccaatgttttggtttttcagttttgcctccgtgataaattaaagaatggggaggggtgaaggaaggggaagaagattgctttagaacaagtggcatgaaattaccatctttgtagaaaccgcagctaacagtgggagttatctaagcaatcagatgttacagggccagccctttagctgctgtggtgtattctgttgggtagtgaggtagtaggtactttatagacttttaattttggaaattgatgacatccctcaggcatgtattctggaaatggaattcctgtaacttcctgtgtctgcagtatgccctacaattagtaggcagcgtgtaaaaacactagtgtagattataaagatatacattaaaagaggaccagaaatacttggtattcagtggcacagaaagcaggttaaacaaacaaaaagcacagtgttacgcttgcaagtttccatttgttttaataccacgcaatctttcacactcgtgcgtgtgcgcgcacacagagcttacctgacttgctctgcttgagtcatgcagttacaaaaaaaaagacatcttgacacccacacaatattctaatcaaaacctttcagtttcaatctggatatttaaaaacattggcagaagcttctgtgagtttagttccactaagatgtttcacctgccttatcaagaccattctcagtctacttttttaagctaccgtatcttaaattattgaaaatttattaattgctgaatatataataacctttgcttgtatgtaaccgaaaatggtttaagagccaacatttagagtatgacaatggagctgaacagtttttaatgcgcaagcagttctgttcttgtgtatgacttgtaaccttaatttactgtgtaaagatggttacattatttccttagctttgtttgttggagacaaatagagaatgcttgttaagtatgtcaaaacaatcttatcttgtgaatttttgttaatgtattatacgagctatatttttcatttgcccagaaagacagcttgtataacgcttttggaagtttctgctctgtaatgtctttagagctgacagtctgttaggtttgtttttttcttcatgctaaagtgtcagttggtggttttgtgaactggtcaaaaattcacaggtcttaaatgttttgggggaaatttatattggacactgctctttgtctagcaaataaaagatgttaatatattcctgttactggcatgtgcacgactatgttattagaagccactttatcattttcctgctttaaatagaaatgtctatttatgaattctgcttgtagttttttcacaaataaaatagtaaaatttaca

SEQ ID NO: 360179 - DNA, 4372 bp, Homo sapiens
gcccaagctgcctcggttcaagtctcagcccagtcacttcccagatgtgcgactcaggaaaacctcggatcaattctcagctggtggcacaacaagtggcacaacagtatgccaccccaccaccccctaaaaaggagaagaaggagaaagttgaaaagcaggacaaagagaaacctgagaaagacaaggaaattagtcctagtgttaccaagaaaaataccaacaagaaaaccaaaccaaagtctgacattctgaaagatcctcctagtgaagcaaacagcatacagtctgcaaatgctacaacaaagaccagcgaaacaaatcacacctcaaggccccggctgaaaaacgtggacaggagcactgcacagcagttggcagtaactgtgggcaacgtcaccgtcattatcacagactttaaggaaaagactcgctcctcatcgacatcctcatccacagtgacctccagtgcagggtcagaacagcagaaccagagcagctcggggtcagagagcacagacaagggctcctcccgttcctccacgccaaagggcgacatgtcagcagtcaatgatgaatctttctgaaattgcacatggaattgtgaaaactatgaatcagggtatgaaattcaaaacctccacctgcccatgctgcttgcatccctggagaatcttctgtggacatcgacctcttagtgatgctgccaggataatttctgcttgccatgggcatctggccaccaaggaatttcgcaccctgacgattactcttgacacttttatgtattccattgttttatatgattttcctaacaatcatttataattggatgtgctcctgaatctactttttataaaaaaaaaaaaaatctgctgtgcacaattttccatgtacattacaactggttttttgtttttgttttgttgccggtggggagggctgggagggggagggaacttttatttattgtgttcacaaactccatcctttcagcatatccttttaagtttagttctttcttccagttatactatgtactatcagttttgatataactatatatatataaatataaaattatatataaagggttatttgaaaccaatccatggcaacgctggtgcttgatacactgtgaagtgaatacaacattgaacagttacagatctgggacagtcccttctatgaaagtgctgaaatttaattaaaatcagtcttacatgaagtatgttccaatccatgtgggaacttgactctctcatctgtctaaagagtactggacgatataaaaatatatattttttaaacaatgtgatctcaaatttaaagactgctccagatagcctgcatttgcaatggaataactgacaaatcacaagtggtttagttgggcagggctttgatcattcaaaagtaactaaagtagctccagaatgccaagtattcgtgtaaattacggttacatgttatcatttgctgttcttacataagcactcatgaaaatatggtattctgtaacttgaattccatccattttccagacgtctactcatgtctgaggtaaatctagaaattgtcttagttttaggattgaaacagtctataaactgtatttttggtccatccaggaagctagtcccttgtttctcctttctacatgacattgcagtggtggtttctgtaattaaaatttgtttgcctcatgtccctttgtctgataaaccttcactctaccgattcagttgtgagcattctttttttccttctcaaaacctactatgatttgttttactgaacaaaggttatcaaccacacatccagtcctgacatggagcttttcagtgtttggagacatttctcaatcccctgctgtggtaggaactccagtggtgaacggcttgcgcgcctgcagccagagttgcagggaaagctcgtacttactgcgagcagcatgtaatcttttttcttcctggacataaagatagcttgagtaaactgttctatttcattctcttcactctttttactgtcttgcaaaaaaaaaaaaaataataataataatcaaagaccactaataagattccacctctccttattaaaataattttttaaaattttgttttgcttttgtttggatgtggggtctctcttctatttgacttttacatttagatacagagtttgtagtacttcagagacatttcaagcatgagaatttgaggttacctctctttatttgacctttagggactcacgggagggcagcctgatttgtaatgaagcaccacattttggtgttaaaaacctggtttgcttaataatagcagtaatttctgtctgtggaggcaacaaataaaaaaattaacagcttgaattgagtagccaacaggaaaggttcctttcacatttacattaaaactattctgtagtcactaatgtaccataatttaaattcttttctcaaaggtatagattataaagcagtgccatttgttgctgtggtcctattctcaaatgcatggacaatgttcccccctttttaaaataatgcttgtgtctgggatgcaagctttgcttatctttttaaatacatttttaaagtatttattaatgaaccaaaggaaatcagatgctttctataagcatcagaatatataatacatagtgatttgactatgaattttaaatccacattttaatattggtgggatattgcaaagacattccttctaaagttttaatattccttttattaagggtctcagggagggtaaattagtcagccatatttattttccagaggtttaagaaattgctgtttttaactttttgaaaaaacttaaatgccaccaaactcatgtaggttgcactgcttattgaaccaataactgttggtatgcactttgttcagacacactgtgtactttttcaaaaactagtttcatgtaaagtgattggaccccatagattagtggaaaaagctgattaaccagctactcataggctgctaattcattcatgccaatgttttggtttttcagttttgcctccgtgataaattaaagaatggggaggggtgaaggaaggggaagaagattgctttagaacaagtggcatgaaattaccatctttgtagaaaccgcagctaacagtgggagttatctaagcaatcagatgttacagggccagccctttagctgctgtggtgtattctgttgggtagtgaggtagtaggtactttatagacttttaattttggaaattgatgacatccctcaggcatgtattctggaaatggaattcctgtaacttcctgtgtctgcagtatgccctacaattagtaggcagcgtgtaaaaacactagtgtagattataaagatatacattaaaagaggaccagaaatacttggtattcagtggcacagaaagcaggttaaacaaacaaaaagcacagtgttacgcttgcaagtttccatttgttttaataccacgcaatctttcacactcgtgcgtgtgcgcgcacacagagcttacctgacttgctctgcttgagtcatgcagttacaaaaaaaaagacatcttgacacccacacaatattctaatcaaaacctttcagtttcaatctggatatttaaaaacattggcagaagcttctgtgagtttagttccactaagatgtttcacctgccttatcaagaccattctcagtctacttttttaagctaccgtatcttaaattattgaaaatttattaattgctgaatatataataacctttgcttgtatgtaaccgaaaatggtttaagagccaacatttagagtatgacaatggagctgaacagtttttaatgcgcaagcagttctgttcttgtgtatgacttgtaaccttaatttactgtgtaaagatggttacattatttccttagctttgtttgttggagacaaatagagaatgcttgttaagtatgtcaaaacaatcttatcttgtgaatttttgttaatgtattatacgagctatatttttcatttgcccagaaagacagcttgtataacgcttttggaagtttctgctctgtaatgtctttagagctgacagtctgttaggtttgtttttttcttcatgctaaagtgtcagttggtggttttgtgaactggtcaaaaattcacaggtcttaaatgttttgggggaaatttatattggacactgctctttgtctagcaaataaaagatgttaatatattcctgttactggcatgtgcacgactatgttattagaagccactttatcattttcctgctttaaatagaaatgtctatttatgaattctgcttgtagttttttcacaaataaaatagtaaaatttaca

SEQ ID NO: 360180 - DNA, 5816 bp, Homo sapiens
  misc_feature (30)..(30): n is a, c, g, or t
gcggggactagtctcgtccggagactggcngcggcggcggcggcggcggccggagctcgagccccagcggctgagggcgggcgggcgggcgcgggggagggaggggggccggtccgcgacgactccccggacggcgtttctcctccgagcggcgccggtttcggcttggggggggcggggtacagcccatccatgaccatgggcgacaagaagagcccgaccaggccaaaaagacaagcgaaacctgccgcagacgaagggttttgggattgtagcgtctgcaccttcagaaacagtgctgaagcctttaaatgcagcatctgcgatgtgaggaaaggcacctccaccagaaaacctcggatcaattctcagctggtggcacaacaagtggcacaacagtatgccaccccaccaccccctaaaaaggagaagaaggagaaagttgaaaagcaggacaaagagaaacctgagaaagacaaggaaattagtcctagtgttaccaagaaaaataccaacaagaaaaccaaaccaaagtctgacattctgaaagatcctcctagtgaagcaaacagcatacagtctgcaaatgctacaacaaagaccagcgaaacaaatcacacctcaaggccccggctgaaaaacgtggacaggagcactgcacagcagttggcagtaactgtgggcaacgtcaccgtcattatcacagactttaaggaaaagactcgctcctcatcgacatcctcatccacagtgacctccagtgcagggtcagaacagcagaaccagagcagctcggggtcagagagcacagacaagggctcctcccgttcctccacgccaaagggcgacatgtcagcagtcaatgatgaatctttctgaaattgcacatggaattgtgaaaactatgaatcagggtatgaaattcaaaacctccacctgcccatgctgcttgcatccctggagaatcttctgtggacatcgacctcttagtgatgctgccaggataatttctgcttgccatgggcatctggccaccaaggaatttcgcaccctgacgattactcttgacacttttatgtattccattgttttatatgattttcctaacaatcatttataattggatgtgctcctgaatctactttttataaaaaaaaaaaaaatctgctgtgcacaattttccatgtacattacaactggttttttgtttttgttttgttgccggtggggagggctgggagggggagggaacttttatttattgtgttcacaaactccatcctttcagcatatccttttaagtttagttctttcttccagttatactatgtactatcagttttgatataactatatatatataaatataaaattatatataaagggttatttgaaaccaatccatggcaacgctggtgcttgatacactgtgaagtgaatacaacattgaacagttacagatctgggacagtcccttctatgaaagtgctgaaatttaattaaaatcagtcttacatgaagtatgttccaatccatgtgggaacttgactctctcatctgtctaaagagtactggacgatataaaaatatatattttttaaacaatgtgatctcaaatttaaagactgctccagatagcctgcatttgcaatggaataactgacaaatcacaagtggtttagttgggcagggctttgatcattcaaaagtaactaaagtagctccagaatgccaagtattcgtgtaaattacggttacatgttatcatttgctgttcttacataagcactcatgaaaatatggtattctgtaacttgaattccatccattttccagacgtctactcatgtctgaggtaaatctagaaattgtcttagttttaggattgaaacagtctataaactgtatttttggtccatccaggaagctagtcccttgtttctcctttctacatgacattgcagtggtggtttctgtaattaaaatttgtttgcctcatgtccctttgtctgataaaccttcactctaccgattcagttgtgagcattctttttttccttctcaaaacctactatgatttgttttactgaacaaaggttatcaaccacacatccagtcctgacatggagcttttcagtgtttggagacatttctcaatcccctgctgtggtaggaactccagtggtgaacggcttgcgcgcctgcagccagagttgcagggaaagctcgtacttactgcgagcagcatgtaatcttttttcttcctggacataaagatagcttgagtaaactgttctatttcattctcttcactctttttactgtcttgcaaaaaaaaaaaaaataataataataatcaaagaccactaataagattccacctctccttattaaaataattttttaaaattttgttttgcttttgtttggatgtggggtctctcttctatttgacttttacatttagatacagagtttgtagtacttcagagacatttcaagcatgagaatttgaggttacctctctttatttgacctttagggactcacgggagggcagcctgatttgtaatgaagcaccacattttggtgttaaaaacctggtttgcttaataatagcagtaatttctgtctgtggaggcaacaaataaaaaaattaacagcttgaattgagtagccaacaggaaaggttcctttcacatttacattaaaactattctgtagtcactaatgtaccataatttaaattcttttctcaaaggtatagattataaagcagtgccatttgttgctgtggtcctattctcaaatgcatggacaatgttcccccctttttaaaataatgcttgtgtctgggatgcaagctttgcttatctttttaaatacatttttaaagtatttattaatgaaccaaaggaaatcagatgctttctataagcatcagaatatataatacatagtgatttgactatgaattttaaatccacattttaatattggtgggatattgcaaagacattccttctaaagttttaatattccttttattaagggtctcagggagggtaaattagtcagccatatttattttccagaggtttaagaaattgctgtttttaactttttgaaaaaacttaaatgccaccaaactcatgtaggttgcactgcttattgaaccaataactgttggtatgcactttgttcagacacactgtgtactttttcaaaaactagtttcatgtaaagtgattggaccccatagattagtggaaaaagctgattaaccagctactcataggctgctaattcattcatgccaatgttttggtttttcagttttgcctccgtgataaattaaagaatggggaggggtgaaggaaggggaagaagattgctttagaacaagtggcatgaaattaccatctttgtagaaaccgcagctaacagtgggagttatctaagcaatcagatgttacagggccagccctttagctgctgtggtgtattctgttgggtagtgaggtagtaggtactttatagacttttaattttggaaattgatgacatccctcaggcatgtattctggaaatggaattcctgtaacttcctgtgtctgcagtatgccctacaattagtaggcagcgtgtaaaaacactagtgtagattataaagatatacattaaaagaggaccagaaatacttggtattcagtggcacagaaagcaggttaaacaaacaaaaagcacagtgttacgcttgcaagtttccatttgttttaataccacgcaatctttcacactcgtgcgtgtgcgcgcacacagagcttacctgacttgctctgcttgagtcatgcagttacaaaaaaaaagacatcttgacacccacacaatattctaatcaaaacctttcagtttcaatctggatatttaaaaacattggcagaagcttctgtgagtttagttccactaagatgtttcacctgccttatcaagaccattctcagtctacttttttaagctaccgtatcttaaattattgaaaatttattaattgctgaatatataataacctttgcttgtatgtaaccgaaaatggtttaagagccaacatttagagtatgacaatggagctgaacagtttttaatgcgcaagcagttctgttcttgtgtatgacttgtaaccttaatttactgtgtaaagatggttacattatttccttagctttgtttgttggagacaaatagagaatgcttgttaagtatgtcaaaacaatcttatcttgtgaatttttgttaatgtattatacgagctatatttttcatttgcccagaaagacagcttgtataacgcttttggaagtttctgctctgtaatgtctttagagctgacagtctgttaggtttgtttttttcttcatgctaaagtgtcagttggtggttttgtgaactggtcaaaaattcacaggtcttaaatgttttgggggaaatttatattggacactgctctttgtctagcaaataaaagatgttaatatattcctgttactggcatgtgcacgactatgttattagaagccactttatcattttcctgctttaaatagaaatgtctatttatgaattctgcttgtagttttttcacaaataaaatagtaaaatttacaaaaaaaaaaaaaaaaaaaaaaaaaaaaaaaaaaaaaaaaaaaaaaaaaaaaaaaaaaaaaaaaaaaaaaaaaaaaaaaaaggaggagccggacgacaaaaaagtgtaccatgatagaggagcaaatatataacgagagcaccacatattatagagacaagggcggctcgctccacgaggagcgacaattatattaaaagacaggaacgatcagtacgcgccgagctctctatctataatacgagtttacgaatatcagggctgagcgacaacaccgtagcaacctgcgaggacactctgtatataagaaaagaccccattttactctaaagcggaggcagcacaatacactagtggcagacaacactcatccttcagcaatatttataaccatcagtgaggacaatacaacaacacctcaaccgggagaacaccgggggcaacccaccaaacaaggcatacatcacacgcccccacaaacaacagcagggccccacccgcgagcagacccccaagaacaacaatactaccagagagacacaaaaaaaaaaagcacaacaaaaccacaacacaacaccccacacctggacagaaaggaagagaacgaggaaataggagagaggacgaagagagtcggtggacgcgaggggcagcgagtgatgaagacgacaatagagaggaaaagaaggaaccagcaacctcagcagtagaggaaagaaaaagagaaaagctgacacagcagacacaagccgcggccaataagaatgacacagaacaagagaagcacgcaaacaagacaaaaagaaccagaccgacgacaagcgaacgcggacgaaacaaccaaaagaaaagaaaagacgaaaaaaccaaacaagccaaaggacagaagcgcagagaacaacaaaagacaagaacaacagaaaaaaaaaaagagagagagaaaaaaataacggatgaaaaacaacaaagcaataaaagacacaaacaaaagaagcgagaacaaaacataacgaaagcaaagcaacacaccaacacacgtgaaagcacacaccagcggaacacacacaggaacaagagcaaatagagaaacaaaaagaagaagaaaccgaaacagagaacagaaccaacgacgacaccgaaaacagacaaacgc

SEQ ID NO: 360181 - DNA, 4073 bp, Homo sapiens
ttgataatatttctgcccagaagctgtttttgatccataacttacttaattggctcttcccctgtggtgttgcttctaggccccggctgaaaaacgtggacaggagcactgcacaactttaaggaaaagactcgctcctcatcgacatcctcatccacagtgacctccagtgcagggtcagaacagcagaaccagagcagctcggggtcagagagcacagacaagggctcctcccgttcctccacgccaaagggcgacatgtcagcagtcaatgatgaatctttctgaaattgcacatggaattgtgaaaactatgaatcagggtatgaaattcaaaacctccacctgcccatgctgcttgcatccctggagaatcttctgtggacatcgacctcttagtgatgctgccaggataatttctgcttgccatgggcatctggccaccaaggaatttcgcaccctgacgattactcttgacacttttatgtattccattgttttatatgattttcctaacaatcatttataattggatgtgctcctgaatctactttttataaaaaaaaaaaaaatctgctgtgcacaattttccatgtacattacaactggttttttgtttttgttttgttgccggtggggagggctgggagggggagggaacttttatttattgtgttcacaaactccatcctttcagcatatccttttaagtttagttctttcttccagttatactatgtactatcagttttgatataactatatatatataaatataaaattatatataaagggttatttgaaaccaatccatggcaacgctggtgcttgatacactgtgaagtgaatacaacattgaacagttacagatctgggacagtcccttctatgaaagtgctgaaatttaattaaaatcagtcttacatgaagtatgttccaatccatgtgggaacttgactctctcatctgtctaaagagtactggacgatataaaaatatatattttttaaacaatgtgatctcaaatttaaagactgctccagatagcctgcatttgcaatggaataactgacaaatcacaagtggtttagttgggcagggctttgatcattcaaaagtaactaaagtagctccagaatgccaagtattcgtgtaaattacggttacatgttatcatttgctgttcttacataagcactcatgaaaatatggtattctgtaacttgaattccatccattttccagacgtctactcatgtctgaggtaaatctagaaattgtcttagttttaggattgaaacagtctataaactgtatttttggtccatccaggaagctagtcccttgtttctcctttctacatgacattgcagtggtggtttctgtaattaaaatttgtttgcctcatgtccctttgtctgataaaccttcactctaccgattcagttgtgagcattctttttttccttctcaaaacctactatgatttgttttactgaacaaaggttatcaaccacacatccagtcctgacatggagcttttcagtgtttggagacatttctcaatcccctgctgtggtaggaactccagtggtgaacggcttgcgcgcctgcagccagagttgcagggaaagctcgtacttactgcgagcagcatgtaatcttttttcttcctggacataaagatagcttgagtaaactgttctatttcattctcttcactctttttactgtcttgcaaaaaaaaaaaaaataataataataatcaaagaccactaataagattccacctctccttattaaaataattttttaaaattttgttttgcttttgtttggatgtggggtctctcttctatttgacttttacatttagatacagagtttgtagtacttcagagacatttcaagcatgagaatttgaggttacctctctttatttgacctttagggactcacgggagggcagcctgatttgtaatgaagcaccacattttggtgttaaaaacctggtttgcttaataatagcagtaatttctgtctgtggaggcaacaaataaaaaaattaacagcttgaattgagtagccaacaggaaaggttcctttcacatttacattaaaactattctgtagtcactaatgtaccataatttaaattcttttctcaaaggtatagattataaagcagtgccatttgttgctgtggtcctattctcaaatgcatggacaatgttcccccctttttaaaataatgcttgtgtctgggatgcaagctttgcttatctttttaaatacatttttaaagtatttattaatgaaccaaaggaaatcagatgctttctataagcatcagaatatataatacatagtgatttgactatgaattttaaatccacattttaatattggtgggatattgcaaagacattccttctaaagttttaatattccttttattaagggtctcagggagggtaaattagtcagccatatttattttccagaggtttaagaaattgctgtttttaactttttgaaaaaacttaaatgccaccaaactcatgtaggttgcactgcttattgaaccaataactgttggtatgcactttgttcagacacactgtgtactttttcaaaaactagtttcatgtaaagtgattggaccccatagattagtggaaaaagctgattaaccagctactcataggctgctaattcattcatgccaatgttttggtttttcagttttgcctccgtgataaattaaagaatggggaggggtgaaggaaggggaagaagattgctttagaacaagtggcatgaaattaccatctttgtagaaaccgcagctaacagtgggagttatctaagcaatcagatgttacagggccagccctttagctgctgtggtgtattctgttgggtagtgaggtagtaggtactttatagacttttaattttggaaattgatgacatccctcaggcatgtattctggaaatggaattcctgtaacttcctgtgtctgcagtatgccctacaattagtaggcagcgtgtaaaaacactagtgtagattataaagatatacattaaaagaggaccagaaatacttggtattcagtggcacagaaagcaggttaaacaaacaaaaagcacagtgttacgcttgcaagtttccatttgttttaataccacgcaatctttcacactcgtgcgtgtgcgcgcacacagagcttacctgacttgctctgcttgagtcatgcagttacaaaaaaaaagacatcttgacacccacacaatattctaatcaaaacctttcagtttcaatctggatatttaaaaacattggcagaagcttctgtgagtttagttccactaagatgtttcacctgccttatcaagaccattctcagtctacttttttaagctaccgtatcttaaattattgaaaatttattaattgctgaatatataataacctttgcttgtatgtaaccgaaaatggtttaagagccaacatttagagtatgacaatggagctgaacagtttttaatgcgcaagcagttctgttcttgtgtatgacttgtaaccttaatttactgtgtaaagatggttacattatttccttagctttgtttgttggagacaaatagagaatgcttgttaagtatgtcaaaacaatcttatcttgtgaatttttgttaatgtattatacgagctatatttttcatttgcccagaaagacagcttgtataacgcttttggaagtttctgctctgtaatgtctttagagctgacagtctgttaggtttgtttttttcttcatgctaaagtgtcagttggtggttttgtgaactggtcaaaaattcacaggtcttaaatgttttgggggaaatttatattggacactgctctttgtctagcaaataaaagatgttaatatattcctgttactggcatgtgcacgactatgttattagaagccactttatcattttcctgctttaaatagaaatgtctatttatgaattctgcttgtagttttttcacaaataaaatagtaaaatttaca

SEQ ID NO: 360182 - DNA, 4886 bp, Homo sapiens
  misc_feature (30)..(30): n is a, c, g, or t
gcggggactagtctcgtccggagactggcngcggcggcggcggcggcggccggagctcgagccccagcggctgagggcgggcgggcgggcgcgggggagggaggggggccggtccgcgacgactccccggacggcgtttctcctccgagcggcgccggtttcggcttggggggggcggggtacagcccatccatgaccatgggcgacaagaagagcccgaccaggccaaaaagacaagcgaaacctgccgcagacgaagggttttgggattgtagcgtctgcaccttcagaaacagtgctgaagcctttaaatgcagcatctgcgatgtgaggaaaggcacctccaccagaaaacctcggatcaattctcagctggtggcacaacaagtggcacaacagtatgccaccccaccaccccctaaaaaggagaagaaggagaaagttgaaaagcaggacaaagagaaacctgagaaagacaaggaaattagtcctagtgttaccaagaaaaataccaacaagaaaaccaaaccaaagtctgacattctgaaagatcctcctagtgaagcaaacagcatacagtctgcaaatgctacaacaaagaccagcgaaacaaatcacacctcaaggccccggctgaaaaacgtggacaggagcactgcacagcagttggcagtaactgtgggcaacgtcaccgtcattatcacagactttaaggaaaagactcgctcctcatcgacatcctcatccacagtgacctccagtgcagggtcagaacagcagaaccagagcagctcggggtcagagagcacagacaagggctcctcccgttcctccacgccaaagggcgacatgtcagcagtcaatgatgaatctttctgaaattgcacatggaattgtgaaaactatgaatcagggtatgaaattcaaaacctccacctgcccatgctgcttgcatccctggagaatcttctgtggacatcgacctcttagtgatgctgccaggataatttctgcttgccatgggcatctggccaccaaggaatttcgcaccctgacgattactcttgacacttttatgtattccattgttttatatgattttcctaacaatcatttataattggatgtgctcctgaatctactttttataaaaaaaaaaaaaatctgctgtgcacaattttccatgtacattacaactggttttttgtttttgttttgttgccggtggggagggctgggagggggagggaacttttatttattgtgttcacaaactccatcctttcagcatatccttttaagtttagttctttcttccagttatactatgtactatcagttttgatataactatatatatataaatataaaattatatataaagggttatttgaaaccaatccatggcaacgctggtgcttgatacactgtgaagtgaatacaacattgaacagttacagatctgggacagtcccttctatgaaagtgctgaaatttaattaaaatcagtcttacatgaagtatgttccaatccatgtgggaacttgactctctcatctgtctaaagagtactggacgatataaaaatatatattttttaaacaatgtgatctcaaatttaaagactgctccagatagcctgcatttgcaatggaataactgacaaatcacaagtggtttagttgggcagggctttgatcattcaaaagtaactaaagtagctccagaatgccaagtattcgtgtaaattacggttacatgttatcatttgctgttcttacataagcactcatgaaaatatggtattctgtaacttgaattccatccattttccagacgtctactcatgtctgaggtaaatctagaaattgtcttagttttaggattgaaacagtctataaactgtatttttggtccatccaggaagctagtcccttgtttctcctttctacatgacattgcagtggtggtttctgtaattaaaatttgtttgcctcatgtccctttgtctgataaaccttcactctaccgattcagttgtgagcattctttttttccttctcaaaacctactatgatttgttttactgaacaaaggttatcaaccacacatccagtcctgacatggagcttttcagtgtttggagacatttctcaatcccctgctgtggtaggaactccagtggtgaacggcttgcgcgcctgcagccagagttgcagggaaagctcgtacttactgcgagcagcatgtaatcttttttcttcctggacataaagatagcttgagtaaactgttctatttcattctcttcactctttttactgtcttgcaaaaaaaaaaaaaataataataataatcaaagaccactaataagattccacctctccttattaaaataattttttaaaattttgttttgcttttgtttggatgtggggtctctcttctatttgacttttacatttagatacagagtttgtagtacttcagagacatttcaagcatgagaatttgaggttacctctctttatttgacctttagggactcacgggagggcagcctgatttgtaatgaagcaccacattttggtgttaaaaacctggtttgcttaataatagcagtaatttctgtctgtggaggcaacaaataaaaaaattaacagcttgaattgagtagccaacaggaaaggttcctttcacatttacattaaaactattctgtagtcactaatgtaccataatttaaattcttttctcaaaggtatagattataaagcagtgccatttgttgctgtggtcctattctcaaatgcatggacaatgttcccccctttttaaaataatgcttgtgtctgggatgcaagctttgcttatctttttaaatacatttttaaagtatttattaatgaaccaaaggaaatcagatgctttctataagcatcagaatatataatacatagtgatttgactatgaattttaaatccacattttaatattggtgggatattgcaaagacattccttctaaagttttaatattccttttattaagggtctcagggagggtaaattagtcagccatatttattttccagaggtttaagaaattgctgtttttaactttttgaaaaaacttaaatgccaccaaactcatgtaggttgcactgcttattgaaccaataactgttggtatgcactttgttcagacacactgtgtactttttcaaaaactagtttcatgtaaagtgattggaccccatagattagtggaaaaagctgattaaccagctactcataggctgctaattcattcatgccaatgttttggtttttcagttttgcctccgtgataaattaaagaatggggaggggtgaaggaaggggaagaagattgctttagaacaagtggcatgaaattaccatctttgtagaaaccgcagctaacagtgggagttatctaagcaatcagatgttacagggccagccctttagctgctgtggtgtattctgttgggtagtgaggtagtaggtactttatagacttttaattttggaaatttatattggacactgctctttgtctagcaaataaaagatgttaatatattcctgttactggcatgtgcacgactatgttattagaagccactttatcattttcctgctttaaatagaaatgtctatttatgaattctgcttgtagttttttcacaaataaaatagtaaaatttacaaaaaaaaaaaaaaaaaaaaaaaaaaaaaaaaaaaaaaaaaaaaaaaaaaaaaaaaaaaaaaaaaaaaaaaaaaaaaaaaaggaggagccggacgacaaaaaagtgtaccatgatagaggagcaaatatataacgagagcaccacatattatagagacaagggcggctcgctccacgaggagcgacaattatattaaaagacaggaacgatcagtacgcgccgagctctctatctataatacgagtttacgaatatcagggctgagcgacaacaccgtagcaacctgcgaggacactctgtatataagaaaagaccccattttactctaaagcggaggcagcacaatacactagtggcagacaacactcatccttcagcaatatttataaccatcagtgaggacaatacaacaacacctcaaccgggagaacaccgggggcaacccaccaaacaaggcatacatcacacgcccccacaaacaacagcagggccccacccgcgagcagacccccaagaacaacaatactaccagagagacacaaaaaaaaaaagcacaacaaaaccacaacacaacaccccacacctggacagaaaggaagagaacgaggaaataggagagaggacgaagagagtcggtggacgcgaggggcagcgagtgatgaagacgacaatagagaggaaaagaaggaaccagcaacctcagcagtagaggaaagaaaaagagaaaagctgacacagcagacacaagccgcggccaataagaatgacacagaacaagagaagcacgcaaacaagacaaaaagaaccagaccgacgacaagcgaacgcggacgaaacaaccaaaagaaaagaaaagacgaaaaaaccaaacaagccaaaggacagaagcgcagagaacaacaaaagacaagaacaacagaaaaaaaaaaagagagagagaaaaaaataacggatgaaaaacaacaaagcaataaaagacacaaacaaaagaagcgagaacaaaacataacgaaagcaaagcaacacaccaacacacgtgaaagcacacaccagcggaacacacacaggaacaagagcaaatagagaaacaaaaagaagaagaaaccgaaacagagaacagaaccaacgacgacaccgaaaacagacaaacgc

SEQ ID NO: 360183 - DNA, 3453 bp, Homo sapiens
gtcatgtagccggtccggagggctccgacggggagcgaactccgaatcctcgtatgcacctgctccatacacacagaaccaggctccaaacagcagcacctgcatacggcactgcgtgccgccatcaggtctgaaataactgcaggtacatccatgtaacggtatatataaagggttatttgaaaccaatccatggcaacgctggtgcttgatacactgtgaagtgaatacaacattgaacagttacagatctgggacagtcccttctatgaaagtgctgaaatttaattaaaatcagtcttacatgaagtatgttccaatccatgtgggaacttgactctctcatctgtctaaagagtactggacgatataaaaatatatattttttaaacaatgtgatctcaaatttaaagactgctccagatagcctgcatttgcaatggaataactgacaaatcacaagtggtttagttgggcagggctttgatcattcaaaagtaactaaagtagctccagaatgccaagtattcgtgtaaattacggttacatgttatcatttgctgttcttacataagcactcatgaaaatatggtattctgtaacttgaattccatccattttccagacgtctactcatgtctgaggtaaatctagaaattgtcttagttttaggattgaaacagtctataaactgtatttttggtccatccaggaagctagtcccttgtttctcctttctacatgacattgcagtggtggtttctgtaattaaaatttgtttgcctcatgtccctttgtctgataaaccttcactctaccgattcagttgtgagcattctttttttccttctcaaaacctactatgatttgttttactgaacaaaggttatcaaccacacatccagtcctgacatggagcttttcagtgtttggagacatttctcaatcccctgctgtggtaggaactccagtggtgaacggcttgcgcgcctgcagccagagttgcagggaaagctcgtacttactgcgagcagcatgtaatcttttttcttcctggacataaagatagcttgagtaaactgttctatttcattctcttcactctttttactgtcttgcaaaaaaaaaaaaaataataataataatcaaagaccactaataagattccacctctccttattaaaataattttttaaaattttgttttgcttttgtttggatgtggggtctctcttctatttgacttttacatttagatacagagtttgtagtacttcagagacatttcaagcatgagaatttgaggttacctctctttatttgacctttagggactcacgggagggcagcctgatttgtaatgaagcaccacattttggtgttaaaaacctggtttgcttaataatagcagtaatttctgtctgtggaggcaacaaataaaaaaattaacagcttgaattgagtagccaacaggaaaggttcctttcacatttacattaaaactattctgtagtcactaatgtaccataatttaaattcttttctcaaaggtatagattataaagcagtgccatttgttgctgtggtcctattctcaaatgcatggacaatgttcccccctttttaaaataatgcttgtgtctgggatgcaagctttgcttatctttttaaatacatttttaaagtatttattaatgaaccaaaggaaatcagatgctttctataagcatcagaatatataatacatagtgatttgactatgaattttaaatccacattttaatattggtgggatattgcaaagacattccttctaaagttttaatattccttttattaagggtctcagggagggtaaattagtcagccatatttattttccagaggtttaagaaattgctgtttttaactttttgaaaaaacttaaatgccaccaaactcatgtaggttgcactgcttattgaaccaataactgttggtatgcactttgttcagacacactgtgtactttttcaaaaactagtttcatgtaaagtgattggaccccatagattagtggaaaaagctgattaaccagctactcataggctgctaattcattcatgccaatgttttggtttttcagttttgcctccgtgataaattaaagaatggggaggggtgaaggaaggggaagaagattgctttagaacaagtggcatgaaattaccatctttgtagaaaccgcagctaacagtgggagttatctaagcaatcagatgttacagggccagccctttagctgctgtggtgtattctgttgggtagtgaggtagtaggtactttatagacttttaattttggaaattgatgacatccctcaggcatgtattctggaaatggaattcctgtaacttcctgtgtctgcagtatgccctacaattagtaggcagcgtgtaaaaacactagtgtagattataaagatatacattaaaagaggaccagaaatacttggtattcagtggcacagaaagcaggttaaacaaacaaaaagcacagtgttacgcttgcaagtttccatttgttttaataccacgcaatctttcacactcgtgcgtgtgcgcgcacacagagcttacctgacttgctctgcttgagtcatgcagttacaaaaaaaaagacatcttgacacccacacaatattctaatcaaaacctttcagtttcaatctggatatttaaaaacattggcagaagcttctgtgagtttagttccactaagatgtttcacctgccttatcaagaccattctcagtctacttttttaagctaccgtatcttaaattattgaaaatttattaattgctgaatatataataacctttgcttgtatgtaaccgaaaatggtttaagagccaacatttagagtatgacaatggagctgaacagtttttaatgcgcaagcagttctgttcttgtgtatgacttgtaaccttaatttactgtgtaaagatggttacattatttccttagctttgtttgttggagacaaatagagaatgcttgttaagtatgtcaaaacaatcttatcttgtgaatttttgttaatgtattatacgagctatatttttcatttgcccagaaagacagcttgtataacgcttttggaagtttctgctctgtaatgtctttagagctgacagtctgttaggtttgtttttttcttcatgctaaagtgtcagttggtggttttgtgaactggtcaaaaattcacaggtcttaaatgttttgggggaaatttatattggacactgctctttgtctagcaaataaaagatgttaatatattcctgttactggcatgtgcacgactatgttattagaagccactttatcattttcctgctttaaatagaaatgtctatttatgaattctgcttgtagttttttcacaaataaaatagtaaaatttaca

SEQ ID NO: 360184 - DNA, 4545 bp, Homo sapiens
  misc_feature (30)..(30): n is a, c, g, or t
gcggggactagtctcgtccggagactggcngcggcggcggcggcggcggccggagctcgagccccagcggctgagggcgggcgggcgggcgcgggggagggaggggggccggtccgcgacgactccccggacggcgtttctcctccgagcggcgccggtttcggcttggggggggcggggtacagcccatccatgaccatgggcgacaagaagagcccgaccaggccaaaaagacaagcgaaacctgccgcagacgaagggttttgggattgtagcgtctgcaccttcagaaacagtgctgaagcctttaaatgcagcatctgcgatgtgaggaaaggcacctccaccagaaaacctcggatcaattctcagctggtggcacaacaagtggcacaacagtatgccaccccaccaccccctaaaaaggagaagaaggagaaagttgaaaagcaggacaaagagaaacctgagaaagacaaggaaattagtcctagtgttaccaagaaaaataccaacaagaaaaccaaaccaaagtctgacattctgaaagatcctcctagtgaagcaaacagcatacagtctgcaaatgctacaacaaagaccagcgaaacaaatcacacctcaaggccccggctgaaaaacgtggacaggagcactgcacagcagttggcagtaactgtgggcaacgtcaccgtcattatcacagactttaaggaaaagactcgctcctcatcgacatcctcatccacagtgacctccagtgcagggtcagaacagcagaaccagagcagctcggggtcagagagcacagacaagggctcctcccgttcctccacgccaaagggcgacatgtcagcagtcaatgatgaatctttctgaaattgcacatggaattgtgaaaactatgaatcagggtatgaaattcaaaacctccacctgcccatgctgcttgcatccctggagaatcttctgtggacatcgacctcttagtgatgctgccaggataatttctgcttgccatgggcatctggccaccaaggaatttcgcaccctgacgattactcttgacacttttatgtattccattgttttatatgattttcctaacaatcatttataattggatgtgctcctgaatctactttttataaaaaaaaaaaaaatctgctgtgcacaattttccatgtacattacaactggttttttgtttttgttttgttgccggtggggagggctgggagggggagggaacttttatttattgtgttcacaaactccatcctttcagcatatccttttaagtttagttctttcttccagttatactatgtactatcagttttgatataactatatatatataaatataaaattatatataaagggttatttgaaaccaatccatggcaacgctggtgcttgatacactgtgaagtgaatacaacattgaacagttacagatctgggacagtcccttctatgaaagtgctgaaatttaattaaaatcagtcttacatgaagtatgttccaatccatgtgggaacttgactctctcatctgtctaaagagtactggacgatataaaaatatatattttttaaacaatgtgatctcaaatttaaagactgctccagatagcctgcatttgcaatggaataactgacaaatcacaagtggtttagttgggcagggctttgatcattcaaaagtaactaaagtagctccagaatgccaagtattcgtgtaaattacggttacatgttatcatttgctgttcttacataagcactcatgaaaatatggtattctgtaacttgaattccatccattttccagacgtctactcatgtctgaggtaaatctagaaattgtcttagttttaggattgaaacagtctataaactgtatttttggtccatccaggaagctagtcccttgtttctcctttctacatgacattgcagtggtggtttctgtaattaaaatttgtttgcctcatgtccctttgtctgataaaccttcactctaccgattcagttgtgagcattctttttttccttctcaaaacctactatgatttgttttactgaacaaaggttatcaaccacacatccagtcctgacatggagcttttcagtgtttggagacatttctcaatcccctgctgtggtaggaactccagtggtgaacggcttgcgcgcctgcagccagagttgcagggaaagctcgtacttactgcgagcagcatgtaatcttttttcttcctggacataaagatagcttgagtaaactgttctatttcattctcttcactctttttactgtcttgcaaaaaaaaaaaaaataataataataatcaaagaccactaataagattccacctctccttattaaaataattttttaaaattttgttttgcttttgtttggatgtggggtctctcttctatttgacttttacatttagatacagagtttgtagtacttcagagacatttcaagcatgagaatttgaggttacctctctttatttgacctttagggactcacgggagggcagcctgatttgtaatgaagcaccacattttggtgttaaaaacctggtttgcttaataatagcagtaatttctgtctgtggaggcaacaaataaaaaaattaacagcttgaattgagtagccaacaggaaaggttcctttcacatttacattaaaactattctgtagtcactaatgtaccataatttaaattcttttctcaaaggtatagattataaagcagtgccatttgttgctgtggtcctattctcaaatgcatggacaatgttcccccctttttaaaataatgcttgtgtctgggatgcaagctttgcttatctttttaaatacatttttaaagtatttattaatgaaccaaaggaaatcagatgctttctataagcatcagaatatataatacatagtgatttgactatgaattttaaatccacattttaatattggtgggatattgcaaagacattccttctaaagttttaatattccttttattaagggtctcagggagggtaaattagtcagccatatttattttccagaggtttaagaaattgctgtttttaactttttgaaaaaacttaaatgccaccaaactcatgtaggttgcactgcttattgaaccaataactgttggtatgcactttgttcagacacactgtgtactttttcaaaaactagtttcatgtaaagtgattggaccccatagattagtggaaaaagctgattaaccagctactcataggctgctaattcattcatgccaatgttttggtttttcagttttgcctccgtgataaattaaagaatggggaggggtgaaggaaggggaagaagattgctttagaacaagtggcatgaaattaccatctttgtagaaaccgcagctaacagtgggagttatctaagcaatcagatgttacagggccagccctttagctgctgtggtgtattctgttgggtagtgaggtagtaggtactttatagacttttaattttggaaattgatgacatccctcaggcatgtattctggaaatggaattcctgtaacttcctgtgtctgcagtatgccctacaattagtaggcagcgtgtaaaaacactagtgtagattataaagatatacattaaaagaggaccagaaatacttggtattcagtggcacagaaagcaggttaaacaaacaaaaagcacagtgttacgcttgcaagtttccatttgttttaataccacgcaatctttcacactcgtgcgtgtgcgcgcacacagagcttacctgacttgctctgcttgagtcatgcagttacaaaaaaaaagacatcttgacacccacacaatattctaatcaaaacctttcagtttcaatctggatatttaaaaacattggcagaagcttctgtgagtttagttccactaagatgtttcacctgccttatcaagaccattctcagtctacttttttaagctaccgtatcttaaattattgaaaatttattaattgctgaatatataataacctttgcttgtatgtaaccgaaaatggtttaagagccaacatttagagtatgacaatggagctgaacagtttttaatgcgcaagcagttctgttcttgtgtatgacttgtaaccttaatttactgtgtaaagatggttacattatttccttagctttgtttgttggagacaaatagagaatgcttgttaagtatgtcaaaacaatcttatcttgtgaatttttgttaatgtattatacgagctatatttttcatttgcccagaaagacagcttgtataacgcttttggaagtttctgctctgtaatgtctttagagctgacagtctgttaggtttgtttttttcttcatgctaaagtgtcagttggtggttttgtgaactggtcaaaaattcacaggtcttaaatgttttgggggaaatttatattggacactgctctttgtctagcaaataaaagatgttaatatattcctgtta

SEQ ID NO: 360185 - DNA, 4807 bp, Homo sapiens
  misc_feature (30)..(30): n is a, c, g, or t
  misc_feature (4678)..(4679): n is a, c, g, or t
  misc_feature (4681)..(4681): n is a, c, g, or t
  misc_feature (4689)..(4689): n is a, c, g, or t
  misc_feature (4692)..(4692): n is a, c, g, or t
  misc_feature (4694)..(4694): n is a, c, g, or t
  misc_feature (4699)..(4700): n is a, c, g, or t
  misc_feature (4704)..(4704): n is a, c, g, or t
gcggggactagtctcgtccggagactggcngcggcggcggcggcggcggccggagctcgagccccagcggctgagggcgggcgggcgggcgcgggggagggaggggggccggtccgcgacgactccccggacggcgtttctcctccgagcggcgccggtttcggcttggggggggcggggtacagcccatccatgaccatgggcgacaagaagagcccgaccaggccaaaaagacaagcgaaacctgccgcagacgaagggttttgggattgtagcgtctgcaccttcagaaacagtgctgaagcctttaaatgcagcatctgcgatgtgaggaaaggcacctccaccagaaaacctcggatcaattctcagctggtggcacaacaagtggcacaacagtatgccaccccaccaccccctaaaaaggagaagaaggagaaagttgaaaagcaggacaaagagaaacctgagaaagacaaggaaattagtcctagtgttaccaagaaaaataccaacaagaaaaccaaaccaaagtctgacattctgaaagatcctcctagtgaagcaaacagcatacagtctgcaaatgctacaacaaagaccagcgaaacaaatcacacctcaaggccccggctgaaaaacgtggacaggagcactgcacagcagttggcagtaactgtgggcaacgtcaccgtcattatcacagactttaaggaaaagactcgctcctcatcgacatcctcatccacagtgacctccagtgcagggtcagaacagcagaaccagagcagctcggggtcagagagcacagacaagggctcctcccgttcctccacgccaaagggcgacatgtcagcagtcaatgatgaatctttctgaaattgcacatggaattgtgaaaactatgaatcagggtatgaaattcaaaacctccacctgcccatgctgcttgcatccctggagaatcttctgtggacatcgacctcttagtgatgctgccaggataatttctgcttgccatgggcatctggccaccaaggaatttcgcaccctgacgattactcttgacacttttatgtattccattgttttatatgattttcctaacaatcatttataattggatgtgctcctgaatctactttttataaaaaaaaaaaaaatctgctgtgcacaattttccatgtacattacaactggttttttgtttttgttttgttgccggtggggagggctgggagggggagggaacttttatttattgtgttcacaaactccatcctttcagcatatccttttaagtttagttctttcttccagttatactatgtactatcagttttgatataactatatatatataaatataaaattatatataaagggttatttgaaaccaatccatggcaacgctggtgcttgatacactgtgaagtgaatacaacattgaacagttacagatctgggacagtcccttctatgaaagtgctgaaatttaattaaaatcagtcttacatgaagtatgttccaatccatgtgggaacttgactctctcatctgtctaaagagtactggacgatataaaaatatatattttttaaacaatgtgatctcaaatttaaagactgctccagatagcctgcatttgcaatggaataactgacaaatcacaagtggtttagttgggcagggctttgatcattcaaaagtaactaaagtagctccagaatgccaagtattcgtgtaaattacggttacatgttatcatttgctgttcttacataagcactcatgaaaatatggtattctgtaacttgaattccatccattttccagacgtctactcatgtctgaggtaaatctagaaattgtcttagttttaggattgaaacagtctataaactgtatttttggtccatccaggaagctagtcccttgtttctcctttctacatgacattgcagtggtggtttctgtaattaaaatttgtttgcctcatgtccctttgtctgataaaccttcactctaccgattcagttgtgagcattctttttttccttctcaaaacctactatgatttgttttactgaacaaaggttatcaaccacacatccagtcctgacatggagcttttcagtgtttggagacatttctcaatcccctgctgtggtaggaactccagtggtgaacggcttgcgcgcctgcagccagagttgcagggaaagctcgtacttactgcgagcagcatgtaatcttttttcttcctggacataaagatagcttgagtaaactgttctatttcattctcttcactctttttactgtcttgcaaaaaaaaaaaaaataataataataatcaaagaccactaataagattccacctctccttattaaaataattttttaaaattttgttttgcttttgtttggatgtggggtctctcttctatttgacttttacatttagatacagagtttgtagtacttcagagacatttcaagcatgagaatttgaggttacctctctttatttgacctttagggactcacgggagggcagcctgatttgtaatgaagcaccacattttggtgttaaaaacctggtttgcttaataatagcagtaatttctgtctgtggaggcaacaaataaaaaaattaacagcttgaattgagtagccaacaggaaaggttcctttcacatttacattaaaactattctgtagtcactaatgtaccataatttaaattcttttctcaaaggtatagattataaagcagtgccatttgttgctgtggtcctattctcaaatgcatggacaatgttcccccctttttaaaataatgcttgtgtctgggatgcaagctttgcttatctttttaaatacatttttaaagtatttattaatgaaccaaaggaaatcagatgctttctataagcatcagaatatataatacatagtgatttgactatgaattttaaatccacattttaatattggtgggatattgcaaagacattccttctaaagttttaatattccttttattaagggtctcagggagggtaaattagtcagccatatttattttccagaggtttaagaaattgctgtttttaactttttgaaaaaacttaaatgccaccaaactcatgtaggttgcactgcttattgaaccaataactgttggtatgcactttgttcagacacactgtgtactttttcaaaaactagtttcatgtaaagtgattggaccccatagattagtggaaaaagctgattaaccagctactcataggctgctaattcattcatgccaatgttttggtttttcagttttgcctccgtgataaattaaagaatggggaggggtgaaggaaggggaagaagattgctttagaacaagtggcatgaaattaccatctttgtagaaaccgcagctaacagtgggagttatctaagcaatcagatgttacagggccagccctttagctgctgtggtgtattctgttgggtagtgaggtagtaggtactttatagacttttaattttggaaattgatgacatccctcaggcatgtattctggaaatggaattcctgtaacttcctgtgtctgcagtatgccctacaattagtaggcagcgtgtaaaaacactagtgtagattataaagatatacattaaaagaggaccagaaatacttggtattcagtggcacagaaagcaggttaaacaaacaaaaagcacagtgttacgcttgcaagtttccatttgttttaataccacgcaatctttcacactcgtgcgtgtgcgcgcacacagagcttacctgacttgctctgcttgagtcatgcagttacaaaaaaaaagacatcttgacacccacacaatattctaatcaaaacctttcagtttcaatctggatatttaaaaacattggcagaagcttctgtgagtttagttccactaagatgtttcacctgccttatcaagaccattctcagtctacttttttaagctaccgtatcttaaattattgaaaatttattaattgctgaatatataataacctttgcttgtatgtaaccgaaaatggtttaagagccaacatttagagtatgacaatggagctgaacagtttttaatgcgcaagcagttctgttcttgtgtatgacttgtaaccttaatttactgtgtaaagatggttacattatttccttagctttgtttgttggagacaaatagagaatgcttgttaagtatgtcaaaacaatcttatcttgtgaatttttgttaatgtattatacgagctatatttttcatttgcccagaaagacagcttgtataacgcttttggaagtttctgctctgtaatgtctttagagctgacagtctgttaggtttgtttttttcttcatgctaaagtgtcagttggtggttttgtgaactggtcaaaaattcacaggtcttaaatgttttgggggaaatttatattggacactgctctttgtctagcaaataaaagatgttaatatattcctgttactggcatgtgcacgactatgttattagaagccactttatcattttcctgctttaaatagaaatgtctatttatgaattctgcttgtagttttttcacaaataaaatagtaaaatttacaccacaaacaacccnncnccacacanacnancccanncccnacaccaccccccacaccacaaacaacaaaacaacacagcagacagcacggaacacaacagggaactcagaaaacccaccaaagcacggcggcaggcggcacag

SEQ ID NO: 360186 - DNA, 4610 bp, Homo sapiens
  misc_feature (30)..(30): n is a, c, g, or t
gcggggactagtctcgtccggagactggcngcggcggcggcggcggcggccggagctcgagccccagcggctgagggcgggcgggcgggcgcgggggagggaggggggccggtccgcgacgactccccggacggcgtttctcctccgagcggcgccggtttcggcttggggggggcggggtacagcccatccatgaccatgggcgacaagaagagcccgaccaggccaaaaagacaagcgaaacctgccgcagacgaagggttttgggattgtagcgtctgcaccttcagaaacagtgctgaagcctttaaatgcagcatctgcgatgtgaggaaaggcacctccaccagaaaacctcggatcaattctcagctggtggcacaacaagtggcacaacagtatgccaccccaccaccccctaaaaaggagaagaaggagaaagttgaaaagcaggacaaagagaaacctgagaaagacaaggaaattagtcctagtgttaccaagaaaaataccaacaagaaaaccaaaccaaagtctgacattctgaaagatcctcctagtgaagcaaacagcatacagtctgcaaatgctacaacaaagaccagcgaaacaaatcacacctcaaggccccggctgaaaaacgtggacaggagcactgcacagcagttggcagtaactgtgggcaacgtcaccgtcattatcacagactttaaggaaaagactcgctcctcatcgacatcctcatccacagtgacctccagtgcagggtcagaacagcagaaccagagcagctcggggtcagagagcacagacaagggctcctcccgttcctccacgccaaagggcgacatgtcagcagtcaatgatgaatctttctgaaattgcacatggaattgtgaaaactatgaatcagggtatgaaattcaaaacctccacctgcccatgctgcttgcatccctggagaatcttctgtggacatcgacctcttagtgatgctgccaggataatttctgcttgccatatgtattccattgttttatatgattttcctaacaatcatttataattggatgtgctcctgaatctactttttataaaaaaaaaaaaaatctgctgtgcacaattttccatgtacattacaactggttttttgtttttgttttgttgccggtggggagggctgggagggggagggaacttttatttattgtgttcacaaactccatcctttcagcatatccttttaagtttagttctttcttccagttatactatgtactatcagttttgatataactatatatatataaatataaaattatatataaagggttatttgaaaccaatccatggcaacgctggtgcttgatacactgtgaagtgaatacaacattgaacagttacagatctgggacagtcccttctatgaaagtgctgaaatttaattaaaatcagtcttacatgaagtatgttccaatccatgtgggaacttgactctctcatctgtctaaagagtactggacgatataaaaatatatattttttaaacaatgtgatctcaaatttaaagactgctccagatagcctgcatttgcaatggaataactgacaaatcacaagtggtttagttgggcagggctttgatcattcaaaagtaactaaagtagctccagaatgccaagtattcgtgtaaattacggttacatgttatcatttgctgttcttacataagcactcatgaaaatatggtattctgtaacttgaattccatccattttccagacgtctactcatgtctgaggtaaatctagaaattgtcttagttttaggattgaaacagtctataaactgtatttttggtccatccaggaagctagtcccttgtttctcctttctacatgacattgcagtggtggtttctgtaattaaaatttgtttgcctcatgtccctttgtctgataaaccttcactctaccgattcagttgtgagcattctttttttccttctcaaaacctactatgatttgttttactgaacaaaggttatcaaccacacatccagtcctgacatggagcttttcagtgtttggagacatttctcaatcccctgctgtggtaggaactccagtggtgaacggcttgcgcgcctgcagccagagttgcagggaaagctcgtacttactgcgagcagcatgtaatcttttttcttcctggacataaagatagcttgagtaaactgttctatttcattctcttcactctttttactgtcttgcaaaaaaaaaaaaaataataataataatcaaagaccactaataagattccacctctccttattaaaataattttttaaaattttgttttgcttttgtttggatgtggggtctctcttctatttgacttttacatttagatacagagtttgtagtacttcagagacatttcaagcatgagaatttgaggttacctctctttatttgacctttagggactcacgggagggcagcctgatttgtaatgaagcaccacattttggtgttaaaaacctggtttgcttaataatagcagtaatttctgtctgtggaggcaacaaataaaaaaattaacagcttgaattgagtagccaacaggaaaggttcctttcacatttacattaaaactattctgtagtcactaatgtaccataatttaaattcttttctcaaaggtatagattataaagcagtgccatttgttgctgtggtcctattctcaaatgcatggacaatgttcccccctttttaaaataatgcttgtgtctgggatgcaagctttgcttatctttttaaatacatttttaaagtatttattaatgaaccaaaggaaatcagatgctttctataagcatcagaatatataatacatagtgatttgactatgaattttaaatccacattttaatattggtgggatattgcaaagacattccttctaaagttttaatattccttttattaagggtctcagggagggtaaattagtcagccatatttattttccagaggtttaagaaattgctgtttttaactttttgaaaaaacttaaatgccaccaaactcatgtaggttgcactgcttattgaaccaataactgttggtatgcactttgttcagacacactgtgtactttttcaaaaactagtttcatgtaaagtgattggaccccatagattagtggaaaaagctgattaaccagctactcataggctgctaattcattcatgccaatgttttggtttttcagttttgcctccgtgataaattaaagaatggggaggggtgaaggaaggggaagaagattgctttagaacaagtggcatgaaattaccatctttgtagaaaccgcagctaacagtgggagttatctaagcaatcagatgttacagggccagccctttagctgctgtggtgtattctgttgggtagtgaggtagtaggtactttatagacttttaattttggaaattgatgacatccctcaggcatgtattctggaaatggaattcctgtaacttcctgtgtctgcagtatgccctacaattagtaggcagcgtgtaaaaacactagtgtagattataaagatatacattaaaagaggaccagaaatacttggtattcagtggcacagaaagcaggttaaacaaacaaaaagcacagtgttacgcttgcaagtttccatttgttttaataccacgcaatctttcacactcgtgcgtgtgcgcgcacacagagcttacctgacttgctctgcttgagtcatgcagttacaaaaaaaaagacatcttgacacccacacaatattctaatcaaaacctttcagtttcaatctggatatttaaaaacattggcagaagcttctgtgagtttagttccactaagatgtttcacctgccttatcaagaccattctcagtctacttttttaagctaccgtatcttaaattattgaaaatttattaattgctgaatatataataacctttgcttgtatgtaaccgaaaatggtttaagagccaacatttagagtatgacaatggagctgaacagtttttaatgcgcaagcagttctgttcttgtgtatgacttgtaaccttaatttactgtgtaaagatggttacattatttccttagctttgtttgttggagacaaatagagaatgcttgttaagtatgtcaaaacaatcttatcttgtgaatttttgttaatgtattatacgagctatatttttcatttgcccagaaagacagcttgtataacgcttttggaagtttctgctctgtaatgtctttagagctgacagtctgttaggtttgtttttttcttcatgctaaagtgtcagttggtggttttgtgaactggtcaaaaattcacaggtcttaaatgttttgggggaaatttatattggacactgctctttgtctagcaaataaaagatgttaatatattcctgttactggcatgtgcacgactatgttattagaagccactttatcattttcctgctttaaatagaaatgtctatttatgaattctgcttgtagttttttcacaaataaaatagtaaaatttaca

SEQ ID NO: 360187 - DNA, 400 bp, Homo sapiens
  misc_feature (294)..(294): n is a, c, g, or t
  misc_feature (349)..(349): n is a, c, g, or t
  misc_feature (372)..(372): n is a, c, g, or t
acagattgggagaaatcaccacttgggggaactgggagtatgctgggctgtgtctgagctgcaaatattaaaggccacagacagaagcagccggcacttcccatctttgtaatccttactggaaagggccttgtggccctagggtgccccttccatctcgcattttctcagggtttccaggggcctctgagcagcttctgaagctccaaagctccgacttgacaccccctgggaaattgctttaatgctttcagcctgagggaaacttcaaattcagcccagttcagtccaatnctggaacttactcttggaagagccagagtaggaagtcttcacaagtcttcaaaanctgggggttggtctttaaaattnttgaggtaactttttatgttttgaggtt

SEQ ID NO: 360188 - DNA, 778 bp, Homo sapiens
aatgaacacaaatgaaaggaaggctgataaccatcattttactcgttacttccattttcttctacctcagtttaaaagatgtgataatatgtggtcaagttaatcatgcctggatgttgatgacacaactaaactcactgtggaatgctattgatttttcctcagtgaaaaatgtgattccagataaatatatagtgtctactttgcaaaggtggcgtttaaatgtgctgcgtttgaattttcgtggttgtcttctccgacccaaaactttcagatctgtcagccactgtaggaacttgcaagagttgaatgtctctgactgcccaacattcacagatgaatcaatgagacacatttctgagggctgcccgggggtcctgtgtctcaatctgtctaacacaactatcaccaacaggacgatgcgactcctgccgaggcacttccacaacttacagaatcttagtttggcttattgcagacggttcacagacaaaggcttacagtacctgaacttggggaatggatgccacaagctcatctatctggacctctctggctgcacccagatttcagtccaaggcttcaggtacattgcaaacagctgcactggaattatgcatcttaccattaatgacatgccaactctgacggacaactgtgtaaaagctttagttgaaaaatgctctcgtattacatcgctggttttcactggtgcaccgcatatctccgattgtactttcagagctctttctgcttgtaaactcagaaagatccgatt

SEQ ID NO: 360189 - DNA, 1574 bp, Homo sapiens
cgggacaacgcccgcacgcgcccggcccctagtcccagcgcggggagggtactatcgcagcttctccgtcaggccttgggccatggcctcgctacgcaatgccaacccgaggctgaagaactacttcaaggagaactacattcctcaggtctgcgaggcactgttatgtggtatacttgttacatgtcctgaggatccgctgaggtatttagagggaatgatcatggttataatcaaaagtggtcttcagaatcttctttgggatatgtgcattactccatcaatgaaaccaaacattcgaagattgtctgaaacttacctggaacaactttttgaattggatgatcagctgatgactccggaattgatgataaaagcctgtagcttttatactggacatttagtaaagactcatttttgcacttggagagacatagctcgtacaaatgaaaatgtcgtcctggctgaaaaaatgaacagagcagtgacatgctacaatttcagacttcaaaaatctgtatttcatcactggcactcttatatggaagaccagaaagaaaaacttaaaaatatgctattgcggatacaacagatcatctattgtcacaagctaaccattatcctaacaaaatggcggaatacagcaagacataagagtaacaaagaaagaagatgagctgatattaaaacatgaacttcaattgaacaacttggaacactaggttaatactcaaaagagctgctgcagaagaatccaattttcctgaacgaagttcttctgaagtctttcttgtagatgagactctaaaatgtgacatttcactgttacctgaaagagcaatattacagattttcttctacctcagtttaaaagatgtgataatatgtggtcaagttaatcatgcctggatgttgatgacacaactaaactcactgtggaatgctattgatttttcctcagtgaaaaatgtgattccagataaatatatagtgtctactttgcaaaggtggcgtttaaatgtgctgcgtttgaattttcgtggttgtcttctccgacccaaaactttcagatctgtcagccactgtaggaacttgcaagagttgaatgtctctgactgcccaacattcacagatgaatcaatgagacacatttctgagggctgcccgggggtcctgtgtctcaatctgtctaacacaactatcaccaacaggacgatgcgactcctgccgaggcacttccacaacttacagaatcttagtttggcttattgcagacggttcacagacaaaggcttacagtacctgaacttggggaatggatgccacaagctcatctatctggacctctctggctgcacccagatttcagtccaaggcttcaggtacattgcaaacagctgcactggaattatgcatcttaccattaatgacatgccaactctgacggacaactgtgtaaaagctttagttgaaaaatgctctcgtattacatcgctggttttcactggtgcaccgcatatctccgattgtactttcagagctctttctgcttgtaaactcagaaagatccgatt

SEQ ID NO: 360190 - DNA, 1483 bp, Homo sapiens
cgggacaacgcccgcacgcgcccggcccctagtcccagcgcggggagggtactatcgcagcttctccgtcaggccttgggccatggcctcgctacgcaatgccaacccgaggctgaagaactacttcaaggagaactacattcctcaggtctgcgaggcactgttatgtggtatacttgttacatgtcctgaggatccgctgaggtatttagagggaatgatcatggttataatcaaaagtggtcttcagaatcttctttgatgactccggaattgatgataaaagcctgtagcttttatactggacatttagtaaagactcatttttgcacttggagagacatagctcgtacaaatgaaaatgtcgtcctggctgaaaaaatgaacagagcagtgacatgctacaatttcagacttcaaaaatctgtatttcatcactggcactcttatatggaagaccagaaagaaaaacttaaaaatatgctattgcggatacaacagatcatctattgtcacaagctaaccattatcctaacaaaatggcggaatacagcaagacataagagtaacaaagaaagaagatgagctgatattaaaacatgaacttcaattgaacaacttggaacactaggttaatactcaaaagagctgctgcagaagaatccaattttcctgaacgaagttcttctgaagtctttcttgtagatgagactctaaaatgtgacatttcactgttacctgaaagagcaatattacagattttcttctacctcagtttaaaagatgtgataatatgtggtcaagttaatcatgcctggatgttgatgacacaactaaactcactgtggaatgctattgatttttcctcagtgaaaaatgtgattccagataaatatatagtgtctactttgcaaaggtggcgtttaaatgtgctgcgtttgaattttcgtggttgtcttctccgacccaaaactttcagatctgtcagccactgtaggaacttgcaagagttgaatgtctctgactgcccaacattcacagatgaatcaatgagacacatttctgagggctgcccgggggtcctgtgtctcaatctgtctaacacaactatcaccaacaggacgatgcgactcctgccgaggcacttccacaacttacagaatcttagtttggcttattgcagacggttcacagacaaaggcttacagtacctgaacttggggaatggatgccacaagctcatctatctggacctctctggctgcacccagatttcagtccaaggcttcaggtacattgcaaacagctgcactggaattatgcatcttaccattaatgacatgccaactctgacggacaactgtgtaaaagctttagttgaaaaatgctctcgtattacatcgctggttttcactggtgcaccgcatatctccgattgtactttcagagctctttctgcttgtaaactcagaaagatccgatt

SEQ ID NO: 360191 - DNA, 1583 bp, Homo sapiens
cagggcccgggcagacacgccccctcaccgccgctccgccgccgattaggtttgaggaagcttcgcactccgctttcgaggccagcggaggcggggggcggggatggacacgccccctccctgtctcccaccgatgattggcgcacggaactccgccttgggtttggaaggctcgcctgggagctcatacctggctggggccgaggattggctgttccggggctagggagcgctttctcccgggaaccgcggctgtgacccaagtggcccggaccagtttggggctgcgtgcggcctgcctcaagcaaccaggtacgtaggtcggcggcccagctcggcgctgcggtgggagccggagggcgacagtcagagccggggtgccagcgggacgcgaccgccagatccacttaggaccccgtcgttctgcgaagcggccacgtctgagtcccggggcctcctcgtgctgcagatgtcgccttaggacctcggccaggataccctctgccatgctcttgtgctgcccgtgatcaccgactggcccttgtaagcaccttcgcagcaggaagcccagagctgcgcctgccctttctgaaggctgtggaagaggttggagtgggcgcatcttagcttgccccatccccatttgaggtctgtcggagctgcccttcagtgtgagcatccacaatgggtaccccagcctcggtggtcagtgagccacccccttggcaggccccgattgaggcccggggccgcaagcaggcctcggccaacatcttccaggacgccgagctgctgcagatccaagccctgtttcaacgcagcggggaccagctggccgaggaacgggcacagatcatctgggaatgtgcaggggaccaccgtgtggctgaggccctcaagaggctgcgcaggaagaggcccccaaggcagaaacccctgggccactcgctacaccactgcagccgcctcagaatcctggagccccactctgcactggccaacccacagagtgccacagagacagcctccagtgagcagtatctgcactctaggaagaaaagtgccaggatccgccggaactggaggaagtcaggccccacaagctacctccaccagatcagacactgatccagggaaagagccaggaatggcagtgtcttccctcttgccaaaaggcctggggaggtgaaggaagagagactttaggcaagcagcccaaaggggtaaatgaaagcaagaggctgctgccactgacctgctccattcagaacaagactggatgcttctgttgagctctccattatgtgggacccattcctcaccaaaatgaggagagacagtgactgttcctgccacagtccttcccagtctaacactattcctgggctgcatgatattcccctgggagcaaagtgacaggcacttagatgcagcatttcaccactcatgctactaatcatctacctgctactactgtaaaccatggttccagcagcctgttccacacccccacaccatcaggatagcacagggaaactgtagtttaagtggcaaataaaaacatttgcatcaaaaaaaaaaaa

SEQ ID NO: 360192 - DNA, 1411 bp, Homo sapiens
  misc_feature (20)..(20): n is a, c, g, or t
  misc_feature (22)..(22): n is a, c, g, or t
  misc_feature (25)..(25): n is a, c, g, or t
  misc_feature (28)..(28): n is a, c, g, or t
aacttgttgactagtcgagncnggntgntagaggattggctgttccggggctagggagcgctttctcccgggaaccgcggctgtgacccaagtggcccggaccagtttggggctgcgtgcggcctgcctcaagcaaccaggtacgtaggtcggcggcccagctcggcgctgcggtgggagccggagggcgacagtcagagccggggtgccagcgggacgcgaccgccagatccacttaggaccccgtcgttctgcgaagcggccacgtctgagtcccggggcctcctcgtgctgcagatgtcgccttaggacctcggccaggataccctctgccatgctcttgtgctgcccgtgatcaccgactggcccttgtaagcaccttcgcagcaggaagcccagagctgcgcctgccctttctgaaggctgtggaagaggttggagtgggcgcatcttagcttgccccatccccatttgaggtctgtcggagctgcccttcagtgtgagcatccacaatgggtaccccagcctcggtggtcagtgagccacccccttggcaggccccgattgaggcccggggccgcaagcaggcctcggccaacatcttccaggacgccgagctgctgcagatccaagccctgtttcaacgcagcggggaccagctggccgaggaacgggcacagatcatctgggaatgtgcaggggaccaccgtgtggctgaggccctcaagaggctgcgcaggaagaggcccccaaggcagaaacccctgggccactcgctacaccactgcagccgcctcagaatcctggagccccactctgcactggccaacccacagagtgccacagagacagcctccagtgagcagtatctgcactctaggaagaaaagtgccaggatccgccggaactggaggaagtcaggccccacaagctacctccaccagatcagacactgatccagggaaagagccaggaatggcagtgtcttccctcttgccaaaaggcctggggaggtgaaggaagagagactttaggcaagcagcccaaaggggtaaatgaaagcaagaggctgctgccactgacctgctccattcagaacaagactggatgcttctgttgagctctccattatgtgggacccattcctcaccaaaatgaggagagacagtgactgttcctgccacagtccttcccagtctaacactattcctgggctgcatgatattcccctgggagcaaagtgacaggcacttagatgcagcatttcaccactcatgctactaatcatctacctgctactactgtaaaccatggttccagcagcctgttccacacccccacaccatcaggatagcacagggaaactgtagtttaagtggcaaataaaaacatttgcatcaaaaaaaaaaaa

SEQ ID NO: 360193 - DNA, 1363 bp, Homo sapiens
cagggcccgggcagacacgccccctcaccgccgctccgccgccgattaggtttgaggaagcttcgcactccgctttcgaggccagcggaggcggggggcggggatggacacgccccctccctgtctcccaccgatgattggcgcacggaactccgccttgggtttggaaggctcgcctgggagctcatacctggctggggccgaggattggctgttccggggctagggagcgctttctcccgggaaccgcggctgtgacccaagtggcccggaccagtttggggctgcgtgcggcctgcctcaagcaaccaggtacgtaggtcggcggcccagctcggcgctgcggtgggagccggagggcgacagtcagagccggggtgccagcgggacgcgaccgccagatccacttaggaccccgtcgttctgcgaagcggccacgtctgagtcccggggcctcctcgtgctgcagatgtcgccttaggacctcggccaggataccctctgccatgctcttgtgctgcccgtgatcaccgactggcccttgtaagcaccttcgcagcaggaagcccagagctgcgcctgccctttctgaaggctgtggaagaggttggagtgggcgcatcttagcttgccccatccccatttgaggtctgtcggagctgcccttcagtgtgagcatccacaatgggtaccccagcctcggtggtcagtgagccacccccttggcaggccccgattgaggcccggggccgcaagcaggcctcggccaacatcttccaggacgccgagctgctgcagatccaagccctgtttcaacgcagcggggaccagctggccgaggaacgggcacagatcatctgggaatgtgcaggggaccaccgtgtggctgaggccctcaagaggctgcgcaggaagaggcccccaaggcagaaacccctgggccactcgctacaccactgcagccgcctcagaatcctggagccccactctgcactggccaacccacagagtgccacagagacagcctccagtgagcagtatctgcactctaggaagaaaagtgccaggatccgccggaactggaggaagtcaggccccacaagctacctccaccagatcagacactgatccagggaaagagccaggaatggcagtgtcttccctcttgccaaaaggcctggggaggtgaaggaagagagactttaggcaagcagcccaaaggggtaaatgaaagcaagaggctgctgccactgacctgctccattcagaacaacgagctgcggaaggactgtggcaggaacagtcactgtctctcctcattttggtgaggaatgggtcccacataatggaggctcaacagaag

SEQ ID NO: 360194 - DNA, 1273 bp, Homo sapiens
ttaagcctaattaaaatcttggctgggggattacagagaatatagcctaggaatgtactgtcgaggcattatgggttaaaaattgttgaaaacttttaccttgagatctctccccagtctccctggtgggccacttctttgcctaggccactgccagcccaggaagagtgaacccaaagggatggagctgaaccacttggcctcaaccaatcactatgggtgatgctctgggcttcatctctctgctgccttctctggggcccacaatcagaacatcagacctaaacaggcctttggaggtcatcaggtcctgagatggcaagtcagtgtcatagcttgtatttaactccagttaattagtagtcactgcttatcaaaccagtttaatagcatgacttatgacatctgccatgagtacaggatgaggatgaagaaatgttgagttttgcacaacctgatctggtccaaccctttctactgcagagaaatctgtaaactttgtctagtcagacagttctcagagggggaaagaccagagcagagccccgctctcattttgctccaaatcatatgttttatggtccaccatgacgaaatctcttgaagtccccattccattcttcctattgatgttggctaatcatacacttgttctctgcagaatcctggagccccactctgcactggccaacccacagagtgccacagagacagcctccagtgagcagtatctgcactctaggaagaaaagtgccaggatccgccggaactggaggaagtcaggccccacaagctacctccaccagatcagacactgatccagggaaagagccaggaatggcagtgtcttccctcttgccaaaaggcctggggaggtgaaggaagagagactttaggcaagcagcccaaaggggtaaatgaaagcaagaggctgctgccactgacctgctccattcagaacaagactggatgcttctgttgagctctccattatgtgggacccattcctcaccaaaatgaggagagacagtgactgttcctgccacagtccttcccagtctaacactattcctgggctgcatgatattcccctgggagcaaagtgacaggcacttagatgcagcatttcaccactcatgctactaatcatctacctgctactactgtaaaccatggttccagcagcctgttccacacccccacaccatcaggatagcacagggaaactgtagtttaagtggcaaataaaaacatttgcatcaaaaaaaaaaaa

SEQ ID NO: 360195 - DNA, 1018 bp, Homo sapiens
cagggcccgggcagacacgccccctcaccgccgctccgccgccgattaggtttgaggaagcttcgcactccgctttcgaggccagcggaggcggggggcggggatggacacgccccctccctgtctcccaccgatgattggcgcacggaactccgccttgggtttggaaggctcgcctgggagctcatacctggctggggccgaggattggctgttccggggctagggagcgctttctcccgggaaccgcggctgtgacccaagtggcccggaccagtttggggctgcgtgcggcctgcctcaagcaaccaggtacgtaggtcggcggcccagctcggcgctgcggtgggagccggagggcgacagtcagagccggggtgccagcgggacgcgaccgccagatccacttaggaccccgtcgttctgcgaagcggccacgtctgagtcccggggcctcctcgtgctgcagatgtcgccttaggacctcggccaggataccctctgccatgctcttgtgctgcccgtgatcaccgactggcccttgtaagcaccttcgcagcaggaagcccagagctgcgcctgccctttctgaaggctgtggaagaggttggagtgggcgcatcttagcttgccccatccccatttgaggtctgtcggagctgcccttcagtgtgccaggtggaagcccgggacaagtggactcttggtggctggactggaaggggaccggcggggaccagcctggaccagctgaccagagggctgcacatctctgctctgcagccgggcaagcagaggacatgcagccatagtcctcactccctttctttggttgtttttcaaaccttcaagatagttactttctgaggttgactgaccaatcgcaaggtgccagaattgtgaaatgtccagtagcacagggcatgaacacagctgcccctccagacacagatggcaccctttttactccctcctgaggccgtactttgctttggtgtagaaatggctcaaacacctg

SEQ ID NO: 360196 - DNA, 394 bp, Homo sapiens
tacagagtgggcttccaggagagaggtgcccaatgtcatagaagtttgacagggcaaaattacttgcagttaaaacggtcacagagtacctcaagagctggcacctgagcagtccaaattgtaggaagtgtgtgttaatgaccatttacattcctacctgcaggaatcggcaaagctgtcagggaagaagtgggtgattagcacatgtgcactgtggtcttgttccatctggttaggcctgaggaccaagggatgttttctgtatccagcacctggcctaacattgctaaaaaactgtcactatagcccttcaatctgagcacccttcagaaacccaaaacttttattgttatagcagtcctcaaaatatcattcgaatcacatagaactgtat

SEQ ID NO: 360197 - DNA, 358 bp, Homo sapiens
tttttcttgtacttaatttcaacctgataagttattataaatatttggagtagcagtggtgaagaaaatccggtgctaattttgttcatgccctgtgagctacaaaatatcagttaaggcccatgtagggccttaaattttgggtgtacttaaatttatttgtgcatttaaataagtgtactaaaattatgtagaaagactgtccatttgacttaacttttttcacaacttgtgatggcaaattaaatgtatagtgaccacatactgacaaacaatgaacttttaggtgtatgttgggatttgtaagtgagatttggattatatttagattatgttaatcccccccccatgagacata

SEQ ID NO: 360198 - DNA, 254 bp, Homo sapiens
attaaaataataaaattgtttaatatttatgaaaggcctttatattccaaagtgctcaaatttaaccacgactttaaattactatatcagacatggtatttttcttactggtttttgaaaaggacttgtaagttatgaatgcactattttaggctttgttcagcaggcagtgaaatctctttagttcataatgcatggttcagtgttctttaatattttgcaataaatcttagcagccagtgagaacttaaaga

SEQ ID NO: 360199 - DNA, 4424 bp, Homo sapiens
agcggagtgcggagccttaggcggagcgaagagaaccggtcgcggcaatcctagcgcgcagcagcagcagcagcagcagcacccgcatccgctgcgggagtccgagccggaaccacacccaagtagctgccctttcctcttctgtcatctcaccgccccaccacagaccgcgttccccgaggaaaccggccgcccacgcccggagcatcctcccctgttgagcgggcgctgacggacccggcggcatgatgcggctgcgaggctcggggatgctgcgggacctgctcctgcggtcgcccgccggcgtgagcgcgactctgcggcgggcacagcccttggtcaccctgtgccggcgtccccgaggcgggggacggccggccgcgggcccggctgccgccgcgcgactccacccgtggtggggcgggggcggctggccggcggagcccctcgcgcggggcctgtccagctctccttcggagatcttgcaggagctgggcaaggggagcacgcatccgcagcccggggtgtcgccacccgctgccccggcggcgcccggccccaaggacggccccggggagacggacgcgtttggcaacagcgagggcaaagagctggtggcctcaggtgaaaataaaataaaacagggtctgttacctagcttggaagatttgctgttctatacaattgctgaaggacaagagaaaatacctgttcataaatttattacagcactcaaatctacaggattgcgaacgtctgatcccaggttgaaagagtgtatggatatgttaagattaactcttcaaacaacatcagatggtgtcatgctagacaaagatctttttaaaaaatgtgttcagagcaacattgttttgttgacacaagcatttagaagaaagtttgtgattcctgactttatgtcttttacctcacacattgatgagttatatgaaagtgctaaaaagcagtctggaggaaaggttgcagattatattcctcaactggccaaattcagtcccgatttgtggggtgtgtctgtttgtacagtagatggacagaggcattctactggagataccaaagttcccttctgtcttcagtcctgtgtaaaacctttgaaatatgccattgctgttaatgatcttggaactgaatatgtgcatcgatatgttggaaaagagccgagtggactaagattcaacaaactatttttgaatgaagatgataaaccacataatcctatggtaaatgctggagcaattgttgtgacttcactaataaagcaaggagtaaataatgctgaaaaatttgactatgtcatgcagtttttgaataagatggctggtaatgaatatgttggattcagtaatgcaacgtttcagtctgaaagagaaagtggagatcgaaattttgcaataggatattacttaaaagaaaagaagtgttttccagaaggcacagacatggttggtatattagacttctacttccagctgtgctccattgaagtgacttgtgaatcagccagtgtgatggctgcgacactggctaatggtggtttctgcccaattactggtgaaagagtactgagccctgaagcagttcgaaatacattgagtttgatgcattcctgtggcatgtatgacttctcagggcagtttgctttccatgttggtcttcctgcaaaatctggagttgctgggggcattcttttagttgtccccaatgttatgggtatgatgtgctggtctcctcctctggataagatgggcaacagtgttaagggaattcacttttgtcacgatcttgtttctctgtgtaatttccataactatgataatttgagacactttgcaaaaaaacttgatcctcgaagagaaggtggtgatcaaaggcattcctttggaccattggactatgaaagtctccaacaagaacttgctttaaaagagacagtatggaaaaaagtgtcacctgagtcaaatgaggacatctctacaactgtagtatatagaatggaaagtctgggagagaaaagctaaagaaatgggttctagtttcagaatgtttcttcatttaatctttcaaacatctttagcttttttttgcaagttataaatatttatttgaggtattttttgttctcaatcttgggtgctggagccataaagcttttttttccttttaatctttgtataaaggcagtagattaagaagtgcatttgttggtctttaaaaagtatttacaagtacataaatttgctttatttttaaaaatacaaaaaggaaaaatttaaattttttttgatgtaattaaaatgttaactatgtggtcagataatcccattttacaatagtaacagaaaattgtaattcttagttctaaaattcacaaattaaactcataagtttgttgcattttgttttttcttttccatttttaaaactaatgtgatgtctttagtggcaatagaaggtacttctatgctaaatacaaaactaaaaaggcaaaataatgaaccccaaattattttatttaaaatagcagtggattataaaattagcttgtgtttacatttatgccatttttggtgatagattggctttacattttaaaaaatttatttaaaaatttatcaaatgctttaaaatatgactcctactttttttattttgcaactcctctgttctgtcagagttgttatatacaggagtgtcttatgttactaaaacattccagccaaagaatttcagatgtgagataatgatgtttcatcaataaaaagctataatggttagttactcagaaggagaaacagtgagtgtcttcaagtgaattgttcacctaaacaattttattttcatattatccacataactttttctatgttatatttaaatatgaatggcaaattttggtttttagcttttacattttattatcttaattttataaatgctaatatttcttttgtgataagttatagcatctcataaagtttgttctatttgaagttttttagagtacttgagaaatgaatttagtctgcaggtagtaagtatgctactaaaatacgttagatctaaatccttttatttggtataaaaatgcaatattgagaatcaaaacttgtttttaagagaactatagattctacacaacctgatttcaagtaattattcatagtatttatagttgtcttggcaaagtgattgtaaaattctgtaggacctattcacacttcttccttcttccatatacttctctggttttccccatagttcccctataatttcaagtttgttgaaacctgttaattttagtgggggattagaagaaaaacttggtggtttcttagcatgatggtgtatgtatgtggtaatggaaagtctgtaaaagtaaatatagtgtagcaaaaaagatttcactgagtattttagatactagtgcaaataaagatagaaaatcttgatcataatgtcttaagtttgggaactgtgatattaagaaaagaaattcccttctagaggtgctggccaaaaagccttttgggctaacttaagtattaaatttatatatttaaataattatattttaagttgtagaggattttcccaaggattttatgcttacttgaatgttctttgaatgttcagatgcatatcctaactggatgcttctcaaggccttactgcatatttgtgttgcatatttatgttagttgcaccagggccatttgtagtttgggcaaccgaatgccttaattggaaaaaaggcattgtggtttcccctatgatctaaattgttacattttaccatttcattccgaagttggttttactttattaaatgaagatttagttttcatatcgtatacatagctgtatagatttcaaaattaggttgttaatttgtgtcacttactatttttgtgttggtaatgctttaaatgcatacttaaaaatgaagtactgttatctaagctactgtgtttagaaaatgttaagaatgagcagaaatttttatagaaaagtataaacggaagaagagataagatactgcgaataggccctcaaacttaaaaaagaaaaaactttgccagttttaaggacatattttgattctttcagtattcttaacacctttttaaacaaagttcttgatagtacccactattattgggtttgttttatgccattattgattcttgatattcaagcatttacaatgtagcatatttgattttcttttttctttctttttttggcatgtttttagcataaatgttgtgcattttatcttagtgtttggatgaaaacatttgtgttgtttagctttcatttgctttgtatatttaataatgtacctttattttccagtatgcctacattttgtattgcacaataaatttattttaagctga

SEQ ID NO: 360200 - DNA, 577 bp, Homo sapiens
aattttatcagcatacagacttcctcacaatattgagacatagaaaatgggaaggcttctaaacaattttcagttgccccaactgtatgagtttcacaaaattccattctcttctgccaagtgatattattccattccttccctcgtgtatcttatctttattattgaattttccctcacaatccactgttaaaagaagaaagtatcacacacgtgggttcttttggctatggaagtgtccttgagatcactttttgcacgtgactcagctgaagtgttcaaagcacatggaaatcacttgccagtgacaggtggacgttgtatgtgttttctctctcctaaggatgcctaaactttcttttcttcacaggtaaagtcagtgataaatcttttgtttgctgcatatactggagatgtgtctgcacttcgaaggtatgtttacaggatggattagcatgcactttacagatatttatgaagttgcttctgggcgagcagccattttaaggttaaagtctcacttttctttccctttgataaaaatgaccccaacaagaataaagtttattaaattaaa

SEQ ID NO: 360201 - DNA, 448 bp, Homo sapiens
ttggaagtttgatttatagaacctcatcccttctgcttttaaggcaatccagtgtacaaggttggtcttcctgcaaaatctggagttgctgggggcattcttttagttgtccccaatgttatgggtatgatgtgctggtctcctcctctggataagatgggcaacagtgttaagggaattcacttttgtcacgatcttgtttctctgtgtaatttccatttgatgctgttgtctgtctggcagggactgaatgacctgatgtcagatttagattcttcctggggattacacagctatgaatgtatttgcttctaaaacctcccaaagtgaatctaatcttaaaactacaagttgtaagtattctgaaattgggaaacatttattttaaatgcaatcaggtagtgttgctttttacagcataataaatatatgtatcaaaaaaaaaaat

SEQ ID NO: 360202 - DNA, 410 bp, Homo sapiens
tcaacatatgggtattaaataacatgaaaaaaagtttatataaatgttaaattactttagaactatttcctagatttaaaaatactaatgcagtatattataatagtagctttgaaattttgatattggcttgaaacttaactgtagtggtacctatattaacgtatttatgtctcttatttttttgcagcaaggagtaaataatgctgaaaaatttgactatgtcatgcagtttttgaataagatggctggtaatgaatatgttggattcagtaatgcaacgtttcagtctgaaagagaaagtggaaggaaaagagtgctgagaaatggctctgtataatctatggctatccgaattctctgaaaaaataataaaagtcccctctattatatgagcctgtacagaaaaa

SEQ ID NO: 360203 - DNA, 4848 bp, Homo sapiens
agcggagtgcggagccttaggcggagcgaagagaaccggtcgcggcaatcctagcgccgcagcagcagcagcagcagcagcagcagcagcagcagcagcagcagcacccgcatccgctgcgggagtccgagccggaaccacacccaagtagctgccctttcctcttctgtcatctcaccgccccaccacagaccgcgttccccgaggaaaccggccgcccacgcccggagcatcctcccctgttgagcgggcgctgacggacccggcggcatgatgcggctgcgaggctcggggatgctgcgggacctgctcctgcggtcgcccgccggcgtgagcgcgactctgcggcgggcacagcccttggtcaccctgtgccggcgtccccgaggcgggggacggccggccgcgggcccggctgccgccgcgcgactccacccgtggtggggcgggggcggctggccggcggagcccctcgcgcggggcctgtccagctctccttcggagatcttgcaggagctgggcaaggggagcacgcatccgcagcccggggtgtcgccacccgctgccccggcggcgcccggccccaaggacggccccggggagacggacgcgtttggcaacagcgagggcaaagagctggtggcctcaggtgaaaataaaataaaacagggtctgttacctagcttggaagatttgctgttctatacaattgctgaaggacaagagaaaatacctgttcataaatttattacagcactcaaatctacaggattgcgaacgtctgatcccaggttgaaagagtgtatggatatgttaagattaactcttcaaacaacatcagatggtgtcatgctagacaaagatctttttaaaaaatgtgttcagagcaacattgttttgttgacacaagcatttagaagaaagtttgtgattcctgactttatgtcttttacctcacacattgatgagttatatgaaagtgctaaaaagcagtctggaggaaaggttgcagattatattcctcaactggccaaattcagtcccgatttgtggggtgtgtctgtttgtacagtagatggacagaggcattctactggagataccaaagttcccttctgtcttcagtcctgtgtaaaacctttgaaatatgccattgctgttaatgatcttggaactgaatatgtgcatcgatatgttggaaaagagccgagtggactaagattcaacaaactatttttgaatgaagatgataaaccacataatcctatggtaaatgctggagcaattgttgtgacttcactaataaagcaaggagtaaataatgctgaaaaatttgactatgtcatgcagtttttgaataagatggctggtaatgaatatgttggattcagtaatgcaacgtttcagtctgaaagagaaagtggagatcgaaattttgcaataggatattacttaaaagaaaagaagtgttttccagaaggcacagacatggttggtatattagacttctacttccagctgtgctccattgaagtgacttgtgaatcagccagtgtgatggctgcgacactggctaatggtggtttctgcccaattactggtgaaagagtactgagccctgaagcagttcgaaatacattgagtttgatgcattcctgtggcatgtatgacttctcagggcagtttgctttccatgttggtcttcctgcaaaatctggagttgctgggggcattcttttagttgtccccaatgttatgggtatgatgtgctggtctcctcctctggataagatgggcaacagtgttaagggaattcacttttgtcacgatcttgtttctctgtgtaatttccataactatgataatttgagacactttgcaaaaaaacttgatcctcgaagagaaggtggtgatcaaagggtaaagtcagtgataaatcttttgtttgctgcatatactggagatgtgtctgcacttcgaagatttgctttgtcagctatggacatggaacagcgggactatgattctagaacagcactccatgtagctgctgcagagggtcatgttgaagttgttaaatttttgctggaagcctgcaaagtaaaccctttccccaaggacaggtggaataacactcccatggatgaagcactgcactttggacaccatgatgtatttaaaattctccaagaataccaagtccagtacacacctcaaggagattctgacaacgggaaggaaaatcaaaccgtccataagaatcttgatggattgttgtaatggtctcaaatcccaagatttaaatcacttacctatttaattgtggaaaatgattatgaagaacatgtgtatttctatctggtagtgatgtatattttacatttgtcatttcagtgttactggagttttcttcattgtgcacacaggacaaatctgatctctttgggaaaaaatagaaataaaacaatctccctccataatgtgagcaatattacctcgtgcattgtataatttgatgtaaaagaaatagttaccaatgctagcttgtgtggtcttccatgatttatttgtgttttgtgaattttcaatttatggtgatgatctgctgatatgcatttataaagtaagctctgttgtacagtctgtccaaatgggtcaaggttgcctttagaagcaaatagtgtgattttcaagacttcaaatacaaatttagtttaagtgtttgaacaactatatgcacttacggttgtgtgtttaaaatgtctctctctcaccctagcttcatgatgtgactcttaaaaaactataatagttaacaactgttagtaagatagaccaattctgattagactttatcagggaatctgtttaagatatgtttggtgaccaaaacgtatgtgtgaatgtagttataatgcttttgaaaaattttcctttttctatatccccttagtccagcctctcttctcagacatttagctatctgcctctttcctttagctgggaaagtgagagctggcatactatgcagtttttatgttttccatagtaagtcagaaaatgcctcctatttctggcatcagaactttgccatttgtctacagaagacgaaccagagacaaaattactaagtataaattagtcaagtttatcagtctaaaaagcgaagggatgtgcaactgcagctctttaagaagttttttttttttagcttctagggtaaagataaattcagaaatgctctaagctaccaaagttattctgaaagtatgggaactgctacaactaacaaacatttgtttccaagcctgtcattaagagtctgcatcaagagatttgtcctccttgggggaccactggatcattccagatttcttgtgatttttctattgtgtaattcttggtgggctctgtagtttaataataagaaaaaggccatttcattttaaattgtgacctataattctttgtcttgggttggtaattcaggattcatttggaaagtgggtaaaaggggcttcaaaaaacggatagaacaggattttctaggagttacacatacattttatcctgtcatacctcgagataaagtggcatgttagtgaggagttctgatattaagcacacacacacatgcacacaaatggacttctctgaagctgtgtttagtgaaatgagctcaagtacatgaatgttagttgttatcacatacagcaaattcctttttttttctttttctatgagcacactctgctgcttctaaactttacatgcctgatggcaccttactccagcagcctccaggtgctttcattttcacttccagtctaagccagtggctcctgccactgccctcccattacctagatggcacctcctttggtgaaaccacggccaatgttccttagctgcaccaggcccgaagctgttcccatgcttgagcttccatggggaggatgctgagtgagcagtttcctaccccgtggatctagcaagccatggagacaggtagcatttgtaagatgctgcacaggagcagcattatccccaaagatattacagggtagacacgttttaactgaaatcaatcaagataactttattcaaagagcagcccgctttgtgtgactaaaatgaaacaagacagttgaattgtgtgacttgaagattaccaatgattttgaggcttttctataataaaaagaggttctaaccattatttgggaacaaagagagttttcatcttttttcagatcaaaaccattctgtaaaatctttgttgtttaattaaatgtgccgttatttacccctgatgttatttatgactatgtgccgattcctgctcgggctgtttgctgttggctggtaataatatatttgatttaaatgctgttgactgtgctattaactgctgccgtcagtaaactccaaagatctttttgttttggctttagtatcatatgtgctttttctgtatcctgagcgctctatatgatcatgttaatttaaagctttatacacattgttgtttttgctggtctcatctttggtaatatgctataccccactgctgcccgacactgccctttagctgcagagctggattagctgttgaccatttgatgctgttgtctgtctggcagggactgaatgacctgatgtcagatttagattcttcctggggattacacagctatgaatgtatttgcttctaaaacctcccaaagtgaatctaatcttaaaactacaagttgtaagtattctgaaattgggaaacatttattttaaatgcaatcaggtagtgttgctttttacagcataataaatatatgtatcaaaaaaaaaaat

SEQ ID NO: 360204 - DNA, 4823 bp, Homo sapiens
agcggagtgcggagccttaggcggagcgaagagaaccggtcgcggcaatcctagcgcgcagcagcagcagcagcagcagcacccgcatccgctgcgggagtccgagccggaaccacacccaagtagctgccctttcctcttctgtcatctcaccgccccaccacagaccgcgttccccgaggaaaccggccgcccacgcccggagcatcctcccctgttgagcgggcgctgacggacccggcggcatgatgcggctgcgaggctcggggatgctgcgggacctgctcctgcggtcgcccgccggcgtgagcgcgactctgcggcgggcacagcccttggtcaccctgtgccggcgtccccgaggcgggggacggccggccgcgggcccggctgccgccgcgcgactccacccgtggtggggcgggggcggctggccggcggagcccctcgcgcggggcctgtccagctctccttcggagatcttgcaggagctgggcaaggggagcacgcatccgcagcccggggtgtcgccacccgctgccccggcggcgcccggccccaaggacggccccggggagacggacgcgtttggcaacagcgagggcaaagagctggtggcctcaggtgaaaataaaataaaacagggtctgttacctagcttggaagatttgctgttctatacaattgctgaaggacaagagaaaatacctgttcataaatttattacagcactcaaatctacaggattgcgaacgtctgatcccaggttgaaagagtgtatggatatgttaagattaactcttcaaacaacatcagatggtgtcatgctagacaaagatctttttaaaaaatgtgttcagagcaacattgttttgttgacacaagcatttagaagaaagtttgtgattcctgactttatgtcttttacctcacacattgatgagttatatgaaagtgctaaaaagcagtctggaggaaaggttgcagattatattcctcaactggccaaattcagtcccgatttgtggggtgtgtctgtttgtacagtagatggacagaggcattctactggagataccaaagttcccttctgtcttcagtcctgtgtaaaacctttgaaatatgccattgctgttaatgatcttggaactgaatatgtgcatcgatatgttggaaaagagccgagtggactaagattcaacaaactatttttgaatgaagatgataaaccacataatcctatggtaaatgctggagcaattgttgtgacttcactaataaagcaaggagtaaataatgctgaaaaatttgactatgtcatgcagtttttgaataagatggctggtaatgaatatgttggattcagtaatgcaacgtttcagtctgaaagagaaagtggagatcgaaattttgcaataggatattacttaaaagaaaagaagtgttttccagaaggcacagacatggttggtatattagacttctacttccagctgtgctccattgaagtgacttgtgaatcagccagtgtgatggctgcgacactggctaatggtggtttctgcccaattactggtgaaagagtactgagccctgaagcagttcgaaatacattgagtttgatgcattcctgtggcatgtatgacttctcagggcagtttgctttccatgttggtcttcctgcaaaatctggagttgctgggggcattcttttagttgtccccaatgttatgggtatgatgtgctggtctcctcctctggataagatgggcaacagtgttaagggaattcacttttgtcacgatcttgtttctctgtgtaatttccataactatgataatttgagacactttgcaaaaaaacttgatcctcgaagagaaggtggtgatcaaagggtaaagtcagtgataaatcttttgtttgctgcatatactggagatgtgtctgcacttcgaagatttgctttgtcagctatggacatggaacagcgggactatgattctagaacagcactccatgtagctgctgcagagggtcatgttgaagttgttaaatttttgctggaagcctgcaaagtaaaccctttccccaaggacaggtggaataacactcccatggatgaagcactgcactttggacaccatgatgtatttaaaattctccaagaataccaagtccagtacacacctcaaggagattctgacaacgggaaggaaaatcaaaccgtccataagaatcttgatggattgttgtaatggtctcaaatcccaagatttaaatcacttacctatttaattgtggaaaatgattatgaagaacatgtgtatttctatctggtagtgatgtatattttacatttgtcatttcagtgttactggagttttcttcattgtgcacacaggacaaatctgatctctttgggaaaaaatagaaataaaacaatctccctccataatgtgagcaatattacctcgtgcattgtataatttgatgtaaaagaaatagttaccaatgctagcttgtgtggtcttccatgatttatttgtgttttgtgaattttcaatttatggtgatgatctgctgatatgcatttataaagtaagctctgttgtacagtctgtccaaatgggtcaaggttgcctttagaagcaaatagtgtgattttcaagacttcaaatacaaatttagtttaagtgtttgaacaactatatgcacttacggttgtgtgtttaaaatgtctctctctcaccctagcttcatgatgtgactcttaaaaaactataatagttaacaactgttagtaagatagaccaattctgattagactttatcagggaatctgtttaagatatgtttggtgaccaaaacgtatgtgtgaatgtagttataatgcttttgaaaaattttcctttttctatatccccttagtccagcctctcttctcagacatttagctatctgcctctttcctttagctgggaaagtgagagctggcatactatgcagtttttatgttttccatagtaagtcagaaaatgcctcctatttctggcatcagaactttgccatttgtctacagaagacgaaccagagacaaaattactaagtataaattagtcaagtttatcagtctaaaaagcgaagggatgtgcaactgcagctctttaagaagttttttttttttagcttctagggtaaagataaattcagaaatgctctaagctaccaaagttattctgaaagtatgggaactgctacaactaacaaacatttgtttccaagcctgtcattaagagtctgcatcaagagatttgtcctccttgggggaccactggatcattccagatttcttgtgatttttctattgtgtaattcttggtgggctctgtagtttaataataagaaaaaggccatttcattttaaattgtgacctataattctttgtcttgggttggtaattcaggattcatttggaaagtgggtaaaaggggcttcaaaaaacggatagaacaggattttctaggagttacacatacattttatcctgtcatacctcgagataaagtggcatgttagtgaggagttctgatattaagcacacacacacatgcacacaaatggacttctctgaagctgtgtttagtgaaatgagctcaagtacatgaatgttagttgttatcacatacagcaaattcctttttttttctttttctatgagcacactctgctgcttctaaactttacatgcctgatggcaccttactccagcagcctccaggtgctttcattttcacttccagtctaagccagtggctcctgccactgccctcccattacctagatggcacctcctttggtgaaaccacggccaatgttccttagctgcaccaggcccgaagctgttcccatgcttgagcttccatggggaggatgctgagtgagcagtttcctaccccgtggatctagcaagccatggagacaggtagcatttgtaagatgctgcacaggagcagcattatccccaaagatattacagggtagacacgttttaactgaaatcaatcaagataactttattcaaagagcagcccgctttgtgtgactaaaatgaaacaagacagttgaattgtgtgacttgaagattaccaatgattttgaggcttttctataataaaaagaggttctaaccattatttgggaacaaagagagttttcatcttttttcagatcaaaaccattctgtaaaatctttgttgtttaattaaatgtgccgttatttacccctgatgttatttatgactatgtgccgattcctgctcgggctgtttgctgttggctggtaataatatatttgatttaaatgctgttgactgtgctattaactgctgccgtcagtaaactccaaagatctttttgttttggctttagtatcatatgtgctttttctgtatcctgagcgctctatatgatcatgttaatttaaagctttatacacattgttgtttttgctggtctcatctttggtaatatgctataccccactgctgcccgacactgccctttagctgcagagctggattagctgttgaccatttgatgctgttgtctgtctggcagggactgaatgacctgatgtcagatttagattcttcctggggattacacagctatgaatgtatttgcttctaaaacctcccaaagtgaatctaatcttaaaactacaagttgtaagtattctgaaattgggaaacatttattttaaatgcaatcaggtagtgttgctttttacagcataataaatatatgtatcaaaaaaaaaaat

SEQ ID NO: 360205 - DNA, 4638 bp, Homo sapiens
agcggagtgcggagccttaggcggagcgaagagaaccggtcgcggcaatcctagcgccgcagcagcagcagcagcagcagcagcagcagcagcagcagcagcagcacccgcatccgctgcgggagtccgagccggaaccacacccaagtagctgccctttcctcttctgtcatctcaccgccccaccacagaccgcgttccccgaggaaaccggccgcccacgcccggagcatcctcccctgttgagcgggcgctgacggacccggcggcatgatgcggctgcgaggctcggggatgctgcgggacctgctcctgcggtcgcccgccggcgtgagcgcgactctgcggcgggcacagcccttggtcaccctgtgccggcgtccccgaggcgggggacggccggccgcgggcccggctgccgccgcgcgactccacccgtggtggggcgggggcggctggccggcggagcccctcgcgcggggcctgtccagctctccttcggagatcttgcaggagctgggcaaggggagcacgcatccgcagcccggggtgtcgccacccgctgccccggcggcgcccggccccaaggacggccccggggagacggacgcgtttggcaacagcgagggcaaagagctggtggcctcaggtgaaaataaaataaaacagggtctgttacctagcttggaagatttgctgttctatacaattgctgaaggacaagagaaaatacctgttcataaatttattacagcactcaaatctacaggattgcgaacgtctgatcccaggttgaaagagtgtatggatatgttaagattaactcttcaaacaacatcagatggtgtcatgctagacaaagatctttttaaaaaatgtgttcagagcaacattgttttgttgacacaagcatttagaagaaagtttgtgattcctgactttatgtcttttacctcacacattgatgagttatatgaaagtgctaaaaagcagtctggaggaaaggttgcagattatattcctcaactggccaaattcagtcccgatttgtggggtgtgtctgtttgtacagtagatggacagaggcattctactggagataccaaagttcccttctgtcttcagtcctgtgtaaaacctttgaaatatgccattgctgttaatgatcttggaactgaatatgtgcatcgatatgttggaaaagagccgagtggactaagattcaacaaactatttttgaatgaagatgataaaccacataatcctatggtaaatgctggagcaattgttgtgacttcactaataaagcaaggagtaaataatgctgaaaaatttgactatgtcatgcagtttttgaataagatggctggtaatgaatatgttggattcagtaatgcaacgtttcagtctgaaagagaaagtggagatcgaaattttgcaataggatattacttaaaagaaaagaagtgttttccagaaggcacagacatggttggtatattagacttctacttccagctgtgctccattgaagtgacttgtgaatcagccagtgtgatggctgcgacactggctaatggtggtttctgcccaattactggtgaaagagtactgagccctgaagcagttcgaaatacattgagtttgatgcattcctgtggcatgtatgacttctcagggcagtttgctttccatgttggtcttcctgcaaaatctggagttgctgggggcattcttttagttgtccccaatgttatgggtatgatgtgctggtctcctcctctggataagatgggcaacagtgttaagggaattcacttttgtcacgatcttgtttctctgtgtaatttccataactatgataatttgagacactttgcaaaaaaacttgatcctcgaagagaaggtggtgatcaaaggcattcctttggaccattggactatgaaagtctccaacaagaacttgctttaaaagagacagtatggaaaaaagtgtcacctgagtcaaatgaggacatctctacaactgtagtatatagaatggaaagtctgggagagaaaagctaaagaaatgggttctagtttcagaatgtttcttcatttaatctttcaaacatctttagcttttttttgcaagttataaatatttatttgaggtattttttgttctcaatcttgggtgctggagccataaagcttttttttccttttaatctttgtataaaggcagtagattaagaagtgcatttgttggtctttaaaaagtatttacaagtacataaatttgctttatttttaaaaatacaaaaaggaaaaatttaaattttttttgatgtaattaaaatgttaactatgtggtcagataatcccattttacaatagtaacagaaaattgtaattcttagttctaaaattcacaaattaaactcataagtttgttgcattttgttttttcttttccatttttaaaactaatgtgatgtctttagtggcaatagaaggtacttctatgctaaatacaaaactaaaaaggcaaaataatgaaccccaaattattttatttaaaatagcagtggattataaaattagcttgtgtttacatttatgccatttttggtgatagattggctttacattttaaaaaatttatttaaaaatttatcaaatgctttaaaatatgactcctactttttttattttgcaactcctctgttctgtcagagttgttatatacaggagtgtcttatgttactaaaacattccagccaaagaatttcagatgtgagataatgatgtttcatcaataaaaagctataatggttagttactcagaaggagaaacagtgagtgtcttcaagtgaattgttcacctaaacaattttattttcatattatccacataactttttctatgttatatttaaatatgaatggcaaattttggtttttagcttttacattttattatcttaattttataaatgctaatatttcttttgtgataagttatagcatctcataaagtttgttctatttgaagttttttagagtacttgagaaatgaatttagtctgcaggtagtaagtatgctactaaaatacgttagatctaaatccttttatttggtataaaaatgcaatattgagaatcaaaacttgtttttaagagaactatagattctacacaacctgatttcaagtaattattcatagtatttatagttgtcttggcaaagtgattgtaaaattctgtaggacctattcacacttcttccttcttccatatacttctctggttttccccatagttcccctataatttcaagtttgttgaaacctgttaattttagtgggggattagaagaaaaacttggtggtttcttagcatgatggtgtatgtatgtggtaatggaaagtctgtaaaagtaaatatagtgtagcaaaaaagatttcactgagtattttagatactagtgcaaataaagatagaaaatcttgatcataatgtcttaagtttgggaactgtgatattaagaaaagaaattcccttctagaggtgctggccaaaaagccttttgggctaacttaagtattaaatttatatatttaaataattatattttaagttgtagaggattttcccaaggattttatgcttacttgaatgttctttgaatgttcagatgcatatcctaactggatgcttctcaaggccttactgcatatttgtgttgcatatttatgttagttgcaccagggccatttgtagtttgggcaaccgaatgccttaattggaaaaaaggcattgtggtttcccctatgatctaaattgttacattttaccatttcattccgaagttggttttactttattaaatgaagatttagttttcatatcgtatacatagctgtatagatttcaaaattaggttgttaatttgtgtcacttactatttttgtgttggtaatgctttaaatgcatacttaaaaatgaagtactgttatctaagctactgtgtttagaaaatgttaagaatgagcagaaatttttatagaaaagtataaacggaagaagagataagatactgcgaataggccctcaaacttaaaaaagaaaaaactttgccagttttaaggacatattttgattctttcagtattcttaacacctttttaaacaaagttcttgatagtacccactattattgggtttgttttatgccattattgattcttgatattcaagcatttacaatgtagcatatttgattttcttttttctttctttttttggcatcattaacatttcatttgaaatgcatattgttcttgaagtactttgtttttagcataaatgttgtgcattttatcttagtgtttggatgaaaacatttgtgttgtttagctttcatttgctttgtatatttaataatgtacctttattttccagtatgcctacattttgtattgcacaataaatttattttaagctgaaaaaaaaaaaaaaaaaaaaaacaaaaacaaaacaatactttgactaaaacagggaaagcgaactactatactcaatttggggcagtaacttgaacaacagttgcacgtttaccctagggattaactctcggggggggccccgtgc

SEQ ID NO: 360206 - DNA, 4632 bp, Homo sapiens
  misc_feature (4511)..(4511): n is a, c, g, or t
  misc_feature (4517)..(4517): n is a, c, g, or t
agcggagtgcggagccttaggcggagcgaagagaaccggtcgcggcaatcctagcgccgcagcagcagcagcagcagcagcagcagcagcagcagcagcagcagcacccgcatccgctgcgggagtccgagccggaaccacacccaagtagctgccctttcctcttctgtcatctcaccgccccaccacagaccgcgttccccgaggaaaccggccgcccacgcccggagcatcctcccctgttgagcgggcgctgacggacccggcggcatgatgcggctgcgaggctcggggatgctgcgggacctgctcctgcggtcgcccgccggcgtgagcgcgactctgcggcgggcacagcccttggtcaccctgtgccggcgtccccgaggcgggggacggccggccgcgggcccggctgccgccgcgcgactccacccgtggtggggcgggggcggctggccggcggagcccctcgcgcggggcctgtccagctctccttcggagatcttgcaggagctgggcaaggggagcacgcatccgcagcccggggtgtcgccacccgctgccccggcggcgcccggccccaaggacggccccggggagacggacgcgtttggcaacagcgagggcaaagagctggtggcctcaggtgaaaataaaataaaacagggtctgttacctagcttggaagatttgctgttctatacaattgctgaaggacaagagaaaatacctgttcataaatttattacagcactcaaatctacaggattgcgaacgtctgatcccaggttgaaagagtgtatggatatgttaagattaactcttcaaacaacatcagatggtgtcatgctagacaaagatctttttaaaaaatgtgttcagagcaacattgttttgttgacacaagcatttagaagaaagtttgtgattcctgactttatgtcttttacctcacacattgatgagttatatgaaagtgctaaaaagcagtctggaggaaaggttgcagattatattcctcaactggccaaattcagtcccgatttgtggggtgtgtctgtttgtacagtagatggacagaggcattctactggagataccaaagttcccttctgtcttcagtcctgtgtaaaacctttgaaatatgccattgctgttaatgatcttggaactgaatatgtgcatcgatatgttggaaaagagccgagtggactaagattcaacaaactatttttgaatgaagatgataaaccacataatcctatggtaaatgctggagcaattgttgtgacttcactaataaagcaaggagtaaataatgctgaaaaatttgactatgtcatgcagtttttgaataagatggctggtaatgaatatgttggattcagtaatgcaacgtttcagtctgaaagagaaagtggagatcgaaattttgcaataggatattacttaaaagaaaagaagtgttttccagaaggcacagacatggttggtatattagacttctacttccagctgtgctccattgaagtgacttgtgaatcagccagtgtgatggctgcgacactggctaatggtggtttctgcccaattactggtgaaagagtactgagccctgaagcagttcgaaatacattgagtttgatgcattcctgtggcatgtatgacttctcagggcagtttgctttccatgttggtcttcctgcaaaatctggagttgctgggggcattcttttagttgtccccaatgttatgggtatgatgtgctggtctcctcctctggataagatgggcaacagtgttaagggaattcacttttgtcacgatcttgtttctctgtgtaatttccataactatgataatttgagacactttgcaaaaaaacttgatcctcgaagagaaggtggtgatcaaaggcattcctttggaccattggactatgaaagtctccaacaagaacttgctttaaaagagacagtatggaaaaaagtgtcacctgagtcaaatgaggacatctctacaactgtagtatatagaatggaaagtctgggagagaaaagctaaagaaatgggttctagtttcagaatgtttcttcatttaatctttcaaacatctttagcttttttttgcaagttataaatatttatttgaggtattttttgttctcaatcttgggtgctggagccataaagcttttttttccttttaatctttgtataaaggcagtagattaagaagtgcatttgttggtctttaaaaagtatttacaagtacataaatttgctttatttttaaaaatacaaaaaggaaaaatttaaattttttttgatgtaattaaaatgttaactatgtggtcagataatcccattttacaatagtaacagaaaattgtaattcttagttctaaaattcacaaattaaactcataagtttgttgcattttgttttttcttttccatttttaaaactaatgtgatgtctttagtggcaatagaaggtacttctatgctaaatacaaaactaaaaaggcaaaataatgaaccccaaattattttatttaaaatagcagtggattataaaattagcttgtgtttacatttatgccatttttggtgatagattggctttacattttaaaaaatttatttaaaaatttatcaaatgctttaaaatatgactcctactttttttattttgcaactcctctgttctgtcagagttgttatatacaggagtgtcttatgttactaaaacattccagccaaagaatttcagatgtgagataatgatgtttcatcaataaaaagctataatggttagttactcagaaggagaaacagtgagtgtcttcaagtgaattgttcacctaaacaattttattttcatattatccacataactttttctatgttatatttaaatatgaatggcaaattttggtttttagcttttacattttattatcttaattttataaatgctaatatttcttttgtgataagttatagcatctcataaagtttgttctatttgaagttttttagagtacttgagaaatgaatttagtctgcaggtagtaagtatgctactaaaatacgttagatctaaatccttttatttggtataaaaatgcaatattgagaatcaaaacttgtttttaagagaactatagattctacacaacctgatttcaagtaattattcatagtatttatagttgtcttggcaaagtgattgtaaaattctgtaggacctattcacacttcttccttcttccatatacttctctggttttccccatagttcccctataatttcaagtttgttgaaacctgttaattttagtgggggattagaagaaaaacttggtggtttcttagcatgatggtgtatgtatgtggtaatggaaagtctgtaaaagtaaatatagtgtagcaaaaaagatttcactgagtattttagatactagtgcaaataaagatagaaaatcttgatcataatgtcttaagtttgggaactgtgatattaagaaaagaaattcccttctagaggtgctggccaaaaagccttttgggctaacttaagtattaaatttatatatttaaataattatattttaagttgtagaggattttcccaaggattttatgcttacttgaatgttctttgaatgttcagatgcatatcctaactggatgcttctcaaggccttactgcatatttgtgttgcatatttatgttagttgcaccagggccatttgtagtttgggcaaccgaatgccttaattggaaaaaaggcattgtggtttcccctatgatctaaattgttacattttaccatttcattccgaagttggttttactttattaaatgaagatttagttttcatatcgtatacatagctgtatagatttcaaaattaggttgttaatttgtgtcacttactatttttgtgttggtaatgctttaaatgcatacttaaaaatgaagtactgttatctaagctactgtgtttagaaaatgttaagaatgagcagaaatttttatagaaaagtataaacggaagaagagataagatactgcgaataggccctcaaacttaaaaaagaaaaaactttgccagttttaaggacatattttgattctttcagtattcttaacacctttttaaacaaagttcttgatagtacccactattattgggtttgttttatgccattattgattcttgatattcaagcatttacaatgtagcatatttgattttcttttttctttctttttttggcatcattaacatttcatttgaaatgcatattgttcttgaagtactttgtttttagcataaatgttgtgcattttatcttagtgtttggatgaaaacatttgtgttgtttagctttcatttgctttgtatatttaataatgtacctttattttccagtatgcctacattttgtattgcacaataaatttattttaagctgaaaaaaaaaaaaaaaaaanaaaaanaaaaaaaaatctatctttggtgcgcaataaaatatataaattaatatataaccttgtaatcaataatccctaccactcatcttatcccccttgaaaacaaaattccaatttgtgg

SEQ ID NO: 360207 - DNA, 4553 bp, Homo sapiens
agcggagtgcggagccttaggcggagcgaagagaaccggtcgcggcaatcctagcgccgcagcagcagcagcagcagcagcagcagcagcagcagcagcagcagcacccgcatccgctgcgggagtccgagccggaaccacacccaagtagctgccctttcctcttctgtcatctcaccgccccaccacagaccgcgttccccgaggaaaccggccgcccacgcccggagcatcctcccctgttgagcgggcgctgacggacccggcggcatgatgcggctgcgaggctcggggatgctgcgggacctgctcctgcggtcgcccgccggcgtgagcgcgactctgcggcgggcacagcccttggtcaccctgtgccggcgtccccgaggcgggggacggccggccgcgggcccggctgccgccgcgcgactccacccgtggtggggcgggggcggctggccggcggagcccctcgcgcggggcctgtccagctctccttcggagatcttgcaggagctgggcaaggggagcacgcatccgcagcccggggtgtcgccacccgctgccccggcggcgcccggccccaaggacggccccggggagacggacgcgtttggcaacagcgagggcaaagagctggtggcctcaggtgaaaataaaataaaacagggtctgttacctagcttggaagatttgctgttctatacaattgctgaaggacaagagaaaatacctgttcataaatttattacagcactcaaatctacaggattgcgaacgtctgatcccaggttgaaagagtgtatggatatgttaagattaactcttcaaacaacatcagatggtgtcatgctagacaaagatctttttaaaaaatgtgttcagagcaacattgttttgttgacacaagcatttagaagaaagtttgtgattcctgactttatgtcttttacctcacacattgatgagttatatgaaagtgctaaaaagcagtctggaggaaaggttgcagattatattcctcaactggccaaattcagtcccgatttgtggggtgtgtctgtttgtacagtagatggacagaggcattctactggagataccaaagttcccttctgtcttcagtcctgtgtaaaacctttgaaatatgccattgctgttaatgatcttggaactgaatatgtgcatcgatatgttggaaaagagccgagtggactaagattcaacaaactatttttgaatgaagatgataaaccacataatcctatggtaaatgctggagcaattgttgtgacttcactaataaagcaaggagtaaataatgctgaaaaatttgactatgtcatgcagtttttgaataagatggctggtaatgaatatgttggattcagtaatgcaacgtttcagtctgaaagagaaagtggagatcgaaattttgcaataggatattacttaaaagaaaagaagtgttttccagaaggcacagacatggttggtatattagacttctacttccagctgtgctccattgaagtgacttgtgaatcagccagtgtgatggctgcgacactggctaatggtggtttctgcccaattactggtgaaagagtactgagccctgaagcagttcgaaatacattgagtttgatgcattcctgtggcatgtatgacttctcagggcagtttgctttccatgttggtcttcctgcaaaatctggagttgctgggggcattcttttagttgtccccaatgttatgggtatgatgtgctggtctcctcctctggataagatgggcaacagtgttaagggaattcacttttgtcacgatcttgtttctctgtgtaatttccataactatgataatttgagacactttgcaaaaaaacttgatcctcgaagagaaggtggtgatcaaagggcttggacctttcttcactcaagtgcactaataaattatgtatgttgcttgaacaactagcattcctttggaccattggactatgaaagtctccaacaagaacttgctttaaaagagacagtatggaaaaaagtgtcacctgagtcaaatgaggacatctctacaactgtagtatatagaatggaaagtctgggagagaaaagctaaagaaatgggttctagtttcagaatgtttcttcatttaatctttcaaacatctttagcttttttttgcaagttataaatatttatttgaggtattttttgttctcaatcttgggtgctggagccataaagcttttttttccttttaatctttgtataaaggcagtagattaagaagtgcatttgttggtctttaaaaagtatttacaagtacataaatttgctttatttttaaaaatacaaaaaggaaaaatttaaattttttttgatgtaattaaaatgttaactatgtggtcagataatcccattttacaatagtaacagaaaattgtaattcttagttctaaaattcacaaattaaactcataagtttgttgcattttgttttttcttttccatttttaaaactaatgtgatgtctttagtggcaatagaaggtacttctatgctaaatacaaaactaaaaaggcaaaataatgaaccccaaattattttatttaaaatagcagtggattataaaattagcttgtgtttacatttatgccatttttggtgatagattggctttacattttaaaaaatttatttaaaaatttatcaaatgctttaaaatatgactcctactttttttattttgcaactcctctgttctgtcagagttgttatatacaggagtgtcttatgttactaaaacattccagccaaagaatttcagatgtgagataatgatgtttcatcaataaaaagctataatggttagttactcagaaggagaaacagtgagtgtcttcaagtgaattgttcacctaaacaattttattttcatattatccacataactttttctatgttatatttaaatatgaatggcaaattttggtttttagcttttacattttattatcttaattttataaatgctaatatttcttttgtgataagttatagcatctcataaagtttgttctatttgaagttttttagagtacttgagaaatgaatttagtctgcaggtagtaagtatgctactaaaatacgttagatctaaatccttttatttggtataaaaatgcaatattgagaatcaaaacttgtttttaagagaactatagattctacacaacctgatttcaagtaattattcatagtatttatagttgtcttggcaaagtgattgtaaaattctgtaggacctattcacacttcttccttcttccatatacttctctggttttccccatagttcccctataatttcaagtttgttgaaacctgttaattttagtgggggattagaagaaaaacttggtggtttcttagcatgatggtgtatgtatgtggtaatggaaagtctgtaaaagtaaatatagtgtagcaaaaaagatttcactgagtattttagatactagtgcaaataaagatagaaaatcttgatcataatgtcttaagtttgggaactgtgatattaagaaaagaaattcccttctagaggtgctggccaaaaagccttttgggctaacttaagtattaaatttatatatttaaataattatattttaagttgtagaggattttcccaaggattttatgcttacttgaatgttctttgaatgttcagatgcatatcctaactggatgcttctcaaggccttactgcatatttgtgttgcatatttatgttagttgcaccagggccatttgtagtttgggcaaccgaatgccttaattggaaaaaaggcattgtggtttcccctatgatctaaattgttacattttaccatttcattccgaagttggttttactttattaaatgaagatttagttttcatatcgtatacatagctgtatagatttcaaaattaggttgttaatttgtgtcacttactatttttgtgttggtaatgctttaaatgcatacttaaaaatgaagtactgttatctaagctactgtgtttagaaaatgttaagaatgagcagaaatttttatagaaaagtataaacggaagaagagataagatactgcgaataggccctcaaacttaaaaaagaaaaaactttgccagttttaaggacatattttgattctttcagtattcttaacacctttttaaacaaagttcttgatagtacccactattattgggtttgttttatgccattattgattcttgatattcaagcatttacaatgtagcatatttgattttcttttttctttctttttttggcatcattaacatttcatttgaaatgcatattgttcttgaagtactttgtttttagcataaatgttgtgcattttatcttagtgtttggatgaaaacatttgtgttgtttagctttcatttgctttgtatatttaataatgtacctttattttccagtatgcctacattttgtattgcacaataaatttattttaagctga

SEQ ID NO: 360208 - DNA, 4436 bp, Homo sapiens
agcggagtgcggagccttaggcggagcgaagagaaccggtcgcggcaatcctagcgccgcagcagcagcagcagcagcagcagcagcagcagcagcagcagcagcacccgcatccgctgcgggagtccgagccggaaccacacccaagtagctgccctttcctcttctgtcatctcaccgccccaccacagaccgcgttccccgaggaaaccggccgcccacgcccggagcatcctcccctgttgagcgggcgctgacggacccggcggcatgatgcggctgcgaggctcggggatgctgcgggacctgctcctgcggtcgcccgccggcgtgagcgcgactctgcggcgggcacagcccttggtcaccctgtgccggcgtccccgaggcgggggacggccggccgcgggcccggctgccgccgcgcgactccacccgtggtggggcgggggcggctggccggcggagcccctcgcgcggggcctgtccagctctccttcggagatcttgcaggagctgggcaaggggagcacgcatccgcagcccggggtgtcgccacccgctgccccggcggcgcccggccccaaggacggccccggggagacggacgcgtttggcaacagcgagggcaaagagctggtggcctcaggtgaaaataaaataaaacagggtctgttacctagcttggaagatttgctgttctatacaattgctgaaggacaagagaaaatacctgttcataaatttattacagcactcaaatctacaggattgcgaacgtctgatcccaggttgaaagagtgtatggatatgttaagattaactcttcaaacaacatcagatggtgtcatgctagacaaagatctttttaaaaaatgtgttcagagcaacattgttttgttgacacaagcatttagaagaaagtttgtgattcctgactttatgtcttttacctcacacattgatgagttatatgaaagtgctaaaaagcagtctggaggaaaggttgcagattatattcctcaactggccaaattcagtcccgatttgtggggtgtgtctgtttgtacagtagatggacagaggcattctactggagataccaaagttcccttctgtcttcagtcctgtgtaaaacctttgaaatatgccattgctgttaatgatcttggaactgaatatgtgcatcgatatgttggaaaagagccgagtggactaagattcaacaaactatttttgaatgaagatgataaaccacataatcctatggtaaatgctggagcaattgttgtgacttcactaataaagcaaggagtaaataatgctgaaaaatttgactatgtcatgcagtttttgaataagatggctggtaatgaatatgttggattcagtaatgcaacgtttcagtctgaaagagaaagtggagatcgaaattttgcaataggatattacttaaaagaaaagaagtgttttccagaaggcacagacatggttggtatattagacttctacttccagctgtgctccattgaagtgacttgtgaatcagccagtgtgatggctgcgacactggctaatggtggtttctgcccaattactggtgaaagagtactgagccctgaagcagttcgaaatacattgagtttgatgcattcctgtggcatgtatgacttctcagggcagtttgctttccatgttggtcttcctgcaaaatctggagttgctgggggcattcttttagttgtccccaatgttatgggtatgatgtgctggtctcctcctctggataagatgggcaacagtgttaagggaattcacttttgtcacgatcttgtttctctgtgtaatttccataactatgataatttgagacactttgcaaaaaaacttgatcctcgaagagaaggtggtgatcaaaggcattcctttggaccattggactatgaaagtctccaacaagaacttgctttaaaagagacagtatggaaaaaagtgtcacctgagtcaaatgaggacatctctacaactgtagtatatagaatggaaagtctgggagagaaaagctaaagaaatgggttctagtttcagaatgtttcttcatttaatctttcaaacatctttagcttttttttgcaagttataaatatttatttgaggtattttttgttctcaatcttgggtgctggagccataaagcttttttttccttttaatctttgtataaaggcagtagattaagaagtgcatttgttggtctttaaaaagtatttacaagtacataaatttgctttatttttaaaaatacaaaaaggaaaaatttaaattttttttgatgtaattaaaatgttaactatgtggtcagataatcccattttacaatagtaacagaaaattgtaattcttagttctaaaattcacaaattaaactcataagtttgttgcattttgttttttcttttccatttttaaaactaatgtgatgtctttagtggcaatagaaggtacttctatgctaaatacaaaactaaaaaggcaaaataatgaaccccaaattattttatttaaaatagcagtggattataaaattagcttgtgtttacatttatgccatttttggtgatagattggctttacattttaaaaaatttatttaaaaatttatcaaatgctttaaaatatgactcctactttttttattttgcaactcctctgttctgtcagagttgttatatacaggagtgtcttatgttactaaaacattccagccaaagaatttcagatgtgagataatgatgtttcatcaataaaaagctataatggttagttactcagaaggagaaacagtgagtgtcttcaagtgaattgttcacctaaacaattttattttcatattatccacataactttttctatgttatatttaaatatgaatggcaaattttggtttttagcttttacattttattatcttaattttataaatgctaatatttcttttgtgataagttatagcatctcataaagtttgttctatttgaagttttttagagtacttgagaaatgaatttagtctgcaggtagtaagtatgctactaaaatacgttagatctaaatccttttatttggtataaaaatgcaatattgagaatcaaaacttgtttttaagagaactatagattctacacaacctgatttcaagtaattattcatagtatttatagttgtcttggcaaagtgattgtaaaattctgtaggacctattcacacttcttccttcttccatatacttctctggttttccccatagttcccctataatttcaagtttgttgaaacctgttaattttagtgggggattagaagaaaaacttggtggtttcttagcatgatggtgtatgtatgtggtaatggaaagtctgtaaaagtaaatatagtgtagcaaaaaagatttcactgagtattttagatactagtgcaaataaagatagaaaatcttgatcataatgtcttaagtttgggaactgtgatattaagaaaagaaattcccttctagaggtgctggccaaaaagccttttgggctaacttaagtattaaatttatatatttaaataattatattttaagttgtagaggattttcccaaggattttatgcttacttgaatgttctttgaatgttcagatgcatatcctaactggatgcttctcaaggccttactgcatatttgtgttgcatatttatgttagttgcaccagggccatttgtagtttgggcaaccgaatgccttaattggacgaagttggttttactttattaaatgaagatttagttttcatatcgtatacatagctgtatagatttcaaaattaggttgttaatttgtgtcacttactatttttgtgttggtaatgctttaaatgcatacttaaaaatgaagtactgttatctaagctactgtgtttagaaaatgttaagaatgagcagaaatttttatagaaaagtataaacggaagaagagataagatactgcgaataggccctcaaacttaaaaaagaaaaaactttgccagttttaaggacatattttgattctttcagtattcttaacacctttttaaacaaagttcttgatagtacccactattattgggtttgttttatgccattattgattcttgatattcaagcatttacaatgtagcatatttgattttcttttttctttctttttttggcatcattaacatttcatttgaaatgcatattgttcttgaagtactttgtttttagcataaatgttgtgcattttatcttagtgtttggatgaaaacatttgtgttgtttagctttcatttgctttgtatatttaataatgtacctttattttccagtatgcctacattttgtattgcacaataaatttattttaagctga

SEQ ID NO: 360209 - DNA, 4785 bp, Homo sapiens
agcggagtgcggagccttaggcggagcgaagagaaccggtcgcggcaatcctagcgccgcagcagcagcagcagcagcagcagcagcagcagcagcagcagcagcacccgcatccgctgcgggagtccgagccggaaccacacccaagtagctgccctttcctcttctgtcatctcaccgccccaccacagaccgcgttccccgaggaaaccggccgcccacgcccggagcatcctcccctgttgagcgggcgctgacggacccggcggcatgatgcggctgcgaggctcggggatgctgcgggacctgctcctgcggtcgcccgccggcgtgagcgcgactctgcggcgggcacagcccttggtcaccctgtgccggcgtccccgaggcgggggacggccggccgcgggcccggctgccgccgcgcgactccacccgtggtggggcgggggcggctggccggcggagcccctcgcgcggggcctgtccagctctccttcggagatcttgcaggagctgggcaaggggagcacgcatccgcagcccggggtgtcgccacccgctgccccggcggcgcccggccccaaggacggccccggggagacggacgcgtttggcaacagcgagggcaaagagctggtggcctcaggtgaaaataaaataaaacagggtctgttacctagcttggaagatttgctgttctatacaattgctgaaggacaagagaaaatacctgttcataaatttattacagcactcaaatctacaggattgcgaacgtctgatcccaggttgaaagagtgtatggatatgttaagattaactcttcaaacaacatcagatggtgtcatgctagacaaagatctttttaaaaaatgtgttcagagcaacattgttttgttgacacaagcatttagaagaaagtttgtgattcctgactttatgtcttttacctcacacattgatgagttatatgaaagtgctaaaaagcagtctggaggaaaggttgcagattatattcctcaactggccaaattcagtcccgatttgtggggtgtgtctgtttgtacagtagatggacagaggcattctactggagataccaaagttcccttctgtcttcagtcctgtgtaaaacctttgaaatatgccattgctgttaatgatcttggaactgaatatgtgcatcgatatgttggaaaagagccgagtggactaagattcaacaaactatttttgaatgaagatgataaaccacataatcctatggtaaatgctggagcaattgttgtgacttcactaataaagcaaggagtaaataatgctgaaaaatttgactatgtcatgcagtttttgaataagatggctggtaatgaatatgttggattcagtaatgcaacgtttcagtctgaaagagaaagtggagatcgaaattttgcaataggatattacttaaaagaaaagaagtgttttccagaaggcacagacatggttggtatattagacttctacttccagctgtgctccattgaagtgacttgtgaatcagccagtgtgatggctgcgacactggctaatggtggtttctgcccaattactggtgaaagagtactgagccctgaagcagttcgaaatacattgagtttgatgcattcctgtggcatgtatgacttctcagggcagtttgctttccatgttggtcttcctgcaaaatctggagttgctgggggcattcttttagttgtccccaatgttatgggtatgatgtgctggtctcctcctctggataagatgggcaacagtgttaagggaattcacttttgtcacgatcttgtttctctgtgtaatttccataactatgataatttgagacactttgcaaaaaaacttgatcctcgaagagaaggtggtgatcaaagggtaaagtcagtgataaatcttttgtttgctgcatatactggagatgtgtctgcacttcgaagatttgctttgtcagctatggacatggaacagcgggactatgattctagaacagcactccatgtagctgctgcagagaggtggaataacactcccatggatgaagcactgcactttggacaccatgatgtatttaaaattctccaagaataccaagtccagtacacacctcaaggagattctgacaacgggaaggaaaatcaaaccgtccataagaatcttgatggattgttgtaatggtctcaaatcccaagatttaaatcacttacctatttaattgtggaaaatgattatgaagaacatgtgtatttctatctggtagtgatgtatattttacatttgtcatttcagtgttactggagttttcttcattgtgcacacaggacaaatctgatctctttgggaaaaaatagaaataaaacaatctccctccataatgtgagcaatattacctcgtgcattgtataatttgatgtaaaagaaatagttaccaatgctagcttgtgtggtcttccatgatttatttgtgttttgtgaattttcaatttatggtgatgatctgctgatatgcatttataaagtaagctctgttgtacagtctgtccaaatgggtcaaggttgcctttagaagcaaatagtgtgattttcaagacttcaaatacaaatttagtttaagtgtttgaacaactatatgcacttacggttgtgtgtttaaaatgtctctctctcaccctagcttcatgatgtgactcttaaaaaactataatagttaacaactgttagtaagatagaccaattctgattagactttatcagggaatctgtttaagatatgtttggtgaccaaaacgtatgtgtgaatgtagttataatgcttttgaaaaattttcctttttctatatccccttagtccagcctctcttctcagacatttagctatctgcctctttcctttagctgggaaagtgagagctggcatactatgcagtttttatgttttccatagtaagtcagaaaatgcctcctatttctggcatcagaactttgccatttgtctacagaagacgaaccagagacaaaattactaagtataaattagtcaagtttatcagtctaaaaagcgaagggatgtgcaactgcagctctttaagaagttttttttttttagcttctagggtaaagataaattcagaaatgctctaagctaccaaagttattctgaaagtatgggaactgctacaactaacaaacatttgtttccaagcctgtcattaagagtctgcatcaagagatttgtcctccttgggggaccactggatcattccagatttcttgtgatttttctattgtgtaattcttggtgggctctgtagtttaataataagaaaaaggccatttcattttaaattgtgacctataattctttgtcttgggttggtaattcaggattcatttggaaagtgggtaaaaggggcttcaaaaaacggatagaacaggattttctaggagttacacatacattttatcctgtcatacctcgagataaagtggcatgttagtgaggagttctgatattaagcacacacacacatgcacacaaatggacttctctgaagctgtgtttagtgaaatgagctcaagtacatgaatgttagttgttatcacatacagcaaattcctttttttttctttttctatgagcacactctgctgcttctaaactttacatgcctgatggcaccttactccagcagcctccaggtgctttcattttcacttccagtctaagccagtggctcctgccactgccctcccattacctagatggcacctcctttggtgaaaccacggccaatgttccttagctgcaccaggcccgaagctgttcccatgcttgagcttccatggggaggatgctgagtgagcagtttcctaccccgtggatctagcaagccatggagacaggtagcatttgtaagatgctgcacaggagcagcattatccccaaagatattacagggtagacacgttttaactgaaatcaatcaagataactttattcaaagagcagcccgctttgtgtgactaaaatgaaacaagacagttgaattgtgtgacttgaagattaccaatgattttgaggcttttctataataaaaagaggttctaaccattatttgggaacaaagagagttttcatcttttttcagatcaaaaccattctgtaaaatctttgttgtttaattaaatgtgccgttatttacccctgatgttatttatgactatgtgccgattcctgctcgggctgtttgctgttggctggtaataatatatttgatttaaatgctgttgactgtgctattaactgctgccgtcagtaaactccaaagatctttttgttttggctttagtatcatatgtgctttttctgtatcctgagcgctctatatgatcatgttaatttaaagctttatacacattgttgtttttgctggtctcatctttggtaatatgctataccccactgctgcccgacactgccctttagctgcagagctggattagctgttgaccatttgatgctgttgtctgtctggcagggactgaatgacctgatgtcagatttagattcttcctggggattacacagctatgaatgtatttgcttctaaaacctcccaaagtgaatctaatcttaaaactacaagttgtaagtattctgaaattgggaaacatttattttaaatgcaatcaggtagtgttgctttttacagcataataaatatatgtatcaaaaaaaaaaat

SEQ ID NO: 360210 - DNA, 3213 bp, Homo sapiens
ttggaagtttgatttatagaacctcatcccttctgcttttaaggcaatccagtgtacaaggttggtcttcctgcaaaatctggagttgctgggggcattcttttagttgtccccaatgttatgggtatgatgtgctggtctcctcctctggataagatgggcaacagtgttaagggaattcacttttgtcacgatcttgtttctctgtgtaatttccataactatgataatttgagacactttgcaaaaaaacttgatcctcgaagagaaggtggtgatcaaagggtaaagtcagtgataaatcttttgtttgctgcatatactggagatgtgtctgcacttcgaagatttgctttgtcagctatggacatggaacagcgggactatgattctagaacagcactccatgtagctgctgcagagggtcatgttgaagttgttaaatttttgctggaagcctgcaaagtaaaccctttccccaaggacaggtggaataacactcccatggatgaagcactgcactttggacaccatgatgtatttaaaattctccaagaataccaagtccagtacacacctcaaggagattctgacaacgggaaggaaaatcaaaccgtccataagaatcttgatggattgttgtaatggtctcaaatcccaagatttaaatcacttacctatttaattgtggaaaatgattatgaagaacatgtgtatttctatctggtagtgatgtatattttacatttgtcatttcagtgttactggagttttcttcattgtgcacacaggacaaatctgatctctttgggaaaaaatagaaataaaacaatctccctccataatgtgagcaatattacctcgtgcattgtataatttgatgtaaaagaaatagttaccaatgctagcttgtgtggtcttccatgatttatttgtgttttgtgaattttcaatttatggtgatgatctgctgatatgcatttataaagtaagctctgttgtacagtctgtccaaatgggtcaaggttgcctttagaagcaaatagtgtgattttcaagacttcaaatacaaatttagtttaagtgtttgaacaactatatgcacttacggttgtgtgtttaaaatgtctctctctcaccctagcttcatgatgtgactcttaaaaaactataatagttaacaactgttagtaagatagaccaattctgattagactttatcagggaatctgtttaagatatgtttggtgaccaaaacgtatgtgtgaatgtagttataatgcttttgaaaaattttcctttttctatatccccttagtccagcctctcttctcagacatttagctatctgcctctttcctttagctgggaaagtgagagctggcatactatgcagtttttatgttttccatagtaagtcagaaaatgcctcctatttctggcatcagaactttgccatttgtctacagaagacgaaccagagacaaaattactaagtataaattagtcaagtttatcagtctaaaaagcgaagggatgtgcaactgcagctctttaagaagttttttttttttagcttctagggtaaagataaattcagaaatgctctaagctaccaaagttattctgaaagtatgggaactgctacaactaacaaacatttgtttccaagcctgtcattaagagtctgcatcaagagatttgtcctccttgggggaccactggatcattccagatttcttgtgatttttctattgtgtaattcttggtgggctctgtagtttaataataagaaaaaggccatttcattttaaattgtgacctataattctttgtcttgggttggtaattcaggattcatttggaaagtgggtaaaaggggcttcaaaaaacggatagaacaggattttctaggagttacacatacattttatcctgtcatacctcgagataaagtggcatgttagtgaggagttctgatattaagcacacacacacatgcacacaaatggacttctctgaagctgtgtttagtgaaatgagctcaagtacatgaatgttagttgttatcacatacagcaaattcctttttttttctttttctatgagcacactctgctgcttctaaactttacatgcctgatggcaccttactccagcagcctccaggtgctttcattttcacttccagtctaagccagtggctcctgccactgccctcccattacctagatggcacctcctttggtgaaaccacggccaatgttccttagctgcaccaggcccgaagctgttcccatgcttgagcttccatggggaggatgctgagtgagcagtttcctaccccgtggatctagcaagccatggagacaggtagcatttgtaagatgctgcacaggagcagcattatccccaaagatattacagggtagacacgttttaactgaaatcaatcaagataactttattcaaagagcagcccgctttgtgtgactaaaatgaaacaagacagttgaattgtgtgacttgaagattaccaatgattttgaggcttttctataataaaaagaggttctaaccattatttgggaacaaagagagttttcatcttttttcagatcaaaaccattctgtaaaatctttgttgtttaattaaatgtgccgttatttacccctgatgttatttatgactatgtgccgattcctgctcgggctgtttgctgttggctggtaataatatatttgatttaaatgctgttgactgtgctattaactgctgccgtcagtaaactccaaagatctttttgttttggctttagtatcatatgtgctttttctgtatcctgagcgctctatatgatcatgttaatttaaagctttatacacattgttgtttttgctggtctcatctttggtaatatgctataccccactgctgcccgacactgccctttagctgcagagctggattagctgttgaccatttgatgctgttgtctgtctggcagggactgaatgacctgatgtcagatttagattcttcctggggattacacagctatgaatgtatttgcttctaaaacctcccaaagtgaatctaatcttaaaactacaagttgtaagtattctgaaattgggaaacatttattttaaatgcaatcaggtagtgttgctttttacagcataataaatatatgtatcaaaaaaaaaaat

SEQ ID NO: 360211 - DNA, 4471 bp, Homo sapiens
agcggagtgcggagccttaggcggagcgaagagaaccggtcgcggcaatcctagcgccgcagcagcagcagcagcagcagcagcagcagcagcagcagcagcagcacccgcatccgctgcgggagtccgagccggaaccacacccaagtagctgccctttcctcttctgtcatctcaccgccccaccacagaccgcgttccccgaggaaaccggccgcccacgcccggagcatcctcccctgttgagcgggcgctgacggacccggcggcatgatgcggctgcgaggctcggggatgctgcgggacctgctcctgcggtcgcccgccggcgtgagcgcgactctgcggcgggcacagcccttggtcaccctgtgccggcgtccccgaggcgggggacggccggccgcgggcccggctgccgccgcgcgactccacccgtggtggggcgggggcggctggccggcggagcccctcgcgcggggcctgtccagctctccttcggagatcttgcaggagctgggcaaggggagcacgcatccgcagcccggggtgtcgccacccgctgccccggcggcgcccggccccaaggacggccccggggagacggacgcgtttggcaacagcgagggcaaagagctggtggcctcaggtgaaaataaaataaaacagggtctgttacctagcttggaagatttgctgttctatacaattgctgaaggacaagagaaaatacctgttcataaatttattacagcactcaaatctacaggattgcgaacgtctgatcccaggttgaaagagtgtatggatatgttaagattaactcttcaaacaacatcagatggtgtcatgctagacaaagatctttttaaaaaatgtgttcagagcaacattgttttgttgacacaagcatttagaagaaagtttgtgattcctgactttatgtcttttacctcacacattgatgagttatatgaaagtgctaaaaagcagtctggaggaaaggttgcagattatattcctcaactggccaaattcagtcccgatttgtggggtgtgtctgtttgtacagtagatggacagaggcattctactggagataccaaagttcccttctgtcttcagtcctgtgtaaaacctttgaaatatgccattgctgttaatgatcttggaactgaatatgtgcatcgatatgttggaaaagagccgagtggactaagattcaacaaactatttttgaatgaagatgataaaccacataatcctatggtaaatgctggagcaattgttgtgacttcactaataaagcaaggagtaaataatgctgaaaaatttgactatgtcatgcagtttttgaataagatggctggtaatgaatatgttggattcagtaatgcaacgtttcagtctgaaagagaaagtggagatcgaaattttgcaataggatattacttaaaagaaaagaagtgttttccagaaggcacagacatggttggtatattagacttctacttccagctgtgctccattgaagtgacttgtgaatcagccagtgtgatggctgcgacactggctaatggtggtttctgcccaattactggtgaaagagtactgagccctgaagcagttcgaaatacattgagtttgatgcattcctgtggcatgtatgacttctcagggcagtttgctttccatgttggtcttcctgcaaaatctggagttgctgggggcattcttttagttgtccccaatgttatgggtatgatgtgctggtctcctcctctggataagatgggcaacagtgttaagggaattcacttttgtcacgatcttgtttctctgtgtaatttccataactatgataatttgagacactttgcaaaaaaacttgatcctcgaagagaaggtggtgatcaaagggtaaagtcagtgataaatcttttgtttgctgcatatactggagatgtgtctgcacttcgaagatttgctttgtcagctatggacatggaacagcgggactatgattctagaacagcactccatgtagctgctgcagagggtcatgttgaagttgttaaatttttgctggaagcctgcaaagtaaaccctttccccaaggacaggtggaataacactcccatggatgaagcactgcactttggacaccatgatgtatttaaaattctccaagaataccaagtccagtacacacctcaaggagattctgacaacgggaaggaaaatcaaaccgtccataagaatcttgatggattgttgtaatggtctcaaatcccaagatttaaatcacttacctatttaattgtggaaaatgattatgaagaacatgtgtatttctatctggtagtgatgtatattttacatttgtcatttcagtgttactggagttttcttcattgtgcacacaggacaaatctgatctctttgggaaaaaatagaaataaaacaatctccctccataatgtgagcaatattacctcgtgcattgtataatttgatgtaaaagaaatagttaccaatgctagcttgtgtggtcttccatgatttatttgtgttttgtgaattttcaatttatggtgatgatctgctgatatgcatttataaagtaagctctgttgtacagtctgtccaaatgggtcaaggttgcctttagaagcaaatagtgtgattttcaagacttcaaatacaaatttagtttaagtgtttgaacaactatatgcacttacggttgtgtgtttaaaatgtctctctctcaccctagcttcatgatgtgactcttaaaaaactataatagttaacaactgttagtaagatagaccaattctgattagactttatcagggaatctgtttaagatatgtttggtgaccaaaacgtatgtgtgaatgtagttataatgcttttgaaaaattttcctttttctatatccccttagtccagcctctcttctcagacatttagctatctgcctctttcctttagctgggaaagtgagagctggcatactatgcagtttttatgttttccatagtaagtcagaaaatgcctcctatttctggcatcagaactttgccatttgtctacagaagacgaaccagagacaaaattactaagtataaattagtcaagtttatcagtctaaaaagcgaagggatgtgcaactgcagctctttaagaagttttttttttttagcttctagggtaaagataaattcagaaatgctctaagctaccaaagttattctgaaagtatgggaactgctacaactaacaaacatttgtttccaagcctgtcattaagagtctgcatcaagagatttgtcctccttgggggaccactggatcattccagatttcttgtgatttttctattgtgtaattcttggtgggctctgtagtttaataataagaaaaaggccatttcattttaaattgtgacctataattctttgtcttgggttggtaattcaggattcatttggaaagtgggtaaaaggggcttcaaaaaacggatagaacaggattttctaggagttacacatacattttatcctgtcatacctcgagataaagtggcatgttagtgaggagttctgatattaagcacacacacacatgcacacaaatggacttctctgaagctgtgtttagtgaaatgagctcaagtacatgaatgttagttgttatcacatacagcaaattcctttttttttctttttctatgagcacactctgctgcttctaaactttacatgcctgatggcaccttactccagcagcctccaggtgctttcattttcacttccagtctaagccagtggctcctgccactgccctcccattacctagatggcacctcctttggtgaaaccacggccaatgttccttagctgcaccaggcccgaagctgttcccatgcttgagcttccatggggaggatgctgagtgagcagtttcctaccccgtggatctagcaagccatggagacaggtagcatttgtaagatgctgcacaggagcagcattatccccaaagatattacagggtagacacgttttaactgaaatcaatcaagataactttattcaaagagcagcccgctttgtgtgactaaaatgaaacaagacagttgaattgtgtgacttgaagattaccaatgattttgaggcttttctataataaaaagaggttctaaccattatttgggaacaaagagagttttcatcttttttcagatcaaaaccattctgtaaaatctttgttgtttaattaaatgtgccgttatttacccctgatgttatttatgactatgtgccgattcctgctcgggctgtttgctgttggctggtaataatatatttgatttaaatgctgttgactgtgctattaaggctgtgttagttcacgcacagtttttctcatgaggcttattatctgggcgtcgtttttcctc

SEQ ID NO: 360212 - DNA, 2813 bp, Homo sapiens
acctgcatttaaaatctaggaatgtggggtgatcatctttgtacataaattacctaatgatcctgtccatgctgtgctacgtgtttaggtggaataacactcccatggatgaagcactgcactttggacaccatgatgtatttaaaattctccaagaataccaagtccagtacacacctcaaggagattctgacaacgggaaggaaaatcaaaccgtccataagaatcttgatggattgttgtaatggtctcaaatcccaagatttaaatcacttacctatttaattgtggaaaatgattatgaagaacatgtgtatttctatctggtagtgatgtatattttacatttgtcatttcagtgttactggagttttcttcattgtgcacacaggacaaatctgatctctttgggaaaaaatagaaataaaacaatctccctccataatgtgagcaatattacctcgtgcattgtataatttgatgtaaaagaaatagttaccaatgctagcttgtgtggtcttccatgatttatttgtgttttgtgaattttcaatttatggtgatgatctgctgatatgcatttataaagtaagctctgttgtacagtctgtccaaatgggtcaaggttgcctttagaagcaaatagtgtgattttcaagacttcaaatacaaatttagtttaagtgtttgaacaactatatgcacttacggttgtgtgtttaaaatgtctctctctcaccctagcttcatgatgtgactcttaaaaaactataatagttaacaactgttagtaagatagaccaattctgattagactttatcagggaatctgtttaagatatgtttggtgaccaaaacgtatgtgtgaatgtagttataatgcttttgaaaaattttcctttttctatatccccttagtccagcctctcttctcagacatttagctatctgcctctttcctttagctgggaaagtgagagctggcatactatgcagtttttatgttttccatagtaagtcagaaaatgcctcctatttctggcatcagaactttgccatttgtctacagaagacgaaccagagacaaaattactaagtataaattagtcaagtttatcagtctaaaaagcgaagggatgtgcaactgcagctctttaagaagttttttttttttagcttctagggtaaagataaattcagaaatgctctaagctaccaaagttattctgaaagtatgggaactgctacaactaacaaacatttgtttccaagcctgtcattaagagtctgcatcaagagatttgtcctccttgggggaccactggatcattccagatttcttgtgatttttctattgtgtaattcttggtgggctctgtagtttaataataagaaaaaggccatttcattttaaattgtgacctataattctttgtcttgggttggtaattcaggattcatttggaaagtgggtaaaaggggcttcaaaaaacggatagaacaggattttctaggagttacacatacattttatcctgtcatacctcgagataaagtggcatgttagtgaggagttctgatattaagcacacacacacatgcacacaaatggacttctctgaagctgtgtttagtgaaatgagctcaagtacatgaatgttagttgttatcacatacagcaaattcctttttttttctttttctatgagcacactctgctgcttctaaactttacatgcctgatggcaccttactccagcagcctccaggtgctttcattttcacttccagtctaagccagtggctcctgccactgccctcccattacctagatggcacctcctttggtgaaaccacggccaatgttccttagctgcaccaggcccgaagctgttcccatgcttgagcttccatggggaggatgctgagtgagcagtttcctaccccgtggatctagcaagccatggagacaggtagcatttgtaagatgctgcacaggagcagcattatccccaaagatattacagggtagacacgttttaactgaaatcaatcaagataactttattcaaagagcagcccgctttgtgtgactaaaatgaaacaagacagttgaattgtgtgacttgaagattaccaatgattttgaggcttttctataataaaaagaggttctaaccattatttgggaacaaagagagttttcatcttttttcagatcaaaaccattctgtaaaatctttgttgtttaattaaatgtgccgttatttacccctgatgttatttatgactatgtgccgattcctgctcgggctgtttgctgttggctggtaataatatatttgatttaaatgctgttgactgtgctattaactgctgccgtcagtaaactccaaagatctttttgttttggctttagtatcatatgtgctttttctgtatcctgagcgctctatatgatcatgttaatttaaagctttatacacattgttgtttttgctggtctcatctttggtaatatgctataccccactgctgcccgacactgccctttagctgcagagctggattagctgttgaccatttgatgctgttgtctgtctggcagggactgaatgacctgatgtcagatttagattcttcctggggattacacagctatgaatgtatttgcttctaaaacctcccaaagtgaatctaatcttaaaactacaagttgtaagtattctgaaattgggaaacatttattttaaatgcaatcaggtagtgttgctttttacagcataataaatatatgtatcaaaaaaaaaaat

SEQ ID NO: 360213 - DNA, 1508 bp, Homo sapiens
ctataacttatcacaaaagaaatattagcatttataaaatttgttctatttgaagttttttagagtacttgagaaatgaatttagtctgcaggtagtaagtatgctactaaaatacgttagatctaaatccttttatttggtataaaaatgcaatattgagaatcaaaacttgtttttaagagaactatagattctacacaacctgatttcaagtaattattcatagtatttatagttgtcttggcaaagtgattgtaaaattctgtaggacctattcacacttcttccttcttccatatacttctctggttttccccatagttcccctataatttcaagtttgttgaaacctgttaattttagtgggggattagaagaaaaacttggtggtttcttagcatgatggtgtatgtatgtggtaatggaaagtctgtaaaagtaaatatagtgtagcaaaaaagatttcactgagtattttagatactagtgcaaataaagatagaaaatcttgatcataatgtcttaagtttgggaactgtgatattaagaaaagaaattcccttctagaggtgctggccaaaaagccttttgggctaacttaagtattaaatttatatatttaaataattatattttaagttgtagaggattttcccaaggattttatgcttacttgaatgttctttgaatgttcagatgcatatcctaactggatgcttctcaaggccttactgcatatttgtgttgcatatttatgttagttgcaccagggccatttgtagtttgggcaaccgaatgccttaattggaaaaaaggcattgtggtttcccctatgatctaaattgttacattttaccatttcattccgaagttggttttactttattaaatgaagatttagttttcatatcgtatacatagctgtatagatttcaaaattaggttgttaatttgtgtcacttactatttttgtgttggtaatgctttaaatgcatacttaaaaatgaagtactgttatctaagctactgtgtttagaaaatgttaagaatgagcagaaatttttatagaaaagtataaacggaagaagagataagatactgcgaataggccctcaaacttaaaaaagaaaaaactttgccagttttaaggacatattttgattctttcagtattcttaacacctttttaaacaaagttcttgatagtacccactattattgggtttgttttatgccattattgattcttgatattcaagcatttacaatgtagcatatttgattttcttttttctttctttttttggcatcattaacatttcatttgaaatgcatattgttcttgaagtactttgtttttagcataaatgttgtgcattttatcttagtgtttggatgaaaacatttgtgttgtttagctttcatttgctttgtatatttaataatgtacctttattttccagtatgcctacattttgtattgcacaataaatttattttaagctga

SEQ ID NO: 360214 - DNA, 3261 bp, Homo sapiens
agcggagtgcggagccttaggcggagcgaagagaaccggtcgcggcaatcctagcgccgcagcagcagcagcagcagcagcagcagcagcagcagcagcagcagcacccgcatccgctgcgggagtccgagccggaaccacacccaagtagctgccctttcctcttctgtcatctcaccgccccaccacagaccgcgttccccgaggaaaccggccgcccacgcccggagcatcctcccctgttgagcgggcgctgacggacccggcggcatgatgcggctgcgaggctcggggatgctgcgggacctgctcctgcggtcgcccgccggcgtgagcgcgactctgcggcgggcacagcccttggtcaccctgtgccggcgtccccgaggcgggggacggccggccgcgggcccggctgccgccgcgcgactccacccgtggtggggcgggggcggctggccggcggagcccctcgcgcggggcctgtccagctctccttcggagatcttgcaggagctgggcaaggggagcacgcatccgcagcccggggtgtcgccacccgctgccccggcggcgcccggccccaaggacggccccggggagacggacgcgtttggcaacagcgagggcaaagagctggtggcctcaggtgaaaataaaataaaacagggtctgttacctagcttggaagatttgctgttctatacaattgctgaaggacaagagaaaatacctgttcataaatttattacagcactcaaatctacaggattgcgaacgtctgatcccaggttgaaagagtgtatggatatgttaagattaactcttcaaacaacatcagatggtgtcatgctagacaaagatctttttaaaaaatgtgttcagagcaacattgttttgttgacacaagcatttagaagaaagtttgtgattcctgactttatgtcttttacctcacacattgatgagttatatgaaagtgctaaaaagcagtctggaggaaaggttgcagattatattcctcaactggccaaattcagtcccgatttgtggggtgtgtctgtttgtacagtagatggacagaggcattctactggagataccaaagttcccttctgtcttcagtcctgtgtaaaacctttgaaatatgccattgctgttaatgatcttggaactgaatatgtgcatcgatatgttggaaaagagccgagtggactaagattcaacaaactatttttgaatgaagatgataaaccacataatcctatggtaaatgctggagcaattgttgtgacttcactaataaagcaaggagtaaataatgctgaaaaatttgactatgtcatgcagtttttgaataagatggctggtaatgaatatgttggattcagtaatgcaacgtttcagtctgaaagagaaagtggagatcgaaattttgcaataggatattacttaaaagaaaagaagtgttttccagaaggcacagacatggttggtatattagacttctacttccagctgtgctccattgaagtgacttgtgaatcagccagtgtgatggctgcgacactggctaatggtggtttctgcccaattactggtgaaagagtactgagccctgaagcagttcgaaatacattgagtttgatgcattcctgtggcatgtatgacttctcagggcagtttgctttccatgttggtcttcctgcaaaatctggagttgctgggggcattcttttagttgtccccaatgttatgggtatgatgtgctggtctcctcctctggataagatgggcaacagtgttaagggaattcacttttgtcacgatcttgtttctctgtgtaatttccataactatgataatttgagacactttgcaaaaaaacttgatcctcgaagagaaggtggtgatcaaaggcattcctttggaccattggactatgaaagtctccaacaagaacttgctttaaaagagacagtatggaaaaaagtgtcacctgagtcaaatgaggacatctctacaactgtagtatatagaatggaaagtctgggagagaaaagctaaagaaatgggttctagtttcagaatgtttcttcatttaatctttcaaacatctttagcttttttttgcaagttataaatatttatttgaggtattttttgttctcaatcttgggtgctggagccataaagcttttttttccttttaatctttgtataaaggcagtagattaagaagtgcatttgttggtctttaaaaagtatttacaagtacataaatttgctttatttttaaaaatacaaaaaggaaaaatttaaattttttttgatgtaattaaaatgttaactatgtggtcagataatcccattttacaatagtaacagaaaattgtaattcttagttctaaaattcacaaattaaactcataagtttgttgcattttgttttttcttttccatttttaaaactaatgtgatgtctttagtggcaatagaaggtacttctatgctaaatacaaaactaaaaaggcaaaataatgaaccccaaattattttatttaaaatagcagtggattataaaattagcttgtgtttacatttatgccatttttggtgatagattggctttacattttaaaaaatttatttaaaaatttatcaaatgctttaaaatatgactcctactttttttattttgcaactcctctgttctgtcagagttgttatatacaggagtgtcttatgttactaaaacattccagccaaagaatttcagatgtgagataatgatgtttcatcaataaaaagctataatggttagttactcagaaggagaaacagtgagtgtcttcaagtgaattgttcacctaaacaattttattttcatattatccacataactttttctatgttatatttaaatatgaatggcaaattttggtttttagcttttacattttattatcttaattttataaatgctaatatttcttttgtgataagttatagcatctcataaagtttgttctatttgaagttttttagagtacttgagaaatgaatttagtctgcaggtagtaagtatgctactaaaatacgttagatctaaatccttttatttggtataaaaatgcaatattgagaatcaaaacttgttttggggggcacttatgggttcccccacacccttttacagttttttccaggttttaagggtctctggggcaagggttaaaattctgggccctatccccctct

SEQ ID NO: 360215 - DNA, 990 bp, Homo sapiens
catgccttagagcctcgggcgctaatctgtaggtttaacatggatatatctagatatccttaatgattatcacatgtgtggtatgaaggatgttgtctctcgagaagtgtacttcatcactagctataacatatagcagactgtggctttgaatgttgcagtattgcatctcctacactagtgatagcttcttcaagtgccttactgcatcatatcgtagtatggcatactcaaatcgtacctccggcaccagggccatttgtagtttgggcaaccgaatgccttaattggaaaaaaggcattgtggtttcccctatgatctaaattgttacattttaccatttcattccgaagttggttttactttattaaatgaagatttagttttcatatcgtatacatagctgtatagatttcaaaattaggttgttaatttgtgtcacttactatttttgtgttggtaatgctttaaatgcatacttaaaaatgaagtactgttatctaagctactgtgtttagaaaatgttaagaatgagcagaaatttttatagaaaagtataaacggaagaagagataagatactgcgaataggccctcaaacttaaaaaagaaaaaactttgccagttttaaggacatattttgattctttcagtattcttaacacctttttaaacaaagttcttgatagtacccactattattgggtttgttttatgccattattgattcttgatattcaagcatttacaatgtagcatatttgattttcttttttctttctttttttggcatcattaacatttcatttgaaatgcatattgttcttgaagtactttgtttttagcataaatgttgtgcattttatcttagtgtttggatgaaaacatttgtgttgtttagctttcatttgctttgtatatttaataatgtacctttattttccagtatgcctacattttgtattgcacaataaatttattttaagctga

SEQ ID NO: 360216 - DNA, 1975 bp, Homo sapiens
agcggagtgcggagccttaggcggagcgaagagaaccggtcgcggcaatcctagcgccgcagcagcagcagcagcagcagcagcagcagcagcagcagcagcagcacccgcatccgctgcgggagtccgagccggaaccacacccaagtagctgccctttcctcttctgtcatctcaccgccccaccacagaccgcgttccccgaggaaaccggccgcccacgcccggagcatcctcccctgttgagcgggcgctgacggacccggcggcatgatgcggctgcgaggctcggggatgctgcgggacctgctcctgcggtcgcccgccggcgtgagcgcgactctgcggcgggcacagcccttggtcaccctgtgccggcgtccccgaggcgggggacggccggccgcgggcccggctgccgccgcgcgactccacccgtggtggggcgggggcggctggccggcggagcccctcgcgcggggcctgtccagctctccttcggagatcttgcaggagctgggcaaggggagcacgcatccgcagcccggggtgtcgccacccgctgccccggcggcgcccggccccaaggacggccccggggagacggacgcgtttggcaacagcgagggcaaagagctggtggcctcaggtgaaaataaaataaaacagggtctgttacctagcttggaagatttgctgttctatacaattgctgaaggacaagagaaaatacctgttcataaatttattacagcactcaaatctacaggattgcgaacgtctgatcccaggttgaaagagtgtatggatatgttaagattaactcttcaaacaacatcagatggtgtcatgctagacaaagatctttttaaaaaatgtgttcagagcaacattgttttgttgacacaagcatttagaagaaagtttgtgattcctgactttatgtcttttacctcacacattgatgagttatatgaaagtgctaaaaagcagtctggaggaaaggttgcagattatattcctcaactggccaaattcagtcccgatttgtggggtgtgtctgtttgtacagtagatggacagaggcattctactggagataccaaagttcccttctgtcttcagtcctgtgtaaaacctttgaaatatgccattgctgttaatgatcttggaactgaatatgtgcatcgatatgttggaaaagagccgagtggactaagattcaacaaactatttttgaatgaagatgataaaccacataatcctatggtaaatgctggagcaattgttgtgacttcactaataaagcaaggagtaaataatgctgaaaaatttgactatgtcatgcagtttttgaataagatggctggtaatgaatatgttggattcagtaatgcaacgtttcagtctgaaagagaaagtggagatcgaaattttgcaataggatattacttaaaagaaaagaagtgttttccagaaggcacagacatggttggtatattagacttctacttccagctgtgctccattgaagtgacttgtgaatcagccagtgtgatggctgcgacactggctaatggtggtttctgcccaattactggtgaaagagtactgagccctgaagcagttcgaaatacattgagtttgatgcattcctgtggcatgtatgacttctcagggcagtttgctttccatgttggtcttcctgcaaaatctggagttgctgggggcattcttttagttgtccccaatgttatgggtatgatgtgctggtctcctcctctggataagatgggcaacagtgttaagggaattcacttttgtcacgatcttgtttctctgtgtaatttccataactatgataatttgagacactttgcaaaaaaacttgatcctcgaagagaaggtggtgatcaaaggggtaagcaaaattcttatttagataagtatataaaatttttaagaagagaaaaag

SEQ ID NO: 360217 - DNA, 2030 bp, Homo sapiens
  misc_feature (1307)..(1308): n is a, c, g, or t
agcggagtgcggagccttaggcggagcgaagagaaccggtcgcggcaatcctagcgccgcagcagcagcagcagcagcagcagcagcagcagcagcagcagcagcacccgcatccgctgcgggagtccgagccggaaccacacccaagtagctgccctttcctcttctgtcatctcaccgccccaccacagaccgcgttccccgaggaaaccggccgcccacgcccggagcatcctcccctgttgagcgggcgctgacggacccggcggcatgatgcggctgcgaggctcggggatgctgcgggacctgctcctgcggtcgcccgccggcgtgagcgcgactctgcggcgggcacagcccttggtcaccctgtgccggcgtccccgaggcgggggacggccggccgcgggcccggctgccgccgcgcgactccacccgtggtggggcgggggcggctggccggcggagcccctcgcgcggggcctgtccagctctccttcggagatcttgcaggagctgggcaaggggagcacgcatccgcagcccggggtgtcgccacccgctgccccggcggcgcccggccccaaggacggccccggggagacggacgcgtttggcaacagcgagggcaaagagctggtggcctcaggtgaaaataaaataaaacagggtctgttacctagcttggaagatttgctgttctatacaattgctgaaggacaagagaaaatacctgttcataaatttattacagcactcaaatctacaggattgcgaacgtctgatcccaggttgaaagagtgtatggatatgttaagattaactcttcaaacaacatcagatggtgtcatgctagacaaagatctttttaaaaagtaaaagtttctgccaaacctttaatggtgatttgctatgctatacggtgattctgcttttaaaacaaaattgcatctttgaaggccactgcttcctgtgtaatggaaaaaggggatttataaacatcatttgtttgaagaacttggtacatattagtcataatacaccgggctaagagtattctttctttaaatctgttctaagcaaatttagccaccgatgtttccagtttacagtacttggagattgcattcagtttgagtagagcacatcctttgtcctgtcattgcttatattgatccccaattcatctgcatgacttgcacgctttctcagcatggtctctagttcttttccacaaggtgatttaggtgacatcataaaatgagagggcttcagacagacctgtgttcctcacatttacatacctnnattgtctgctcctctcctctcttcagacatattgatacataggcttttggctattttcattttcttcaaaacagtaaagaactaaaggcaactttggcgattaaagccttgatttggttgaatgagaatttttactttgatgttcctgtatttgcatatatttattatttatcttcattaatgtgtttctattagtttgattacttaaagatttaatggacatgtgtgtaatggatcccaaagaatcaaatagtattttaaactactactatttaagtagaaactagtataaaactgtaaatactactataagacattggctttttccagacatggatccaaaaaatttctgcatctactttgaaagtttgttatgtatggttgtatttacttttgttttatcttcttttgggggttgggtgatttgttctagatgtctcctggagtatgaagtcatctgaaggtataagtatttaactgtggttctctgaagtttcctggcatgctgtgaagcactgctgacagcttgggtttcttatcttttcacgaggaggttcttgtttctgttaacttagctgaccttaaagtgtagactttaggtccgtgttgcagttggtattaggaattttgacttccagaacctgctttttaagagacagaaaaacatcatttctaaatttatttgtgtctttgcggtaaggattatttttcgtgttcatgaa

SEQ ID NO: 360218 - DNA, 1705 bp, Homo sapiens
agcggagtgcggagccttaggcggagcgaagagaaccggtcgcggcaatcctagcgccgcagcagcagcagcagcagcagcagcagcagcagcagcagcagcagcacccgcatccgctgcgggagtccgagccggaaccacacccaagtagctgccctttcctcttctgtcatctcaccgccccaccacagaccgcgttccccgaggaaaccggccgcccacgcccggagcatcctcccctgttgagcgggcgctgacggacccggcggcatgatgcggctgcgaggctcggggatgctgcgggacctgctcctgcggtcgcccgccggcgtgagcgcgactctgcggcgggcacagcccttggtcaccctgtgccggcgtccccgaggcgggggacggccggccgcgggcccggctgccgccgcgcgactccacccgtggtggggcgggggcggctggccggcggagcccctcgcgcggggcctgtccagctctccttcggagatcttgcaggagctgggcaaggggagcacgcatccgcagcccggggtgtcgccacccgctgccccggcggcgcccggccccaaggacggccccggggagacggacgcgtttggcaacagcgagggcaaagagctggtggcctcaggtgaaaataaaataaaacagggtctgttacctagcttggaagatttgctgttctatacaattgctgaaggacaagagaaaatacctgttcataaatttattacagcactcaaatctacaggattgcgaacgtctgatcccaggttgaaagagtgtatggatatgttaagattaactcttcaaacaacatcagatggtgtcatgctagacaaagatctttttaaaaaatgtgttcagagcaacattgttttgttgacacaagcatttagaagaaagtttgtgattcctgactttatgtcttttacctcacacattgatgagttatatgaaagtgctaaaaagcagtctggaggaaaggttgcagattatattcctcaactggccaaattcagtcccgatttgtggggtgtgtctgtttgtacagtagatggacagaggcattctactggagataccaaagttcccttctgtcttcagtcctgtgtaaaacctttgaaatatgccattgctgttaatgatcttggaactgaatatgtgcatcgatatgttggaaaagagccgagtggactaagattcaacaaactatttttgaatgaagatgataaaccacataatcctatggtaaatgctggagcaattgttgtgacttcactaataaagcaaggagtaaataatgctgaaaaatttgactatgtcatgcagtttttgaataagatggctggtaatgaatatgttggattcagtaatgcaacgtttcagtctgaaagagaaagtggagatcgaaattttgcaataggatattacttaaaagaaaagaagtgttttccagaaggcacagacatggttggtatattagacttctacttccaggtaatctaattatgtaaatcgtatatataaatggatgtgtcggctgggcacggtggctcacgcctgtaatcccagcactttgggaggccagggcaggtggatcatgaggtcaagagatagaggtcatcctggccaacatggtgaaaccccatctctactaaaaatacaaaaattattcgggtgtggt

SEQ ID NO: 360219 - DNA, 402 bp, Homo sapiens
ctgaggaagagaggtgaagtggcatctacccaaaacacctgtgtactggttaataaggtcggtagttcccattaatgagcttgatgaaggatggcacctgacagggccttaaatgaactgatggagtgaatgttaccagtgtgaattaaatttgctttatatataataaatagctgtgcttacacattttcagatttgctttgtcagctatggacatggaacagcgggactatgattctagaacagcactccatgtagctgctgcagagggtaatacaggaactactcctatctattttctttccagatttaatttctacttagtactaaaatctgctctttttttgggggtgggacggtataggtcatgttgaagttgttaaatttttgctggaagcctgc

SEQ ID NO: 360220 - DNA, 4493 bp, Homo sapiens
agcggagtgcggagccttaggcggagcgaagagaaccggtcgcggcaatcctagcgccgcagcagcagcagcagcagcagcagcagcagcagcagcagcagcagcacccgcatccgctgcgggagtccgagccggaaccacacccaagtagctgccctttcctcttctgtcatctcaccgccccaccacagaccgcgttccccgaggaaaccggccgcccacgcccggagcatcctcccctgttgagcgggcgctgacggacccggcggcatgatgcggctgcgaggctcggggatgctgcgggacctgctcctgcggtcgcccgccggcgtgagcgcgactctgcggcgggcacagcccttggtcaccctgtgccggcgtccccgaggcgggggacggccggccgcgggcccggctgccgccgcgcgactccacccgtggtggggcgggggcggctggccggcggagcccctcgcgcggggcctgtccagctctccttcggagatcttgcaggagctgggcaaggggagcacgcatccgcagcccggggtgtcgccacccgctgccccggcggcgcccggccccaaggacggccccggggagacggacgcgtttggcaacagcgagggcaaagagctggtggcctcaggtgaaaataaaataaaacagggtctgttacctagcttggaagatttgctgttctatacaattgctgaaggacaagagaaaatacctgttcataaatttattacagcactcaaatctacaggattgcgaacgtctgatcccaggttgaaagagtgtatggatatgttaagattaactcttcaaacaacatcagatggtgtcatgctagacaaagatctttttaaaaaatgtgttcagagcaacattgttttgttgacacaagcatttagaagaaagtttgtgattcctgactttatgtcttttacctcacacattgatgagttatatgaaagtgctaaaaagcagtctggaggaaaggttgcagattatattcctcaactggccaaattcagtcccgatttgtggggtgtgtctgtttgtacagtagatggacagaggcattctactggagataccaaagttcccttctgtcttcagtcctgtgtaaaacctttgaaatatgccattgctgttaatgatcttggaactgaatatgtgcatcgatatgttggaaaagagccgagtggactaagattcaacaaactatttttgaatgaagatgataaaccacataatcctatggtaaatgctggagcaattgttgtgacttcactaataaagcaaggagtaaataatgctgaaaaatttgactatgtcatgcagtttttgaataagatggctggtaatgaatatgttggattcagtaatgcaacgtttcagtctgaaagagaaagtggagatcgaaattttgcaataggatattacttaaaagaaaagaagtgttttccagaaggcacagacatggttggtatattagacttctacttccagctgtgctccattgaagtgacttgtgaatcagccagtgtgatggctgcgacactggctaatggtggtttctgcccaattactggtgaaagagtactgagccctgaagcagttcgaaatacattgagtttgatgcattcctgtggcatgtatgacttctcagggcagtttgctttccatgttggtcttcctgcaaaatctggagttgctgggggcattcttttagttgtccccaatgttatgggtatgatgtgctggtctcctcctctggataagatgggcaacagtgttaagggaattcacttttgtcacgatcttgtttctctgtgtaatttccataactatgataatttgagacactttgcaaaaaaacttgatcctcgaagagaaggtggtgatcaaaggcattcctttggaccattggactatgaaagtctccaacaagaacttgctttaaaagagacagtatggaaaaaagtgtcacctgagtcaaatgaggacatctctacaactgtagtatatagaatggaaagtctgggagagaaaagctaaagaaatgggttctagtttcagaatgtttcttcatttaatctttcaaacatctttagcttttttttgcaagttataaatatttatttgaggtattttttgttctcaatcttgggtgctggagccataaagcttttttttccttttaatctttgtataaaggcagtagattaagaagtgcatttgttggtctttaaaaagtatttacaagtacataaatttgctttatttttaaaaatacaaaaaggaaaaatttaaattttttttgatgtaattaaaatgttaactatgtggtcagataatcccattttacaatagtaacagaaaattgtaattcttagttctaaaattcacaaattaaactcataagtttgttgcattttgttttttcttttccatttttaaaactaatgtgatgtctttagtggcaatagaaggtacttctatgctaaatacaaaactaaaaaggcaaaataatgaaccccaaattattttatttaaaatagcagtggattataaaattagcttgtgtttacatttatgccatttttggtgatagattggctttacattttaaaaaatttatttaaaaatttatcaaatgctttaaaatatgactcctactttttttattttgcaactcctctgttctgtcagagttgttatatacaggagtgtcttatgttactaaaacattccagccaaagaatttcagatgtgagataatgatgtttcatcaataaaaagctataatggttagttactcagaaggagaaacagtgagtgtcttcaagtgaattgttcacctaaacaattttattttcatattatccacataactttttctatgttatatttaaatatgaatggcaaattttggtttttagcttttacattttattatcttaattttataaatgctaatatttcttttgtgataagttatagcatctcataaagtttgttctatttgaagttttttagagtacttgagaaatgaatttagtctgcaggtagtaagtatgctactaaaatacgttagatctaaatccttttatttggtataaaaatgcaatattgagaatcaaaacttgtttttaagagaactatagattctacacaacctgatttcaagtaattattcatagtatttatagttgtcttggcaaagtgattgtaaaattctgtaggacctattcacacttcttccttcttccatatacttctctggttttccccatagttcccctataatttcaagtttgttgaaacctgttaattttagtgggggattagaagaaaaacttggtggtttcttagcatgatggtgtatgtatgtggtaatggaaagtctgtaaaagtaaatatagtgtagcaaaaaagatttcactgagtattttagatactagtgcaaataaagatagaaaatcttgatcataatgtcttaagtttgggaactgtgatattaagaaaagaaattcccttctagaggtgctggccaaaaagccttttgggctaacttaagtattaaatttatatatttaaataattatattttaagttgtagaggattttcccaaggattttatgcttacttgaatgttctttgaatgttcagatgcatatcctaactggatgcttctcaaggccttactgcatatttgtgttgcatatttatgttagttgcaccagggccatttgtagtttgggcaaccgaatgccttaattggaaaaaaggcattgtggtttcccctatgatctaaattgttacattttaccatttcattccgaagttggttttactttattaaatgaagatttagttttcatatcgtatacatagctgtatagatttcaaaattaggttgttaatttgtgtcacttactatttttgtgttggtaatgctttaaatgcatacttaaaaatgaagtactgttatctaagctactgtgtttagaaaatgttaagaatgagcagaaatttttatagaaaagtataaacggaagaagagataagatactgcgaataggccctcaaacttaaaaaagaaaaaactttgccagttttaaggacatattttgattctttcagtattcttaacacctttttaaacaaagttcttgatagtacccactattattgggtttgttttatgccattattgattcttgatattcaagcatttacaatgtagcatatttgattttcttttttctttctttttttggcatcattaacatttcatttgaaatgcatattgttcttgaagtactttgtttttagcataaatgttgtgcattttatcttagtgtttggatgaaaacatttgtgttgtttagctttcatttgctttgtatatttaataatgtacctttattttccagtatgcctacattttgtattgcacaataaatttattttaagctga

SEQ ID NO: 360221 - DNA, 5111 bp, Homo sapiens
  misc_feature (4461)..(4461): n is a, c, g, or t
  misc_feature (4467)..(4467): n is a, c, g, or t
agcggagtgcggagccttaggcggagcgaagagaaccggtcgcggcaatcctagcgccgcagcagcagcagcagcagcagcagcagcagcagcagcagcagcagcacccgcatccgctgcgggagtccgagccggaaccacacccaagtagctgccctttcctcttctgtcatctcaccgccccaccacagaccgcgttccccgaggaaaccggccgcccacgcccggagcatcctcccctgttgagcgggcgctgacggacccggcggcatgatgcggctgcgaggctcggggatgctgcgggacctgctcctgcggtcgcccgccggcgtgagcgcgactctgcggcgggcacagcccttggtcaccctgtgccggcgtccccgaggcgggggacggccggccgcgggcccggctgccgccgcgcgactccacccgtggtggggcgggggcggctggccggcggagcccctcgcgcggggcctgtccagctctccttcggagatcttgcaggagctgggcaaggggagcacgcatccgcagcccggggtgtcgccacccgctgccccggcggcgcccggccccaaggacggccccggggagacggacgcgtttggcaacagcgagggcaaagagctggtggcctcaggtgaaaataaaataaaacagggtctgttacctagcttggaagatttgctgttctatacaattgctgaaggacaagagaaaatacctgttcataaatttattacagcactcaaatctacaggattgcgaacgtctgatcccaggttgaaagagtgtatggatatgttaagattaactcttcaaacaacatcagatggtgtcatgctagacaaagatctttttaaaaaatgtgttcagagcaacattgttttgttgacacaagcatttagaagaaagtttgtgattcctgactttatgtcttttacctcacacattgatgagttatatgaaagtgctaaaaagcagtctggaggaaaggttgcagattatattcctcaactggccaaattcagtcccgatttgtggggtgtgtctgtttgtacagtagatggacagaggcattctactggagataccaaagttcccttctgtcttcagtcctgtgtaaaacctttgaaatatgccattgctgttaatgatcttggaactgaatatgtgcatcgatatgttggaaaagagccgagtggactaagattcaacaaactatttttgaatgaagatgataaaccacataatcctatggtaaatgctggagcaattgttgtgacttcactaataaagcaaggagtaaataatgctgaaaaatttgactatgtcatgcagtttttgaataagatggctggtaatgaatatgttggattcagtaatgcaacgtttcagtctgaaagagaaagtggagatcgaaattttgcaataggatattacttaaaagaaaagaagtgttttccagaaggcacagacatggttggtatattagacttctacttccagctgtgctccattgaagtgacttgtgaatcagccagtgtgatggctgcgacactggctaatggtggtttctgcccaattactggtgaaagagtactgagccctgaagcagttcgaaatacattgagtttgatgcattcctgtggcatgtatgacttctcagggcagtttgctttccatgttggtcttcctgcaaaatctggagttgctgggggcattcttttagttgtccccaatgttatgggtatgatgtgctggtctcctcctctggataagatgggcaacagtgttaagggaattcacttttgtcacgatcttgtttctctgtgtaatttccataactatgataatttgagacactttgcaaaaaaacttgatcctcgaagagaaggtggtgatcaaaggcattcctttggaccattggactatgaaagtctccaacaagaacttgctttaaaagagacagtatggaaaaaagtgtcacctgagtcaaatgaggacatctctacaactgtagtatatagaatggaaagtctgggagagaaaagctaaagaaatgggttctagtttcagaatgtttcttcatttaatctttcaaacatctttagcttttttttgcaagttataaatatttatttgaggtattttttgttctcaatcttgggtgctggagccataaagcttttttttccttttaatctttgtataaaggcagtagattaagaagtgcatttgttggtctttaaaaagtatttacaagtacataaatttgctttatttttaaaaatacaaaaaggaaaaatttaaattttttttgatgtaattaaaatgttaactatgtggtcagataatcccattttacaatagtaacagaaaattgtaattcttagttctaaaattcacaaattaaactcataagtttgttgcattttgttttttcttttccatttttaaaactaatgtgatgtctttagtggcaatagaaggtacttctatgctaaatacaaaactaaaaaggcaaaataatgaaccccaaattattttatttaaaatagcagtggattataaaattagcttgtgtttacatttatgccatttttggtgatagattggctttacattttaaaaaatttatttaaaaatttatcaaatgctttaaaatatgactcctactttttttattttgcaactcctctgttctgtcagagttgttatatacaggagtgtcttatgttactaaaacattccagccaaagaatttcagatgtgagataatgatgtttcatcaataaaaagctataatggttagttactcagaaggagaaacagtgagtgtcttcaagtgaattgttcacctaaacaattttattttcatattatccacataactttttctatgttatatttaaatatgaatggcaaattttggtttttagcttttacattttattatcttaattttataaatgctaatatttcttttgtgataagttatagcatctcataaagtttgttctatttgaagttttttagagtacttgagaaatgaatttagtctgcaggtagtaagtatgctactaaaatacgttagatctaaatccttttatttggtataaaaatgcaatattgagaatcaaaacttgtttttaagagaactatagattctacacaacctgatttcaagtaattattcatagtatttatagttgtcttggcaaagtgattgtaaaattctgtaggacctattcacacttcttccttcttccatatacttctctggttttccccatagttcccctataatttcaagtttgttgaaacctgttaattttagtgggggattagaagaaaaacttggtggtttcttagcatgatggtgtatgtatgtggtaatggaaagtctgtaaaagtaaatatagtgtagcaaaaaagatttcactgagtattttagatactagtgcaaataaagatagaaaatcttgatcataatgtcttaagtttgggaactgtgatattaagaaaagaaattcccttctagaggtgctggccaaaaagccttttgggctaacttaagtattaaatttatatatttaaataattatattttaagttgtagaggattttcccaaggattttatgcttacttgaatgttctttgaatgttcagatgcatatcctaactggatgcttctcaaggccttactgcatatttgtgttgcatatttatgttagttgcaccagggccatttgtagtttgggcaaccgaatgccttaattggaaaaaaggcattgtggtttcccctatgatctaaattgttacattttaccatttcattccgaagttggttttactttattaaatgaagatttagttttcatatcgtatacatagctgtatagatttcaaaattaggttgttaatttgtgtcacttactatttttgtgttggtaatgctttaaatgcatacttaaaaatgaagtactgttatctaagctactgtgtttagaaaatgttaagaatgagcagaaatttttatagaaaagtataaacggaagaagagataagatactgcgaataggccctcaaacttaaaaaagaaaaaactttgccagttttaaggacatattttgattctttcagtattcttaacacctttttaaacaaagttcttgatagtacccactattattgggtttgttttatgccattattgattcttgatattcaagcatttacaatgtagcatatttgattttcttttttctttctttttttggcatcattaacatttcatttgaaatgcatattgttcttgaagtactttgtttttagcataaatgttgtgcattttatcttagtgtttggatgaaaacatttgtgttgtttagctttcatttgctttgtatatttaataatgtacctttattaaaaaaaaaaaaaaaaanaaaaanaaaaaaaaaaaaaaaaaaaaaaaaaaaaaaaaaaaaaaaaaaaaaaaaaaaaaaagggggggggggaaaaattctcccgggggggggcaatgggaccccccatttttttgttgatcgcaaagcggggggccccaaatcggaggggtcctattcaaatcagcaccacaggaccaggcgccgcccgattaaaacacacagagcagtaggataggaaaaaacaacggcccacggagtggaattcattgtgaaggaagcaaacaccaaccatcggcacgggggggaacaaaacgacggagcaacacaccaccacacgacagaaagtttacagagactgcggagacatacaacacaacgagcgtgactcttcggtcaacacacaagcatactgatgccgagcgcaaaaaacattcggcacagaggacattaacatgaaaacatttccgacgggtggtcgtgatatcaagccgaaaaaaacaacggaacaaacacaaacgacaccaaagaacaagacacacagccaaccagcaccgcccacagagagcgaaaagaaaaaaacacaaatacgacgcggaacacaccgacaaagcccacaagacacaacagacaacacacgaagcaaacaaggacaaacagcgaccacaaca

SEQ ID NO: 360222 - DNA, 4434 bp, Homo sapiens
agcggagtgcggagccttaggcggagcgaagagaaccggtcgcggcaatcctagcgccgcagcagcagcagcagcagcagcagcagcagcagcagcagcagcagcacccgcatccgctgcgggagtccgagccggaaccacacccaagtagctgccctttcctcttctgtcatctcaccgccccaccacagaccgcgttccccgaggaaaccggccgcccacgcccggagcatcctcccctgttgagcgggcgctgacggacccggcggcatgatgcggctgcgaggctcggggatgctgcgggacctgctcctgcggtcgcccgccggcgtgagcgcgactctgcggcgggcacagcccttggtcaccctgtgccggcgtccccgaggcgggggacggccggccgcgggcccggctgccgccgcgcgactccacccgtggtggggcgggggcggctggccggcggagcccctcgcgcggggcctgtccagctctccttcggagatcttgcaggagctgggcaaggggagcacgcatccgcagcccggggtgtcgccacccgctgccccggcggcgcccggccccaaggacggccccggggagacggacgcgtttggcaacagcgagggcaaagagctggtggcctcaggtgaaaataaaataaaacagggtctgttacctagcttggaagatttgctgttctatacaattgctgaaggacaagagaaaatacctgttcataaatttattacagcactcaaatctacaggattgcgaacgtctgatcccaggttgaaagagtgtatggatatgttaagattaactcttcaaacaacatcagatggtgtcatgctagacaaagatctttttaaaaaatgtgttcagagcaacattgttttgttgacacaagcatttagaagaaagtttgtgattcctgactttatgtcttttacctcacacattgatgagttatatgaaagtgctaaaaagcagtctggaggaaaggttgcagattatattcctcaactggccaaattcagtcccgatttgtggggtgtgtctgtttgtacagtagatggacagaggcattctactggagataccaaagttcccttctgtcttcagtcctgtgtaaaacctttgaaatatgccattgctgttaatgatcttggaactgaatatgtgcatcgatatgttggaaaagagccgagtggactaagattcaacaaactatttttgaatgaagatgataaaccacataatcctatggtaaatgctggagcaattgttgtgacttcactaataaagcaaggagtaaataatgctgaaaaatttgactatgtttcagtctgaaagagaaagtggagatcgaaattttgcaataggatattacttaaaagaaaagaagtgttttccagaaggcacagacatggttggtatattagacttctacttccagctgtgctccattgaagtgacttgtgaatcagccagtgtgatggctgcgacactggctaatggtggtttctgcccaattactggtgaaagagtactgagccctgaagcagttcgaaatacattgagtttgatgcattcctgtggcatgtatgacttctcagggcagtttgctttccatgttggtcttcctgcaaaatctggagttgctgggggcattcttttagttgtccccaatgttatgggtatgatgtgctggtctcctcctctggataagatgggcaacagtgttaagggaattcacttttgtcacgatcttgtttctctgtgtaatttccataactatgataatttgagacactttgcaaaaaaacttgatcctcgaagagaaggtggtgatcaaaggcattcctttggaccattggactatgaaagtctccaacaagaacttgctttaaaagagacagtatggaaaaaagtgtcacctgagtcaaatgaggacatctctacaactgtagtatatagaatggaaagtctgggagagaaaagctaaagaaatgggttctagtttcagaatgtttcttcatttaatctttcaaacatctttagcttttttttgcaagttataaatatttatttgaggtattttttgttctcaatcttgggtgctggagccataaagcttttttttccttttaatctttgtataaaggcagtagattaagaagtgcatttgttggtctttaaaaagtatttacaagtacataaatttgctttatttttaaaaatacaaaaaggaaaaatttaaattttttttgatgtaattaaaatgttaactatgtggtcagataatcccattttacaatagtaacagaaaattgtaattcttagttctaaaattcacaaattaaactcataagtttgttgcattttgttttttcttttccatttttaaaactaatgtgatgtctttagtggcaatagaaggtacttctatgctaaatacaaaactaaaaaggcaaaataatgaaccccaaattattttatttaaaatagcagtggattataaaattagcttgtgtttacatttatgccatttttggtgatagattggctttacattttaaaaaatttatttaaaaatttatcaaatgctttaaaatatgactcctactttttttattttgcaactcctctgttctgtcagagttgttatatacaggagtgtcttatgttactaaaacattccagccaaagaatttcagatgtgagataatgatgtttcatcaataaaaagctataatggttagttactcagaaggagaaacagtgagtgtcttcaagtgaattgttcacctaaacaattttattttcatattatccacataactttttctatgttatatttaaatatgaatggcaaattttggtttttagcttttacattttattatcttaattttataaatgctaatatttcttttgtgataagttatagcatctcataaagtttgttctatttgaagttttttagagtacttgagaaatgaatttagtctgcaggtagtaagtatgctactaaaatacgttagatctaaatccttttatttggtataaaaatgcaatattgagaatcaaaacttgtttttaagagaactatagattctacacaacctgatttcaagtaattattcatagtatttatagttgtcttggcaaagtgattgtaaaattctgtaggacctattcacacttcttccttcttccatatacttctctggttttccccatagttcccctataatttcaagtttgttgaaacctgttaattttagtgggggattagaagaaaaacttggtggtttcttagcatgatggtgtatgtatgtggtaatggaaagtctgtaaaagtaaatatagtgtagcaaaaaagatttcactgagtattttagatactagtgcaaataaagatagaaaatcttgatcataatgtcttaagtttgggaactgtgatattaagaaaagaaattcccttctagaggtgctggccaaaaagccttttgggctaacttaagtattaaatttatatatttaaataattatattttaagttgtagaggattttcccaaggattttatgcttacttgaatgttctttgaatgttcagatgcatatcctaactggatgcttctcaaggccttactgcatatttgtgttgcatatttatgttagttgcaccagggccatttgtagtttgggcaaccgaatgccttaattggaaaaaaggcattgtggtttcccctatgatctaaattgttacattttaccatttcattccgaagttggttttactttattaaatgaagatttagttttcatatcgtatacatagctgtatagatttcaaaattaggttgttaatttgtgtcacttactatttttgtgttggtaatgctttaaatgcatacttaaaaatgaagtactgttatctaagctactgtgtttagaaaatgttaagaatgagcagaaatttttatagaaaagtataaacggaagaagagataagatactgcgaataggccctcaaacttaaaaaagaaaaaactttgccagttttaaggacatattttgattctttcagtattcttaacacctttttaaacaaagttcttgatagtacccactattattgggtttgttttatgccattattgattcttgatattcaagcatttacaatgtagcatatttgattttcttttttctttctttttttggcatcattaacatttcatttgaaatgcatattgttcttgaagtactttgtttttagcataaatgttgtgcattttatcttagtgtttggatgaaaacatttgtgttgtttagctttcatttgctttgtatatttaataatgtacctttattttccagtatgcctacattttgtattgcacaataaatttattttaagctga

SEQ ID NO: 360223 - DNA, 3278 bp, Homo sapiens
gaatttggacagaaggagcctgttgcataaattcttaactactaagcttataggaaaactccaatatttaaaattttaaacaaagctatatagcaaggagtaaataatgctgaaaaatttgactatgtcatgcagtttttgaataagatggctggtaatgaatatgttggattcagtaatgcaacgtttcagtctgaaagagaaagtggagatcgaaattttgcaataggatattacttaaaagaaaagaagtgttttccagaaggcacagacatggttggtatattagacttctacttccagctgtgctccattgaagtgacttgtgaatcagccagtgtgatggctgcgacactggctaatggtggtttctgcccaattactggtgaaagagtactgagccctgaagcagttcgaaatacattgagtttgatgcattcctgtggcatgtatgacttctcagggcagtttgctttccatgttggtcttcctgcaaaatctggagttgctgggggcattcttttagttgtccccaatgttatgggtatgatgtgctggtctcctcctctggataagatgggcaacagtgttaagggaattcacttttgtcacgatcttgtttctctgtgtaatttccataactatgataatttgagacactttgcaaaaaaacttgatcctcgaagagaaggtggtgatcaaaggcattcctttggaccattggactatgaaagtctccaacaagaacttgctttaaaagagacagtatggaaaaaagtgtcacctgagtcaaatgaggacatctctacaactgtagtatatagaatggaaagtctgggagagaaaagctaaagaaatgggttctagtttcagaatgtttcttcatttaatctttcaaacatctttagcttttttttgcaagttataaatatttatttgaggtattttttgttctcaatcttgggtgctggagccataaagcttttttttccttttaatctttgtataaaggcagtagattaagaagtgcatttgttggtctttaaaaagtatttacaagtacataaatttgctttatttttaaaaatacaaaaaggaaaaatttaaattttttttgatgtaattaaaatgttaactatgtggtcagataatcccattttacaatagtaacagaaaattgtaattcttagttctaaaattcacaaattaaactcataagtttgttgcattttgttttttcttttccatttttaaaactaatgtgatgtctttagtggcaatagaaggtacttctatgctaaatacaaaactaaaaaggcaaaataatgaaccccaaattattttatttaaaatagcagtggattataaaattagcttgtgtttacatttatgccatttttggtgatagattggctttacattttaaaaaatttatttaaaaatttatcaaatgctttaaaatatgactcctactttttttattttgcaactcctctgttctgtcagagttgttatatacaggagtgtcttatgttactaaaacattccagccaaagaatttcagatgtgagataatgatgtttcatcaataaaaagctataatggttagttactcagaaggagaaacagtgagtgtcttcaagtgaattgttcacctaaacaattttattttcatattatccacataactttttctatgttatatttaaatatgaatggcaaattttggtttttagcttttacattttattatcttaattttataaatgctaatatttcttttgtgataagttatagcatctcataaagtttgttctatttgaagttttttagagtacttgagaaatgaatttagtctgcaggtagtaagtatgctactaaaatacgttagatctaaatccttttatttggtataaaaatgcaatattgagaatcaaaacttgtttttaagagaactatagattctacacaacctgatttcaagtaattattcatagtatttatagttgtcttggcaaagtgattgtaaaattctgtaggacctattcacacttcttccttcttccatatacttctctggttttccccatagttcccctataatttcaagtttgttgaaacctgttaattttagtgggggattagaagaaaaacttggtggtttcttagcatgatggtgtatgtatgtggtaatggaaagtctgtaaaagtaaatatagtgtagcaaaaaagatttcactgagtattttagatactagtgcaaataaagatagaaaatcttgatcataatgtcttaagtttgggaactgtgatattaagaaaagaaattcccttctagaggtgctggccaaaaagccttttgggctaacttaagtattaaatttatatatttaaataattatattttaagttgtagaggattttcccaaggattttatgcttacttgaatgttctttgaatgttcagatgcatatcctaactggatgcttctcaaggccttactgcatatttgtgttgcatatttatgttagttgcaccagggccatttgtagtttgggcaaccgaatgccttaattggaaaaaaggcattgtggtttcccctatgatctaaattgttacattttaccatttcattccgaagttggttttactttattaaatgaagatttagttttcatatcgtatacatagctgtatagatttcaaaattaggttgttaatttgtgtcacttactatttttgtgttggtaatgctttaaatgcatacttaaaaatgaagtactgttatctaagctactgtgtttagaaaatgttaagaatgagcagaaatttttatagaaaagtataaacggaagaagagataagatactgcgaataggccctcaaacttaaaaaagaaaaaactttgccagttttaaggacatattttgattctttcagtattcttaacacctttttaaacaaagttcttgatagtacccactattattgggtttgttttatgccattattgattcttgatattcaagcatttacaatgtagcatatttgattttcttttttctttctttttttggcatcattaacatttcatttgaaatgcatattgttcttgaagtactttgtttttagcataaatgttgtgcattttatcttagtgtttggatgaaaacatttgtgttgtttagctttcatttgctttgtatatttaataatgtacctttattttccagtatgcctacattttgtattgcacaataaatttattttaagctga

SEQ ID NO: 360224 - DNA, 3730 bp, Homo sapiens
tcaacatatgggtattaaataacatgaaaaaaagtttatataaatgttaaattactttagaactatttcctagatttaaaaatactaatgcagtatattataatagtagctttgaaattttgatattggcttgaaacttaactgtagtggtacctatattaacgtatttatgtctcttatttttttgcagcaaggagtaaataatgctgaaaaatttgactatgtcatgcagtttttgaataagatggctggtaatgaatatgttggattcagtaatgcaacgtttcagtctgaaagagaaagtggagatcgaaattttgcaataggatattacttaaaagaaaagaagtgttttccagaaggcacagacatggttggtatattagacttctacttccagctgtgctccattgaagtgacttgtgaatcagccagtgtgatggctgcgacactggctaatggtggtttctgcccaattactggtgaaagagtactgagccctgaagcagttcgaaatacattgagtttgatgcattcctgtggcatgtatgacttctcagggcagtttgctttccatgttggtcttcctgcaaaatctggagttgctgggggcattcttttagttgtccccaatgttatgggtatgatgtgctggtctcctcctctggataagatgggcaacagtgttaagggaattcacttttgtcacgatcttgtttctctgtgtaatttccataactatgataatttgagacactttgcaaaaaaacttgatcctcgaagagaaggtggtgatcaaagggtaaagtcagtgataaatcttttgtttgctgcatatactggagatgtgtctgcacttcgaagatttgctttgtcagctatggacatggaacagcgggactatgattctagaacagcactccatgtagctgctgcagagggtcatgttgaagttgttaaatttttgctggaagcctgcaaagtaaaccctttccccaaggacaggtggaataacactcccatggatgaagcactgcactttggacaccatgatgtatttaaaattctccaagaataccaagtccagtacacacctcaaggagattctgacaacgggaaggaaaatcaaaccgtccataagaatcttgatggattgttgtaatggtctcaaatcccaagatttaaatcacttacctatttaattgtggaaaatgattatgaagaacatgtgtatttctatctggtagtgatgtatattttacatttgtcatttcagtgttactggagttttcttcattgtgcacacaggacaaatctgatctctttgggaaaaaatagaaataaaacaatctccctccataatgtgagcaatattacctcgtgcattgtataatttgatgtaaaagaaatagttaccaatgctagcttgtgtggtcttccatgatttatttgtgttttgtgaattttcaatttatggtgatgatctgctgatatgcatttataaagtaagctctgttgtacagtctgtccaaatgggtcaaggttgcctttagaagcaaatagtgtgattttcaagacttcaaatacaaatttagtttaagtgtttgaacaactatatgcacttacggttgtgtgtttaaaatgtctctctctcaccctagcttcatgatgtgactcttaaaaaactataatagttaacaactgttagtaagatagaccaattctgattagactttatcagggaatctgtttaagatatgtttggtgaccaaaacgtatgtgtgaatgtagttataatgcttttgaaaaattttcctttttctatatccccttagtccagcctctcttctcagacatttagctatctgcctctttcctttagctgggaaagtgagagctggcatactatgcagtttttatgttttccatagtaagtcagaaaatgcctcctatttctggcatcagaactttgccatttgtctacagaagacgaaccagagacaaaattactaagtataaattagtcaagtttatcagtctaaaaagcgaagggatgtgcaactgcagctctttaagaagttttttttttttagcttctagggtaaagataaattcagaaatgctctaagctaccaaagttattctgaaagtatgggaactgctacaactaacaaacatttgtttccaagcctgtcattaagagtctgcatcaagagatttgtcctccttgggggaccactggatcattccagatttcttgtgatttttctattgtgtaattcttggtgggctctgtagtttaataataagaaaaaggccatttcattttaaattgtgacctataattctttgtcttgggttggtaattcaggattcatttggaaagtgggtaaaaggggcttcaaaaaacggatagaacaggattttctaggagttacacatacattttatcctgtcatacctcgagataaagtggcatgttagtgaggagttctgatattaagcacacacacacatgcacacaaatggacttctctgaagctgtgtttagtgaaatgagctcaagtacatgaatgttagttgttatcacatacagcaaattcctttttttttctttttctatgagcacactctgctgcttctaaactttacatgcctgatggcaccttactccagcagcctccaggtgctttcattttcacttccagtctaagccagtggctcctgccactgccctcccattacctagatggcacctcctttggtgaaaccacggccaatgttccttagctgcaccaggcccgaagctgttcccatgcttgagcttccatggggaggatgctgagtgagcagtttcctaccccgtggatctagcaagccatggagacaggtagcatttgtaagatgctgcacaggagcagcattatccccaaagatattacagggtagacacgttttaactgaaatcaatcaagataactttattcaaagagcagcccgctttgtgtgactaaaatgaaacaagacagttgaattgtgtgacttgaagattaccaatgattttgaggcttttctataataaaaagaggttctaaccattatttgggaacaaagagagttttcatcttttttcagatcaaaaccattctgtaaaatctttgttgtttaattaaatgtgccgttatttacccctgatgttatttatgactatgtgccgattcctgctcgggctgtttgctgttggctggtaataatatatttgatttaaatgctgttgactgtgctattaactgctgccgtcagtaaactccaaagatctttttgttttggctttagtatcatatgtgctttttctgtatcctgagcgctctatatgatcatgttaatttaaagctttatacacattgttgtttttgctggtctcatctttggtaatatgctataccccactgctgcccgacactgccctttagctgcagagctggattagctgttgaccatttgatgctgttgtctgtctggcagggactgaatgacctgatgtcagatttagattcttcctggggattacacagctatgaatgtatttgcttctaaaacctcccaaagtgaatctaatcttaaaactacaagttgtaagtattctgaaattgggaaacatttattttaaatgcaatcaggtagtgttgctttttacagcataataaatatatgtatcaaaaaaaaaaat

SEQ ID NO: 360225 - DNA, 1153 bp, Homo sapiens
tgcgtacctgggcgtatgcccttttcctaacactcactacaaaactaactaatactaacatctcagacgctcaggaaatagaaaccgtctgaactatcctgcccgccatcatcctagtcctcatcgccctcccatccctacgcatcctttacatacgcccaggtacgcaaacccgggacctcctttggtgaaaccacggccaatgttccttagctgcaccaggcccgaagctgttcccatgcttgagcttccatggggaggatgctgagtgagcagtttcctaccccgtggatctagcaagccatggagacaggtagcatttgtaagatgctgcacaggagcagcattatccccaaagatattacagggtagacacgttttaactgaaatcaatcaagataactttattcaaagagcagcccgctttgtgtgactaaaatgaaacaagacagttgaattgtgtgacttgaagattaccaatgattttgaggcttttctataataaaaagaggttctaaccattatttgggaacaaagagagttttcatcttttttcagatcaaaaccattctgtaaaatctttgttgtttaattaaatgtgccgttatttacccctgatgttatttatgactatgtgccgattcctgctcgggctgtttgctgttggctggtaataatatatttgatttaaatgctgttgactgtgctattaactgctgccgtcagtaaactccaaagatctttttgttttggctttagtatcatatgtgctttttctgtatcctgagcgctctatatgatcatgttaatttaaagctttatacacattgttgtttttgctggtctcatctttggtaatatgctataccccactgctgcccgacactgccctttagctgcagagctggattagctgttgaccatttgatgctgttgtctgtctggcagggactgaatgacctgatgtcagatttagattcttcctggggattacacagctatgaatgtatttgcttctaaaacctcccaaagtgaatctaatcttaaaactacaagttgtaagtattctgaaattgggaaacatttattttaaatgcaatcaggtagtgttgctttttacagcataataaatatatgtatcaaaaaaaaaaat

SEQ ID NO: 360226 - DNA, 2385 bp, Homo sapiens
  misc_feature (1662)..(1663): n is a, c, g, or t
agcggagtgcggagccttaggcggagcgaagagaaccggtcgcggcaatcctagcgccgcagcagcagcagcagcagcagcagcagcagcagcagcagcagcagcacccgcatccgctgcgggagtccgagccggaaccacacccaagtagctgccctttcctcttctgtcatctcaccgccccaccacagaccgcgttccccgaggaaaccggccgcccacgcccggagcatcctcccctgttgagcgggcgctgacggacccggcggcatgatgcggctgcgaggctcggggatgctgcgggacctgctcctgcggtcgcccgccggcgtgagcgcgactctgcggcgggcacagcccttggtcaccctgtgccggcgtccccgaggcgggggacggccggccgcgggcccggctgccgccgcgcgactccacccgtggtggggcgggggcggctggccggcggagcccctcgcgcggggcctgtccagctctccttcggagatcttgcaggagctgggcaaggggagcacgcatccgcagcccggggtgtcgccacccgctgccccggcggcgcccggccccaaggacggccccggggagacggacgcgtttggcaacagcgagggcaaagagctggtggcctcaggtgaaaataaaataaaacagggtctgttacctagcttggaagatttgctgttctatacaattgctgaaggacaagagaaaatacctgttcataaatttattacagtaagtttttatatttttctatcttaacttaaaaaaatcaataataataaatatatacagtattattgaaatatagtcttaaaggtcgtctgacatgtagattctgactgacaatatttctcttattatgttttcaaatttttgtcatgctcatttcaaggtaatcagtgaaagaaaaagaaagaaacaatgagaaacttgtccagaaagtgggtaatagtgacactaagatgccatattcatgttcaagtgttgggtagaagtttttatatacaggaataaaatcttatagttggtataagcatatacattatttgcactatatatttacaaactcttatttttttaaaaacaggcactcaaatctacaggattgcgaacgtctgatcccaggttgaaagagtgtatggatatgttaagattaactcttcaaacaacatcagatggtgtcatgctagacaaagatctttttaaaaagtaaaagtttctgccaaacctttaatggtgatttgctatgctatacggtgattctgcttttaaaacaaaattgcatctttgaaggccactgcttcctgtgtaatggaaaaaggggatttataaacatcatttgtttgaagaacttggtacatattagtcataatacaccgggctaagagtattctttctttaaatctgttctaagcaaatttagccaccgatgtttccagtttacagtacttggagattgcattcagtttgagtagagcacatcctttgtcctgtcattgcttatattgatccccaattcatctgcatgacttgcacgctttctcagcatggtctctagttcttttccacaaggtgatttaggtgacatcataaaatgagagggcttcagacagacctgtgttcctcacatttacatacctnnattgtctgctcctctcctctcttcagacatattgatacataggcttttggctattttcattttcttcaaaacagtaaagaactaaaggcaactttggcgattaaagccttgatttggttgaatgagaatttttactttgatgttcctgtatttgcatatatttattatttatcttcattaatgtgtttctattagtttgattacttaaagatttaatggacatgtgtgtaatggatcccaaagaatcaaatagtattttaaactactactatttaagtagaaactagtataaaactgtaaatactactataagacattggctttttccagacatggatccaaaaaatttctgcatctactttgaaagtttgttatgtatggttgtatttacttttgttttatcttcttttgggggttgggtgatttgttctagatgtctcctggagtatgaagtcatctgaaggtataagtatttaactgtggttctctgaagtttcctggcatgctgtgaagcactgctgacagcttgggtttcttatcttttcacgaggaggttcttgtttctgttaacttagctgaccttaaagtgtagactttaggtccgtgttgcagttggtattaggaattttgacttccagaacctgctttttaagagacagaaaaacatcatttctaaatttatttgtgtctttgcggtaaggattatttttcgtgttcatgaa

SEQ ID NO: 360227 - DNA, 1857 bp, Homo sapiens
agcggagtgcggagccttaggcggagcgaagagaaccggtcgcggcaatcctagcgccgcagcagcagcagcagcagcagcagcagcagcagcagcagcagcagcacccgcatccgctgcgggagtccgagccggaaccacacccaagtagctgccctttcctcttctgtcatctcaccgccccaccacagaccgcgttccccgaggaaaccggccgcccacgcccggagcatcctcccctgttgagcgggcgctgacggacccggcggcatgatgcggctgcgaggctcggggatgctgcgggacctgctcctgcggtcgcccgccggcgtgagcgcgactctgcggcgggcacagcccttggtcaccctgtgccggcgtccccgaggcgggggacggccggccgcgggcccggctgccgccgcgcgactccacccgtggtggggcgggggcggctggccggcggagcccctcgcgcggggcctgtccagctctccttcggagatcttgcaggagctgggcaaggggagcacgcatccgcagcccggggtgtcgccacccgctgccccggcggcgcccggccccaaggacggccccggggagacggacgcgtttggcaacagcgagggcaaagagctggtggcctcaggtgaaaataaaataaaacagggtctgttacctagcttggaagatttgctgttctatacaattgctgaaggacaagagaaaatacctgttcataaatttattacagcactcaaatctacaggattgcgaacgtctgatcccaggttgaaagagtgtatggatatgttaagattaactcttcaaacaacatcagatggtgtcatgctagacaaagatctttttaaaaaatgtgttcagagcaacattgttttgttgacacaagcatttagaagaaagtttgtgattcctgactttatgtcttttacctcacacattgatgagttatatgaaagtgctaaaaagcagtctggaggaaaggttgcagattatattcctcaactggccaaattcagtcccgatttgtggggtgtgtctgtttgtacagtagatggacagaggcattctactggagataccaaagttcccttctgtcttcagtcctgtgtaaaacctttgaaatatgccattgctgttaatgatcttggaactgaatatgtgcatcgatatgttggaaaagagccgagtggactaagattcaacaaactatttttgaatgaagatgataaaccacataatcctatggtaaatgctggagcaattgttgtgacttcactaataaagcaaggagtaaataatgctgaaaaatttgactatgtcatgcagtttttgaataagatggctggtaatgaatatgttggattcagtaatgcaacgtttcagtctgaaagagaaagtggagatcgaaattttgcaataggatattacttaaaagaaaagaagtgttttccagaaggcacagacatggttggtatattagacttctacttccagctgtgctccattgaagtgacttgtgaatcagccagtgtgatggctgcgacactggctaatggtggtttctgcccaattactggtgaaagagtactgagccctgaagcagttcgaaatacattgagtttgatgcattcctgtggcatgtatgacttctcagggcagtttgctttccatgtaagtaattgtttaatcttattttctctggcaagaaactagtctgaactggttcttttaaaaatgcagtttgaactttgcttctaaagctgtatattaatttttgagagagaggcttgttttcaaggttaatttgttacaagattagtaaggaatagagat

SEQ ID NO: 360228 - DNA, 1359 bp, Homo sapiens
agcggagtgcggagccttaggcggagcgaagagaaccggtcgcggcaatcctagcgccgcagcagcagcagcagcagcagcagcagcagcagcagcagcagcagcacccgcatccgctgcgggagtccgagccggaaccacacccaagtagctgccctttcctcttctgtcatctcaccgccccaccacagaccgcgttccccgaggaaaccggccgcccacgcccggagcatcctcccctgttgagcgggcgctgacggacccggcggcatgatgcggctgcgaggctcggggatgctgcgggacctgctcctgcggtcgcccgccggcgtgagcgcgactctgcggcgggcacagcccttggtcaccctgtgccggcgtccccgaggcgggggacggccggccgcgggcccggctgccgccgcgcgactccacccgtggtggggcgggggcggctggccggcggagcccctcgcgcggggcctgtccagctctccttcggagatcttgcaggagctgggcaaggggagcacgcatccgcagcccggggtgtcgccacccgctgccccggcggcgcccggccccaaggacggccccggggagacggacgcgtttggcaacagcgagggcaaagagctggtggcctcaggtgaaaataaaataaaacagggtctgttacctagcttggaagatttgctgttctatacaattgctgaaggacaagagaaaatacctgttcataaatttattacagcactcaaatctacaggattgcgaacgtctgatcccaggttgaaagagtgtatggatatgttaagattaactcttcaaacaacatcagatggtgtcatgctagacaaagatctttttaaaaaatgtgttcagagcaacattgttttgttgacacaagcatttagaagaaagtttgtgattcctgactttatgtcttttacctcacacattgatgagttatatgaaagtgctaaaaagcagtctggaggaaaggttgcagattatattcctcaactggccaaattcagtcccgatttgtggggtgtgtctgtttgtacagtagatggacagaggcattctactggagataccaaagttcccttctgtcttcagtcctgtgtaaaacctttgaaatatgccattgctgttaatgatcttggaactgaatatgtgcatcgatatgttggaaaagagccgagtggactaagattcaacaaactatttttgaatgaagatggtaagaattacataaacattggttgaaaaaagaaatgtctcattttcctatgtaaatctaagtcgttttaaacattttttgattaaaattaaaagtatttgtcatgtgat

SEQ ID NO: 360229 - DNA, 315 bp, Homo sapiens
tattattagtagagatggggtttcaccatgttggccaggctggtctcgaactcccgacctcaagtgatacacctgcctcggcctcccaaagtgctgagattacaggcgtgaaccaccatgcccagccaagaaatggggatctggtttgctaataacccaacctaaaacttcaaacaagccttcttccacttccaacactttggaaattctgagggcctctgacagaggtgaaggtgataggcactgttatctgcaatgtaactggctcctcttggtgattacagttttcttatgttgaattttggataactttat

SEQ ID NO: 360230 - DNA, 5713 bp, Homo sapiens
  misc_feature (9)..(9): n is a, c, g, or t
  misc_feature (11)..(11): n is a, c, g, or t
  misc_feature (34)..(34): n is a, c, g, or t
  misc_feature (39)..(39): n is a, c, g, or t
  misc_feature (42)..(42): n is a, c, g, or t
  misc_feature (54)..(57): n is a, c, g, or t
  misc_feature (63)..(65): n is a, c, g, or t
  misc_feature (69)..(69): n is a, c, g, or t
  misc_feature (79)..(79): n is a, c, g, or t
  misc_feature (84)..(84): n is a, c, g, or t
  misc_feature (90)..(90): n is a, c, g, or t
  misc_feature (4105)..(4105): n is a, c, g, or t
acttgaacncnggaggtggaggttgcagtgagcngagantgngccactgcactnnnncctggnnnacanagcaagactntgttnaaaaanaaagaacagggaaaaagcaacaagaaggaagagcaatggcgacactggatcgcaaagtgcccagtccggaggcgtttctgggcaaaccctggtcctcctggatcgacgccgccaaattacactgctccgacaatgtagatttagaagaggctggaaaagagggtggaaaaagcagggaggttatgaggcttaataaagaagatatgcacttatttggccattacccagcacatgacgacttctatctcgtagtgtgcagtgcctgtaaccaggtcgtcaagccacaggttttccagtcgcactgcgagagaagacacggttcaatgtgtagaccttctccctctccagtgtctccagcctccaatcccaggacatcactagtacaggtgaaaacaaaagcctgtctcagcggccatcactctgccagcagcacctcaaagccattcaaaacgcccaaagacaatctacttacctccagcagcaaacagcacacagtctttcctgcgaaaggatcaagggataaaccatgtgttccagttcctgtagtcagtttagagaaaattcctaacctagtgaaggcagatggtgccaatgtcaaaatgaactccacaaccactactgcagtttctgcctcctccacctcgtcctctgccgtctccacccctcctttaattaagcctgtcctgatgtccaagtcagtgccaccttcaccagagaagatcttaaatggcaaaggaattctgccaaccaccatagacaagaaacaccaaaatggcaccaaaaacagcaacaagccttacaggagactttcagagagagaatttgacccaaataaacactgtggagtattggatcccgagacaaagaaaccttgcacaagatccctcacctgcaagacacattcgctaagccatcggagggcagtcccaggccggaaaaagcaatttgacctcctcctggcagaacacaaagcaaagtcccgggaaaaagaagttaaagataaagagcatctcctgacttccacgagggaaatacttccaagccaatccgggccggcacaggattctctgctagggtcttcagggagctctgggccagaaccaaaagttgcatcccctgcaaaatccagaccacccaactctgtacttcctagaccatcatctgcaaatagcataagcagcagcacatcttcaaatcatagcggccacactccagagcccccactcccaccggttggaggtgacctcgccagccgactgtccagtgatgaaggggagatggacggagccgacgaatccgagaagctagactgtcagttctccacgcaccaccccagacctctggcgttttgctcatttgggagtcgcctcatgggacgagggtactatgtgtttgatagaagatgggatcgttttcgattcgcactaaactccatggtagaaaaacacctgaattcacagatgtggaagaagatccctcctgcggcagatagccccctgccctcgccagcagcccacatcaccacccccgttccagcatccgttttgcagcctttcagcaaccccagtgctgtgtatcttccttcagctcccatcagctcgaggctcacctcttcttacataatgacatcagccatgctctcaaacgcagctttcgtgacatcgccggacccgagcgccctcatgtcccacaccacagctttccctcatgtggccgcaaccctcagcatcatggactcaaccttcaaggccccatccgccgtgtccccgataccagccgtcatcccttccccatcccacaagccatccaaaaccaaaaccagcaaatcctcaaaagtcaaagacctgtccacccgtagcgacgagtctccaagtaacaaaaaaaggaagccacagtcttcgacttcctcctcctcctcctcctcctcctcttccttgcagacatccctctcgtctccactgtcagggcctcacaaaaagaactgtgttttgaatgccagttctgctttgaactcctatcaggcggcccctccctataacagcctgtctgtgcacaactcaaacaatggggtgagcccactcagtgccaaactggagccctcaggacggacctcgctgcccggcggccccgcggacatagtgagacaggtgggcgcggtgggaggcagcagtgactcctgtcccctctctgtgccctcccttgcgctccacgcaggggacctctctctggcctcacacaatgctgtgtcttctctgcccctctcttttgacaaatcagaaggaaaaaagcgtaagaactcgagttctagtagcaaagcctgtaaaatcactaaaatgcctggtatgaatagcgttcacaaaaagaacccgcccagccttctcgcaccggtgcccgatcccgttaacagcacctcctctcggcaggttgggaaaaatagcagcctagctttgtcacaatccagtccttcaagtatatccagcccaggacacagccgacagaacacaaacagaacgggcaggataaggactcttccataacaagactatgaagccacttccacatcaattccaggccacctaatcccatccgaggaggccatggggaggaggagggaggggagtgggctggggggagagtctgttttctgtgcactccctgtgactctggcctttcttcttctttttttaattgaccaatttttagttaaaaaggcaaaagaaggtgaatttgagatttacagaaaacagttccagtgtttggtttccgctgtctttcctttcatttgccatgtttttacattcttccaaatttggggtcactcccctagctcctgatgctgctactgtaccatccttttgctccagccatgagagcagacattgcagaatgttggttccaggttggcatgctctgaagctcttgaactgtagcacaggcagagccctttttcttcctgtcatctccacccgattccttccatccctacgtctaccactctctgggtcctcactggtcttcaaaggacctggctctcataggatcccctcaggattgtgtgcagggagagggggctttgctggggaggagctgggagtggagagttggagggtgggtggggttccctcatccagtttccacagcccaccatggctggagccaaatgctagaagcgagattgagaacagtggccgtttagtgatgtggtttacctaataccactgtccagctgtgcagctcagaaaggataaaccagtcagggacaggggccagaacaggtttgggaaggtggcagcaagcagagcatggtgggtaggagatgatccctaaaaaaactggagactgtggtggtctgagctggtcaggaatctgcagaatcccttccaggaatcagtgtgccagtgcccacagcagggtgagctaggagggagaaatcccaggaaaaaggtcgtgagaacccagaaagccactccatgaggaggcacggtgaccacagctgctaaaggttcttaggctgccttcctgggctaggaagagccccccagggagagcttccacaaaagggtatgtgtcaaaccttttgtcagaataaataatagcatttcccacccacccccatgccctgggccacagggacttggtgggatcagcacacccatggatcagcttttgctgtcttagagacagccatccccatgaaggaatggtaaggacagccactgctcagtgaagaacagccatttggaagagccacgctggagccctgcagccatagaactattcacactggagttttaaaagaaacagcaataccataagctctagtagggaatcataatcaggaaaggaattcacaacataaaataggtgttctgtgctattaatcatgtaactttgtatatgatgtatagcaaagatactgggaggttttgtttcatccttaaatcagaaatgaatgctagtttcatagctgggcagaaccctcatccccaccccaaagttttccttttctttcccnttcccccaacccaaagatcagactactgttaagtttcaccacacaattggaattgcaaagacgggaggcaaatggagtgattttcatcaatggaattgcactgacagtgagtgtttcttataggattactaaattttttaatataaaatgatttgtttaaaaatcaggagttgatattaagtaccaggacattagttcggatgatttcatttttatttctacagtgttaaaagtgcacttatatgctggtttatttacgtcttgggaaaagagactgcaaattgaagggatgattgttactttttctttttttaaaaaaaaaaggttaaggagattttaagacttataaatgtttaagaaattataaacaaggttagaccctttgaaaaaaagtttagaagatattcttaaagtaaatttttatagtgttaattttgtaataatttatgttttactatattacagagctaactgaccagaatagtttcagaaacaatatgaaacttaggaaagtttaagcaatgtttatatttttaaaatgttctttgaattatgtttttattgtacatttcttcagactgaaaagtatgtacatatctttgttatttttgcacaattttgtcttgttcggtttcagaggtctgttgttttttataatttattttgagttgtaaaacttgcaggagtaaaaacaaaaaacaaaatctccacaacaaaataaccctctgatttataaactcttatagtcaaagagggaaaacaaaggttgagagattaagtggctgcttctgagaaataatgtctcaaggactaaaggagcaattcaataggtttagacattgtagctctctacatcttgaattggaagctggaataaagagcccccaccccccccccaccctcatcgaatgctgcttactttgtcaaaagactggctatgaccaaggtgaggatatttctggaaaactgggcaaaaagggaaagcccacagtattcttccttggcagtcaaccacaggtttactttacaatgatgtattaaaaacttgcagcttgaaaaatggaatgcaaataaaaggttctctttgggtttgtcttaatggagttaaactggagcagcctataaaacatttttagggtgatgtcctctgggtccttctgttctgcacacccactcagtcttctctcccagccccttgactgcacacacccctctttgcctgaagatctcctgacttgtcgccagccatagaggctcgaaagctctggttgtgaagcataacgcaatgcatagacctgtcagccataaaaaaaaaaaaaaaaaaaaaaaaaaaagcgacttggataacttgtatgccttcttttgtatcaatgtaccaattgtaaataatgctgatcaacctttgtagagaatagtttatacagcatattctattattgctgattctcagtgaactcttgttttaaaaaaggaaaaaaagaaattttctatttacaccttatattttgttatgctgtcggcccatggcactttaacaaaactctgtgggttttacgtagctggtcagtcatggggtatattaaataactgttgttgcacagacaagaa

SEQ ID NO: 360231 - DNA, 338 bp, Homo sapiens
gctttttcaaaacacacttgttttcatttcccccacagatatgcacttatttggccattacccagcacatgacgacttctatctcgtagtgtgcagtgcctgtaaccaggtcgtcaagccacaggttttccagtcgcactgcggtaagtggacccctgcaccgtcggccacatctgcagctgccgccctggggacagtcgccttcccctgggctccccgacagggtctcgccatgtcttgtctcagcctgaggctgtgggtaaagtcttcctgggctgctgcctctgctcgcaggctgttttaggagctgtagtccatctgctgaaatccgcagccct

SEQ ID NO: 360232 - DNA, 5591 bp, Homo sapiens
  misc_feature (9)..(9): n is a, c, g, or t
  misc_feature (11)..(11): n is a, c, g, or t
  misc_feature (34)..(34): n is a, c, g, or t
  misc_feature (39)..(39): n is a, c, g, or t
  misc_feature (42)..(42): n is a, c, g, or t
  misc_feature (54)..(57): n is a, c, g, or t
  misc_feature (63)..(65): n is a, c, g, or t
  misc_feature (69)..(69): n is a, c, g, or t
  misc_feature (79)..(79): n is a, c, g, or t
  misc_feature (84)..(84): n is a, c, g, or t
  misc_feature (90)..(90): n is a, c, g, or t
  misc_feature (3983)..(3983): n is a, c, g, or t
acttgaacncnggaggtggaggttgcagtgagcngagantgngccactgcactnnnncctggnnnacanagcaagactntgttnaaaaanaaagaacagggaaaaagcaacaagaaggaagagcaatggcgacactggatcgcaaagtgcccagtccggaggcgtttctgggcaaaccctggtcctcctggatcgacgccgccaaattacactgctccgacaatgtagatttagaagaggctggaaaagagggtggaaaaagcagggaggttatgaggcttaataaagaagatatgcacttatttggccattacccagcacatgacgacttctatctcgtagtgtgcagtgcctgtaaccaggtcgtcaagccacaggttttccagtcgcactgcgagagaagacacggttcaatgtgtagaccttctccctctccagtgtctccagcctccaatcccaggacatcactagtacaggtgaaaacaaaagcctgtctcagcggccatcactctgccagcagcacctcaaagccattcaaaacgcccaaagacaatctacttacctccagcagcaaacagcacacagtctttcctgcgaaaggatcaagggataaaccatgtgttccagttcctgtagtcagtttagagaaaattcctaacctagtgaaggcagatggtgccaatgtcaaaatgaactccacaaccactactgcagtttctgcctcctccacctcgtcctctgccgtctccacccctcctttaattaagcctgtcctgatgtccaagtcagtgccaccttcaccagagaagatcttaaatggcaaaggaattctgccaaccaccatagacaagaaacaccaaaatggcaccaaaaacagcaacaagccttacaggagactttcagagagagaatttgacccaaataaacactgtggagtattggatcccgagacaaagaaaccttgcacaagatccctcacctgcaagacacattcgctaagccatcggagggcagtcccaggccggaaaaagcaatttgacctcctcctggcagaacacaaagcaaagtcccgggaaaaagaagttaaagataaagagcatctcctgacttccacgagggaaatacttccaagccaatccgggccggcacaggattctctgctagggtcttcagggagctctgggccagaaccaaaagttgcatcccctgcaaaatccagaccacccaactctgtacttcctagaccatcatctgcaaatagcataagcagcagcacatcttcaaatcatagcggccacactccagagcccccactcccaccggttggaggtgacctcgccagccgactgtccagtgatgaaggggagatggacggagccgacgaatccgagaagctagactgtcagttctccacgcaccaccccagacctctggcggaagatccctcctgcggcagatagccccctgccctcgccagcagcccacatcaccacccccgttccagcatccgttttgcagcctttcagcaaccccagtgctgtgtatcttccttcagctcccatcagctcgaggctcacctcttcttacataatgacatcagccatgctctcaaacgcagctttcgtgacatcgccggacccgagcgccctcatgtcccacaccacagctttccctcatgtggccgcaaccctcagcatcatggactcaaccttcaaggccccatccgccgtgtccccgataccagccgtcatcccttccccatcccacaagccatccaaaaccaaaaccagcaaatcctcaaaagtcaaagacctgtccacccgtagcgacgagtctccaagtaacaaaaaaaggaagccacagtcttcgacttcctcctcctcctcctcctcctcctcttccttgcagacatccctctcgtctccactgtcagggcctcacaaaaagaactgtgttttgaatgccagttctgctttgaactcctatcaggcggcccctccctataacagcctgtctgtgcacaactcaaacaatggggtgagcccactcagtgccaaactggagccctcaggacggacctcgctgcccggcggccccgcggacatagtgagacaggtgggcgcggtgggaggcagcagtgactcctgtcccctctctgtgccctcccttgcgctccacgcaggggacctctctctggcctcacacaatgctgtgtcttctctgcccctctcttttgacaaatcagaaggaaaaaagcgtaagaactcgagttctagtagcaaagcctgtaaaatcactaaaatgcctggtatgaatagcgttcacaaaaagaacccgcccagccttctcgcaccggtgcccgatcccgttaacagcacctcctctcggcaggttgggaaaaatagcagcctagctttgtcacaatccagtccttcaagtatatccagcccaggacacagccgacagaacacaaacagaacgggcaggataaggactcttccataacaagactatgaagccacttccacatcaattccaggccacctaatcccatccgaggaggccatggggaggaggagggaggggagtgggctggggggagagtctgttttctgtgcactccctgtgactctggcctttcttcttctttttttaattgaccaatttttagttaaaaaggcaaaagaaggtgaatttgagatttacagaaaacagttccagtgtttggtttccgctgtctttcctttcatttgccatgtttttacattcttccaaatttggggtcactcccctagctcctgatgctgctactgtaccatccttttgctccagccatgagagcagacattgcagaatgttggttccaggttggcatgctctgaagctcttgaactgtagcacaggcagagccctttttcttcctgtcatctccacccgattccttccatccctacgtctaccactctctgggtcctcactggtcttcaaaggacctggctctcataggatcccctcaggattgtgtgcagggagagggggctttgctggggaggagctgggagtggagagttggagggtgggtggggttccctcatccagtttccacagcccaccatggctggagccaaatgctagaagcgagattgagaacagtggccgtttagtgatgtggtttacctaataccactgtccagctgtgcagctcagaaaggataaaccagtcagggacaggggccagaacaggtttgggaaggtggcagcaagcagagcatggtgggtaggagatgatccctaaaaaaactggagactgtggtggtctgagctggtcaggaatctgcagaatcccttccaggaatcagtgtgccagtgcccacagcagggtgagctaggagggagaaatcccaggaaaaaggtcgtgagaacccagaaagccactccatgaggaggcacggtgaccacagctgctaaaggttcttaggctgccttcctgggctaggaagagccccccagggagagcttccacaaaagggtatgtgtcaaaccttttgtcagaataaataatagcatttcccacccacccccatgccctgggccacagggacttggtgggatcagcacacccatggatcagcttttgctgtcttagagacagccatccccatgaaggaatggtaaggacagccactgctcagtgaagaacagccatttggaagagccacgctggagccctgcagccatagaactattcacactggagttttaaaagaaacagcaataccataagctctagtagggaatcataatcaggaaaggaattcacaacataaaataggtgttctgtgctattaatcatgtaactttgtatatgatgtatagcaaagatactgggaggttttgtttcatccttaaatcagaaatgaatgctagtttcatagctgggcagaaccctcatccccaccccaaagttttccttttctttcccnttcccccaacccaaagatcagactactgttaagtttcaccacacaattggaattgcaaagacgggaggcaaatggagtgattttcatcaatggaattgcactgacagtgagtgtttcttataggattactaaattttttaatataaaatgatttgtttaaaaatcaggagttgatattaagtaccaggacattagttcggatgatttcatttttatttctacagtgttaaaagtgcacttatatgctggtttatttacgtcttgggaaaagagactgcaaattgaagggatgattgttactttttctttttttaaaaaaaaaaggttaaggagattttaagacttataaatgtttaagaaattataaacaaggttagaccctttgaaaaaaagtttagaagatattcttaaagtaaatttttatagtgttaattttgtaataatttatgttttactatattacagagctaactgaccagaatagtttcagaaacaatatgaaacttaggaaagtttaagcaatgtttatatttttaaaatgttctttgaattatgtttttattgtacatttcttcagactgaaaagtatgtacatatctttgttatttttgcacaattttgtcttgttcggtttcagaggtctgttgttttttataatttattttgagttgtaaaacttgcaggagtaaaaacaaaaaacaaaatctccacaacaaaataaccctctgatttataaactcttatagtcaaagagggaaaacaaaggttgagagattaagtggctgcttctgagaaataatgtctcaaggactaaaggagcaattcaataggtttagacattgtagctctctacatcttgaattggaagctggaataaagagcccccaccccccccccaccctcatcgaatgctgcttactttgtcaaaagactggctatgaccaaggtgaggatatttctggaaaactgggcaaaaagggaaagcccacagtattcttccttggcagtcaaccacaggtttactttacaatgatgtattaaaaacttgcagcttgaaaaatggaatgcaaataaaaggttctctttgggtttgtcttaatggagttaaactggagcagcctataaaacatttttagggtgatgtcctctgggtccttctgttctgcacacccactcagtcttctctcccagccccttgactgcacacacccctctttgcctgaagatctcctgacttgtcgccagccatagaggctcgaaagctctggttgtgaagcataacgcaatgcatagacctgtcagccataaaaaaaaaaaaaaaaaaaaaaaaaaaagcgacttggataacttgtatgccttcttttgtatcaatgtaccaattgtaaataatgctgatcaacctttgtagagaatagtttatacagcatattctattattgctgattctcagtgaactcttgttttaaaaaaggaaaaaaagaaattttctatttacaccttatattttgttatgctgtcggcccatggcactttaacaaaactctgtgggttttacgtagctggtcagtcatggggtatattaaataactgttgttgcacagacaagaa

SEQ ID NO: 360233 - DNA, 3077 bp, Homo sapiens
cagggccctcatccaggagccaggaaacatctactaccacgagtcgcgttgcccagcgtgtgtcagcctccttatccaaacggcaaggcagcctccccgggatgtagagaagacacggttcaatgtgtagaccttctccctctccagtgtctccagcctccaatcccaggacatcactagtacaggtgaaaacaaaagcctgtctcagcggccatcactctgccagcagcacctcaaagccattcaaaacgcccaaagacaatctacttacctccagcagcaaacagcacacagtctttcctgcgaaaggatcaagggataaaccatgacatcactgggcagggaggggaatctacttgatgccaagagaaccatgtttcttaaagccagaggacccgccttgatctagaaagataaattcagacaggccaagcacaaaggaagaagacgtgggcaactaaagcagcacaaaagaaacagagtgttccagttcctgtagtcagtttagagaaaattcctaacctagtgaaggcagatggtgccaatgtcaaaatgaactccacaaccactactgcagtttctgcctcctccacctcgtcctctgccgtctccacccctcctttaattaagcctgtcctgatgtccaagtcagtgccaccttcaccagagaagatcttaaatggcaaaggaattctgccaaccaccatagacaagaaacaccaaaatggcaccaaaaacagcaacaagccttacaggagactttcagagagagaatttgacccaaataaacactgtggagtattggatcccgagacaaagaaaccttgcacaagatccctcacctgcaagacacattcgctaagccatcggagggcagtcccaggccggaaaaagcaatttgacctcctcctggcagaacacaaagcaaagtcccgggaaaaagaagttaaagataaagagcatctcctgacttccacgagggaaatacttccaagccaatccgggccggcacaggattctctgctagggtcttcagggagctctgggccagaaccaaaagttgcatcccctgcaaaatccagaccacccaactctgtacttcctagaccatcatctgcaaatagcataagcagcagcacatcttcaaatcatagcggccacactccagagcccccactcccaccggttggaggtgacctcgccagccgactgtccagtgatgaaggggagatggacggagccgacgaatccgagaagctagactgtcagttctccacgcaccaccccagacctctggcgttttgctcatttgggagtcgcctcatgggacgagggtactatgtgtttgatagaagatgggatcgttttcgattcgcactaaactccatggtagaaaaacacctgaattcacagatgtggaagcacagaaacccgagccacagggcatcaggtccctcccccctgttcaggacttgcctaaccaatctgctgtcactgagcaacattggggctgcctgggtgtcaactctggagagcgtagcaccccgctaccctctcaacctcgctgcccaaaccccaggccccggcgggcccgaacctggagggatggcagccgatgggggcgtggaagacattaggaagaaaaggaacggccaagactcttttttctttaacaagcatttaactctgcatcaggagccgccaacacagtattctctttcagccaggaagatccctcctgcggcagatagccccctgccctcgccagcagcccacatcaccacccccgttccagcatccgttttgcagcctttcagcaaccccagtgctgtgtatcttccttcagctcccatcagctcgaggctcacctcttcttacataatgacatcagccatgctctcaaacgcagctttcgtgacatcgccggacccgagcgccctcatgtcccacaccacagctttccctcatgtggccgcaaccctcagcatcatggactcaaccttcaaggccccatccgccgtgtccccgataccagccgtcatcccttccccatcccacaagccatccaaaaccaaaaccagcaaatcctcaaaagtcaaagacctgtccacccgtagcgacgagtctccaagtaacaaaaaaaggaagccacagtcttcgacttcctcctcctcctcctcctcctcctcttccttgcagacatccctctcgtctccactgtcagggcctcacaaaaagaactgtgttttgaatgccagttctgctttgaactcctatcaggcggcccctccctataacagcctgtctgtgcacaactcaaacaatggggtgagcccactcagtgccaaactggagccctcaggacggacctcgctgcccggcggccccgcggacatagtgagacaggtgggcgcggtgggaggcagcagtgactcctgtcccctctctgtgccctcccttgcgctccacgcaggggacctctctctggcctcacacaatgctgtgtcttctctgcccctctcttttgacaaatcagaaggaaaaaagcgtaagaactcgagttctagtagcaaagcctgtaaaatcactaaaatgcctggtatgaatagcgttcacaaaaagaacccgcccagccttctcgcaccggtgcccgatcccgttaacagcacctcctctcggcaggtaagggacctcctggcaccgccttcaccggctctggggggcagggggagctgggcagcgcccctgcttagccgggcggctccgacaggtaacacaagcttgattcctgttctcgttttccccgaaggcagttttcaccctctgctttgagagcactttactgaacaagtacttgataccacgctcactatgtgctagacactgttctcggcactttacggttgttacctcactgagtcctcacgacaccccagtgcagtgagtgcagttatcactttacagatgagtaaactgaggcacagagagattctgagttccccactccacatcggtcagttttatcttttgaggttctgagaacattgtcattaaagagttctgttgctaaaaaaatt

SEQ ID NO: 360234 - DNA, 1132 bp, Homo sapiens
  misc_feature (9)..(9): n is a, c, g, or t
  misc_feature (11)..(11): n is a, c, g, or t
  misc_feature (34)..(34): n is a, c, g, or t
  misc_feature (39)..(39): n is a, c, g, or t
  misc_feature (42)..(42): n is a, c, g, or t
  misc_feature (54)..(57): n is a, c, g, or t
  misc_feature (63)..(65): n is a, c, g, or t
  misc_feature (69)..(69): n is a, c, g, or t
  misc_feature (79)..(79): n is a, c, g, or t
  misc_feature (84)..(84): n is a, c, g, or t
  misc_feature (90)..(90): n is a, c, g, or t
acttgaacncnggaggtggaggttgcagtgagcngagantgngccactgcactnnnncctggnnnacanagcaagactntgttnaaaaanaaagaacagggaaaaagcaacaagaaggaagagcaatggcgacactggatcgcaaagtgcccagtccggaggcgtttctgggcaaaccctggtcctcctggatcgacgccgccaaattacactgctccgacaatgtagatttagaagaggctggaaaagagggtggaaaaagcagggaggttatgaggcttaataaagaagatatgcacttatttggccattacccagcacatgacgacttctatctcgtagtgtgcagtgcctgtaaccaggtcgtcaagccacaggttttccagtcgcactgcgccgggcctgcaactgttccaccttctggatcctccttcagcttctctgactcctgggccaggtgtgtgcatttagctccatgctgaagagctgcagcttctgcaggacatttgtaccatcgaggtcaaaggcaacaagaagtgacatgagtttcagtccatcttcatgaggttccagttaaggcctgtgaattcgcaattgttcttcccgactgcctgtcctgtgaacctcacatactcacatcagatgcaaaaacaaccaccttgtagaagctgcttaaccagctcttactattgcaaaaggtcaatacctgaaataaattcatgtaaatgctgatagatatgtctgtactgtattaatccttgtgttctgcttcttcccttgagagctgatatgggtggttttcaagattatggttgtttgaaggattgctatctaccgaaggaggcccagtataagaaagagattccagtgattttgatccatggaaaggcagagctgacggctccctgtctctacccccacatccccagggggacacctgaggggcaccctttgaaaatccttggtagatgagtagtcttcaagtctagtggtaaatgggaggcccctgaggagaatctgaaaaatgcaaattcctgggtttacctcagatccagaaatccagctatcaaatgaccaatctgaaggtgagactttttttttttctttgagacaggatctcactctgttgccc

SEQ ID NO: 360235 - DNA, 761 bp, Homo sapiens
  misc_feature (9)..(9): n is a, c, g, or t
  misc_feature (11)..(11): n is a, c, g, or t
  misc_feature (34)..(34): n is a, c, g, or t
  misc_feature (39)..(39): n is a, c, g, or t
  misc_feature (42)..(42): n is a, c, g, or t
  misc_feature (54)..(57): n is a, c, g, or t
  misc_feature (63)..(65): n is a, c, g, or t
  misc_feature (69)..(69): n is a, c, g, or t
  misc_feature (79)..(79): n is a, c, g, or t
  misc_feature (84)..(84): n is a, c, g, or t
  misc_feature (90)..(90): n is a, c, g, or t
acttgaacncnggaggtggaggttgcagtgagcngagantgngccactgcactnnnncctggnnnacanagcaagactntgttnaaaaanaaagaacagggaaaaagcaacaagaaggaagagcaatggcgacactggatcgcaaagtgcccagtccggaggcgtttctgggcaaaccctggtcctcctggatcgacgccgccaaattacactgctccgacaatgtagatttagaagaggctggaaaagagggtggaaaaagcagggaggttatgaggcttaataaagaagatatgcacttatttggccattacccagcacatgacgacttctatctcgtagtgtgcagtgcctgtaaccaggtcgtcaagccacaggttttccagtcgcactgcgcattgaaggaaaaaacaacagtgaggcagccagtcaacttgaagcaacgaaagtgggttgcaggagctatgagagaagccagtttgaaaatcacattggaaccagatcgtggaaggctttgaatgcaaactgaggaaaaggaaaagccgcttgccaaaggagtgattgataaaatcatctctgaagctttttgaaataaagaagtggagaccctacctgagacctgccaagtcagaagccccacaagtgatctggtgctgcccagatgaaatcaacctaatgctgtctactactttctttaatatccaaggatatgaaagatattaatccagggatattaagggatacaacctctcactcttttt

SEQ ID NO: 360236 - DNA, 623 bp, Homo sapiens
ggagatacgcaccgcgcggggaacccgggggtccgggggccctaacttttgagttttgcacgccccgcagcctgagatgggaaggtagctcgtcgcgctccaaactcacctgcgtttcagaacgacatctacccactggtttcagctcctagagcaacaactgcagaatctccatggtccaaagtcctccagaacactcaatgtcggaacgttccgaagatgacgtcggagcgttctcgaatcccgtgtctctcggctgctgctgccgaaggaacagggaaaaagcaacaagaaggaagagcaatggcgacactggatcgcaaagtgcccagtccggaggcgtttctgggcaaaccctggtcctcctggatcgacgccgccaaattacactgctccgacaatgtagatttagaagaggctggaaaagagggtggaaaaagcagggaggttatgaggcttaataaagaagcatggaaatacggtacctgaaatgggacacactgagtagataggtcatcccagaccaagatatgcaagagaagccacaacctgctgcaattgggcatcaaacacatatggtcgtcataaataaatcatatcctgttctcatttgcaagcctgcc

SEQ ID NO: 360237 - DNA, 904 bp, Homo sapiens
  misc_feature (840)..(840): n is a, c, g, or t
  misc_feature (848)..(849): n is a, c, g, or t
  misc_feature (854)..(855): n is a, c, g, or t
agcggggcaactgccactccaaggagaacagaaatggttccgttattagtggctgctgtgggaccacgacagtctgtgggagagaagacacggttcaatgtgtagaccttctccctctccagtgtctccagcctccaatcccaggacatcactagtacaggtgaaaacaaaagcctgtctcagcggccatcactctgccagcagcacctcaaagccattcaaaacgcccaaagacaatctacttacctccagcagcaaacagcacacagtctttcctgcgaaaggatcaagggataaaccatgacatcactgggcagggaggggaatctacttgatgccaagagaaccatgtttcttaaagccagaggacccgccttgatctagaaagataaattcagacaggccaagcacaaaggaagaagacgtgggcaactaaagcagcacaaaagaaacagagtgttccagttcctgtagtcagtttagagaaaattcctaacctagtgaaggcagatggtgccaatgtcaaaatgaactccacaaccactactgcagtttctgcctcctccacctcgtcctctgccgtctccacccctcctttaattaagcctgtcctgatgtccaagtcagtgccaccttcaccagagaagatcttaaatggcaaaggaattctgccaaccaccatagacaagaaacaccaaaatggcaccaaaaacagcaacaagccttacaggagactttcagagagagaatttgacccaaataaacactgtggagtattggatcccgagacaaagaaaccttgcacaagatccctcacctgcaagaacattcggttaagcntcggaggnngtccnnggcggaaaagcaatttacttctctggagacaaaagcaagtcggggaaag

SEQ ID NO: 360238 - DNA, 3214 bp, Homo sapiens
  misc_feature (9)..(9): n is a, c, g, or t
  misc_feature (11)..(11): n is a, c, g, or t
  misc_feature (34)..(34): n is a, c, g, or t
  misc_feature (39)..(39): n is a, c, g, or t
  misc_feature (42)..(42): n is a, c, g, or t
  misc_feature (54)..(57): n is a, c, g, or t
  misc_feature (63)..(65): n is a, c, g, or t
  misc_feature (69)..(69): n is a, c, g, or t
  misc_feature (79)..(79): n is a, c, g, or t
  misc_feature (84)..(84): n is a, c, g, or t
  misc_feature (90)..(90): n is a, c, g, or t
acttgaacncnggaggtggaggttgcagtgagcngagantgngccactgcactnnnncctggnnnacanagcaagactntgttnaaaaanaaagaacagggaaaaagcaacaagaaggaagagcaatggcgacactggatcgcaaagtgcccagtccggaggcgtttctgggcaaaccctggtcctcctggatcgacgccgccaaattacactgctccgacaatgtagatttagaagaggctggaaaagagggtggaaaaagcagggaggttatgaggcttaataaagaagatatgcacttatttggccattacccagcacatgacgacttctatctcgtagtgtgcagtgcctgtaaccaggtcgtcaagccacaggttttccagtcgcactgcgagagaagacacggttcaatgtgtagaccttctccctctccagtgtctccagcctccaatcccaggacatcactagtacaggtgaaaacaaaagcctgtctcagcggccatcactctgccagcagcacctcaaagccattcaaaacgcccaaagacaatctacttacctccagcagcaaacagcacacagtctttcctgcgaaaggatcaagggataaaccatgtgttccagttcctgtagtcagtttagagaaaattcctaacctagtgaaggcagatggtgccaatgtcaaaatgaactccacaaccactactgcagtttctgcctcctccacctcgtcctctgccgtctccacccctcctttaattaagcctgtcctgatgtccaagtcagtgccaccttcaccagagaagatcttaaatggcaaaggaattctgccaaccaccatagacaagaaacaccaaaatggcaccaaaaacagcaacaagccttacaggagactttcagagagagaatttgacccaaataaacactgtggagtattggatcccgagacaaagaaaccttgcacaagatccctcacctgcaagacacattcgctaagccatcggagggcagtcccaggccggaaaaagcaatttgacctcctcctggcagaacacaaagcaaagtcccgggaaaaagaagttaaagataaagagcatctcctgacttccacgagggaaatacttccaagccaatccgggccggcacaggattctctgctagggtcttcagggagctctgggccagaaccaaaagttgcatcccctgcaaaatccagaccacccaactctgtacttcctagaccatcatctgcaaatagcataagcagcagcacatcttcaaatcatagcggccacactccagagcccccactcccaccggttggaggtgacctcgccagccgactgtccagtgatgaaggggagatggacggagccgacgaatccgagaagctagactgtcagttctccacgcaccaccccagacctctggcgttttgctcatttgggagtcgcctcatgggacgagggtactatgtgtttgatagaagatgggatcgttttcgattcgcactaaactccatggtagaaaaacacctgaattcacagatgtggaagcacagaaacccgagccacagggcatcaggtccctcccccctgttcaggacttgcctaaccaatctgctgtcactgagcaacattggggctgcctgggtgtcaactctggagagcgtagcaccccgctaccctctcaacctcgctgcccaaaccccaggccccggcgggcccgaacctggagggatggcagccgatgggggcgtggaagacattaggaagaaaaggaacggccaagactcttttttctttaacaagcatttaactctgcatcaggagccgccaacacagtattctctttcagccaggaagatccctcctgcggcagatagccccctgccctcgccagcagcccacatcaccacccccgttccagcatccgttttgcagcctttcagcaaccccagtgctgtgtatcttccttcagctcccatcagctcgaggctcacctcttcttacataatgacatcagccatgctctcaaacgcagctttcgtgacatcgccggacccgagcgccctcatgtcccacaccacagctttccctcatgtggccgcaaccctcagcatcatggactcaaccttcaaggccccatccgccgtgtccccgataccagccgtcatcccttccccatcccacaagccatccaaaaccaaaaccagcaaatcctcaaaagtcaaagacctgtccacccgtagcgacgagtctccaagtaacaaaaaaaggaagccacagtcttcgacttcctcctcctcctcctcctcctcctcttccttgcagacatccctctcgtctccactgtcagggcctcacaaaaagaactgtgttttgaatgccagttctgctttgaactcctatcaggcggcccctccctataacagcctgtctgtgcacaactcaaacaatggggtgagcccactcagtgccaaactggagccctcaggacggacctcgctgcccggcggccccgcggacatagtgagacaggtgggcgcggtgggaggcagcagtgactcctgtcccctctctgtgccctcccttgcgctccacgcaggggacctctctctggcctcacacaatgctgtgtcttctctgcccctctcttttgacaaatcagaaggaaaaaagcgtaagaactcgagttctagtagcaaagcctgtaaaatcactaaaatgcctggtatgaatagcgttcacaaaaagaacccgcccagccttctcgcaccggtgcccgatcccgttaacagcacctcctctcggcaggtaagggacctcctggcaccgccttcaccggctctggggggcagggggagctgggcagcgcccctgcttagccgggcggctccgacaggtaacacaagcttgattcctgttctcgttttccccgaaggcagttttcaccctctgctttgagagcactttactgaacaagtacttgataccacgctcactatgtgctagacactgttctcggcactttacggttgttacctcactgagtcctcacgacaccccagtgcagtgagtgcagttatcactttacagatgagtaaactgaggcacagagagattctgagttccccactccacatcggtcagttttatcttttgaggttctgagaacattgtcattaaagagttctgttgctaaaaaaatt

SEQ ID NO: 360239 - DNA, 1668 bp, Homo sapiens
  misc_feature (9)..(9): n is a, c, g, or t
  misc_feature (11)..(11): n is a, c, g, or t
  misc_feature (34)..(34): n is a, c, g, or t
  misc_feature (39)..(39): n is a, c, g, or t
  misc_feature (42)..(42): n is a, c, g, or t
  misc_feature (54)..(57): n is a, c, g, or t
  misc_feature (63)..(65): n is a, c, g, or t
  misc_feature (69)..(69): n is a, c, g, or t
  misc_feature (79)..(79): n is a, c, g, or t
  misc_feature (84)..(84): n is a, c, g, or t
  misc_feature (90)..(90): n is a, c, g, or t
acttgaacncnggaggtggaggttgcagtgagcngagantgngccactgcactnnnncctggnnnacanagcaagactntgttnaaaaanaaagaacagggaaaaagcaacaagaaggaagagcaatggcgacactggatcgcaaagtgcccagtccggaggcgtttctgggcaaaccctggtcctcctggatcgacgccgccaaattacactgctccgacaatgtagatttagaagaggctggaaaagagggtggaaaaagcagggaggttatgaggcttaataaagaagatatgcacttatttggccattacccagcacatgacgacttctatctcgtagtgtgcagtgcctgtaaccaggtcgtcaagccacaggttttccagtcgcactgcgagagaagacacggttcaatgtgtagaccttctccctctccagtgtctccagcctccaatcccaggacatcactagtacaggtgaaaacaaaagcctgtctcagcggccatcactctgccagcagcacctcaaagccattcaaaacgcccaaagacaatctacttacctccagcagcaaacagcacacagtctttcctgcgaaaggatcaagggataaaccatgtgttccagttcctgtagtcagtttagagaaaattcctaacctagtgaaggcagatggtgccaatgtcaaaatgaactccacaaccactactgcagtttctgcctcctccacctcgtcctctgccgtctccacccctcctttaattaagcctgtcctgatgtccaagtcagtgccaccttcaccagagaagatcttaaatggcaaaggaattctgccaaccaccatagacaagaaacaccaaaatggcaccaaaaacagcaacaagccttacaggagactttcagagagagaatttgacccaaataaacactgtggagtattggatcccgagacaaagaaaccttgcacaagatccctcacctgcaagacacattcgctaagccatcggagggcagtcccaggccggaaaaagcaatttgacctcctcctggcagaacacaaagcaaagtcccgggaaaaagaagttaaagataaagagcatctcctgacttccacgagggaaatacttccaagccaatccgggccggcacaggattctctgctagggtcttcagggagctctgggccagaaccaaaagttgcatcccctgcaaaatccagaccacccaactctgtacttcctagaccatcatctgcaaatagcataagcagcagcacatcttcaaatcatagcggccacactccagagcccccactcccaccggttggaggtgacctcgccagccgactgtccagtgatgaaggggagatggacggagccgacgaatccgagaagctagactgtcagttctccacgcaccaccccagacctctggcgttttgctcatttgggagtcgcctcatgggacgagggtactatgtgtttgatagaagatgggatcgttttcgattcgcactaaactccatggtagaaaaacacctgaattcacagatgtggaagtaagtgagcagcttttgtgcaatataagatccaagctgccccacagttacctgaaacttaactttctaaataaatgtcagtggctgacttttcatagaacaaaatgatt

SEQ ID NO: 360240 - DNA, 807 bp, Homo sapiens
ggagatacgcaccgcgcggggaacccgggggtccgggggccctaacttttgagttttgcacgccccgcagcctgagatgggaaggtagctcgtcgcgctccaaactcacctgcgtttcagaacgacatctacccactggtttcagctcctagagcaacaactgcagaatctccatggtccaaagtcctccagaacactcaatgtcggaacgttccgaagatgacgtcggagcgttctcgaatcccgtgtctctcggctgctgctgccgaaggaacagggaaaaagcaacaagaaggaagagcaatggcgacactggatcgcaaagtgcccagtccggaggcgtttctgggcaaaccctggtcctcctggatcgacgccgccaaattacactgctccgacaatgtagatttagaagaggctggaaaagagggtggaaaaagcagggaggttatgaggcttaataaagaagatatgcacttatttggccattacccagcacatgacgacttctatctcgtagtgtgcagtgcctgtaaccaggtcgtcaagccacaggttttccagtcgcactgcgggagaaagcaagacaacaggagaaatgaaggcatctccaggagtggaccagagagcagccaagccatagagaagcatcaggtgtgagaatggaaaacgcagaagagacgtacaacttctgaaagatctcagaggactggcattgtctggagacggcttcctggaagaggagactccagcagagccctgaagtgtggacaagcttccattcactgcaaattcgtgagcacactc

SEQ ID NO: 360241 - DNA, 516 bp, Homo sapiens
aaaagcaagatgggagaacttattctgctagatgtcaagatctattataaatagaaattcagacagtgtggtattgactcaaagatagaagattagaatggaacagaatagagagcccagaaaggactcttgcatacacaaacatttgctatctggccaaagtggtgctgcagagcagacaggaatggacgttcttcttaataaatgacactgacatatccatatgaggaaaaagttaaattggatccctacttcacaccatacattaaattccaggttgattaatgacctaaatagaaagagaaattcagaaagctttaggtgattagaaagttagacagctcttatgaccttgagggaggggaaaacttaaacaagacttaaaaagcattagccacaaaggggggaaaagctataaagagagcaaaaacaaagccatgatgggagaatgtataaataaaaaaataactctccaaaataaatacttctaaacagagggaatatatatcgaactac

SEQ ID NO: 360242 - DNA, 785 bp, Homo sapiens
aggccccacaactacgagtactccttgtccccacccggtcctaatttggtcgggtatagcggaggtgggcgtagagagaactggaggtggagacctttgtgcatgcccacacactgctttcctcgcgaggaatctggggcccttgcagaggcggaaccaggatgtgacgtaataaccgcgcgcggcgctcggcgttcccgcaaggtcgctttgcagagcgggagcgcgcttaagtaactagtccgtagttcgagggtgcgccgtgtccttttgcgttggtaccagcggcgacatgacggggtacactccggatgagaaactgcggctgcagcagctgcgagagctgagaaggcgatggctgaaggaccaggagctgagccctcgggagccggtgctgcccccacagaagatggggcctatggagaaattctggaataaatttttggagaataaatccccttggaggaaaatggtccatggggtatacaaaaagagtatctttgttttcactcatgtacttgtacctgtctggattattcattattacatgaagtatcatgtttctgaaaaaccatatggcatagttgaaaagaagtccagaatattccctggtgatacaattctggagactggagaagtaattccaccaatgaaagaatttcctgatcaacatcattaaagattatgtaaaaagttaaaaggcttatgagcctaagtttgttcctatattaccatatttactgaattttctggaaaagtaactttaataaagtttaatctcagaa

SEQ ID NO: 360243 - DNA, 906 bp, Homo sapiens
  misc_feature (793)..(793): n is a, c, g, or t
  misc_feature (796)..(796): n is a, c, g, or t
  misc_feature (805)..(805): n is a, c, g, or t
  misc_feature (815)..(816): n is a, c, g, or t
  misc_feature (868)..(869): n is a, c, g, or t
  misc_feature (906)..(906): n is a, c, g, or t
aggccccacaactacgagtactccttgtccccacccggtcctaatttggtcgggtatagcggaggtgggcgtagagagaactggaggtggagacctttgtgcatgcccacacactgctttcctcgcgaggaatctggggcccttgcagaggcggaaccaggatgtgacgtaataaccgcgcgcggcgctcggcgttcccgcaaggtcgctttgcagagcgggagcgcgcttaagtaactagtccgtagttcgagggtgcgccgtgtccttttgcgttggtaccagcggcgacatgacggggtacactccggatgagaaactgcggctgcagcagctgcgagagctgagaaggcgatggctgaaggaccaggagctgagccctcgggagccggtgctgcccccacagaagatggggcctatggagaaattctggaataaatttttggagaataaatccccttggaggaaaatggtccatggggtatacaaaaagagtatctttgttttcactcatgtacttgtacctgtctggattattcattattacatgaagtatcatgtttctgaaaaaccatatggcatagttgaaaagaagtccagaatattccctggtgatacaattctggagactggagaagtaattccaccaatgaaagaatttcctgatcaacatcattaaagattatgtaaaaagttaaaaggcttatgagcctaagtttgttcctatattaccatatttactgaattttctggaaaagtaactttaataaagtttaatctcagaacaaaaaanaantggccgcgnttaacacggnngactgggaaaccctgcgttaccaactaatcgcctgagacatccccttcgcanntgcgtatagcgagaagccgaacgatcgccttccacan

SEQ ID NO: 360244 - DNA, 544 bp, Homo sapiens
atgagtgctgtagatgacatgatagcaggtatggggttgtctgtcaggaaagtataacttaaatgtttataaagtttcacatacttctctttatattctataggtaatgtagatttgttgacactgctttgatttaaaataaatggaaatgtatagaaattttactttttatattaatggaaaacctgaaaagtgaaagaagaaaaacataattattatagtagacaaatggtccatggggtatacaaaaagagtatctttgttttcactcatgtacttgtacctgtctggattattcattattacatgaagtatcatgtttctgaaaaaccatatggcatagttgaaaagaagtccagaatattccctggtgatacaattctggagactggagaagtaattccaccaatgaaagaatttcctgatcaacatcattaaagattatgtaaaaagttaaaaggcttatgagcctaagtttgttcctatattaccatatttactgaattttctggaaaagtaactttaataaagtttaatctcagaa

SEQ ID NO: 360245 - DNA, 383 bp, Homo sapiens
  misc_feature (30)..(30): n is a, c, g, or t
ctccgcggctactggcgatctagccactgnggatttcccgggttgcttgaattcggcacgagggattttggtccatggggtatacaaaaagagtatctttgttttcactcatgtacttgtacctgtctggattattcattattacatgaagtatcatgtttctgaaaaaccatatggcatagttgaaaagaagtccagaatattccctggtgatacaattctggagactggagaagtaattccaccaatgaaagaatttcctgatcaacatcattaaagattatgtaaaaagttaaaaggcttatgagcctaagtttgttcctatattaccatatttactgaattttctggaaaagtaactttaataaagtttaatctcagaa

SEQ ID NO: 360246 - DNA, 692 bp, Homo sapiens
aggccccacaactacgagtactccttgtccccacccggtcctaatttggtcgggtatagcggaggtgggcgtagagagaactggaggtggagacctttgtgcatgcccacacactgctttcctcgcgaggaatctggggcccttgcagaggcggaaccaggatgtgacgtaataaccgcgcgcggcgctcggcgttcccgcaaggtcgctttgcagagcgggagcgcgcttaagtaactagtccgtagttcgagggtgcgccgtgtccttttgcgttggtaccagcggcgacatgacggggtacactccggatgagaaactgcggctgcagcagctgcgagagctgagaaggcgatggctgaaggaccaggagctgagccctcgggagccggtgctgcccccacagaagatggggcctatggagaaattctggaataaatttttggagaataaatccccttggaggaaaatggaaaaaccatatggcatagttgaaaagaagtccagaatattccctggtgatacaattctggagactggagaagtaattccaccaatgaaagaatttcctgatcaacatcattaaagattatgtaaaaagttaaaaggcttatgagcctaagtttgttcctatattaccatatttactgaattttctggaaaagtaactttaataaagtttaatctcagaa

SEQ ID NO: 360247 - DNA, 1556 bp, Homo sapiens
aggccccacaactacgagtactccttgtccccacccggtcctaatttggtcgggtatagcggaggtgggcgtagagagaactggaggtggagacctttgtgcatgcccacacactgctttcctcgcgaggaatctggggcccttgcagaggcggaaccaggatgtgacgtaataaccgcgcgcggcgctcggcgttcccgcaaggtcgctttgcagagcgggagcgcgcttaagtaactagtccgtagttcgagggtgcgccgtgtccttttgcgttggtaccagcggcgacatgacggggtacactccggatgagaaactgcggctgcagcagctgcgagagctgagaaggcgatggctgaaggaccaggagctgagccctcgggagccggtgctgcccccacagaagatggggcctatggagaaattctggaataaatttttggagaataaatccccttggaggaaaatggtccatggggtatacaaaaagagtatctttgttttcactcatgtacttgtacctgtctggattattcattattacatgaagtatcatgtttctgaaaaaccatatggcatagttgaaaagaagtccagaatattccctggtgatacaattctggagactggagaagtaattccaccaatgaaagaatttcctgatcaacatcattaaagattatgtaaaaagttaaaaggcttatgagcctaagtttgttcctatattaccatatttactgaattttctggaaaagtaactttaataaagtttaatctcagaaattgtcatatctgttttcaagcattgtacaatttgagactgagtaatttaacaataagtaaaaagtggacatgctaaacaaatatgagagactacctactttttctggtcattcttgacttggaaaacggtatggaaaagtatttagttacatgtttgtttgtttttttcttacacagtacttacactaatttggtatcagggtatgcaacagtgaaatatcacaataaacaaatgtaagaacagcaattccatgcacttttgttttaaggaaatctttccggccaggcgcagtggctcatgcctgtaatcccagcactttgggaggccgaggcgggcagatcacgaagtcaggagatcgagaccatcatggctaacacagtgaaaccccgtccctactaaaaatacaaaaaaattagccgggcgtggtggcgggctcctgtagtcccagctactgcggaggctgaggcacgagattggtgtgaacccagaaggcggagcttgcagtaagccgagatagtgccactgagcctgggcgacagagcaagactccgtctcaaaaaaaaaaaagctttccgaatcatttttgaagaattcagaaacttgattgaaaagcttattccaactatgatctgacactcaagactgtcagatttaggttgctgttaattttgtcatgagaatgtaaaatactaaaatctctaagtgaaaaattttgcatactagtgcttgttataaaggataatgcaaaaataaacttgggaactttgca

SEQ ID NO: 360248 - DNA, 1060 bp, Homo sapiens
aggccccacaactacgagtactccttgtccccacccggtcctaatttggtcgggtatagcggaggtgggcgtagagagaactggaggtggagacctttgtgcatgcccacacactgctttcctcgcgaggaatctggggcccttgcagaggcggaaccaggatgtgacgtaataaccgcgcgcggcgctcggcgttcccgcaaggtcgctttgcagagcgggagcgcgcttaagtaactagtccgtagttcgagggtgcgccgtgtccttttgcgttggtaccagcggcgacatgacggggtacactccggatgagaaactgcggctgcagcagctgcgagagctgagaaggcgatggctgaaggaccaggagctgagccctcgggagccggtgctgcccccacagaagatggggcctatggagaaattctggaataaatttttggagaataaatccccttggaggaaaatggtccatggggtatacaaaaagagtatctttgttttcactcatgtacttgtacctgtctggattattcattattacatgaagtatcatgtttctgaaaaaccatatggcatagttgaaaagaagtccagaatattccctggtgatacaattctggagactggagaagtaattccaccaatgaaagaatttcctgatcaacatcattaaagattatgtaaaaagttaaaaggcttatgagcctaagtttgttcctatattaccatatttactgaattttctggaaaagtaactttaataaagtttaatctcagaaattgtcatatctgttttcaagcattgtacaatttgagactgagtaatttaacaataagtaaaaagtggacatgctaaacaaaaaaaaaaaaaagggggggccgcttttttttttttataaagattataagtataaaagggggacgatcgggtaagagagtaggcgtggataaggggcgatgaagtggtgggggagggggatggaaattggttttggcttgcacatgagttggaaactctttaatcgcatttttttggaaaaacaacaaaataagg

SEQ ID NO: 360249 - DNA, 1619 bp, Homo sapiens
tggggtgggtatggggacaattctactcttcccagtcattcagggactggcaggctaacagaatctatcttaaacacatggctgaaactgaaattgaataatctgtcttaaaactatacagcttgtcagtggaggttccaagattcttaccacttggttctggcttcaatgcccatgcctttttgcccacatctatatcaagaattgaaaagacatctggaccagctgcctagccaaagtttgtattctgtattcagtatgtaagccaatcagaaaactggtgattgcgtaacacattcagttgctgggggtacattacctccttatctggaactgcagatgtttccttgcaacttctttctggggcctccatttattggggtcatacaaaataaaagattatccctttatcacttagagaacacaattttcgtgccctttttgattattttgtttctgagtgaaaatttccctattatttcactataccttaaaattttgaatactgattgttcagatttagtcagcttctactttgtctagggtccttttaaagggaatgccagaactcaagtacattttccatgtgagatctgatgaacatagaacagaatagaactatcacctctgtagacttaagatttttgtactaactgtatctttgttttcctagggtgatacaattctggagactggagaagtaattccaccaatgaaagaatttcctgatcaacatcattaaagattatgtaaaaagttaaaaggcttatgagcctaagtttgttcctatattaccatatttactgaattttctggaaaagtaactttaataaagtttaatctcagaaattgtcatatctgttttcaagcattgtacaatttgagactgagtaatttaacaataagtaaaaagtggacatgctaaacaaatatgagagactacctactttttctggtcattcttgacttggaaaacggtatggaaaagtatttagttacatgtttgtttgtttttttcttacacagtacttacactaatttggtatcagggtatgcaacagtgaaatatcacaataaacaaatgtaagaacagcaattccatgcacttttgttttaaggaaatctttccggccaggcgcagtggctcatgcctgtaatcccagcactttgggaggccgaggcgggcagatcacgaagtcaggagatcgagaccatcatggctaacacagtgaaaccccgtccctactaaaaatacaaaaaaattagccgggcgtggtggcgggctcctgtagtcccagctactgcggaggctgaggcacgagattggtgtgaacccagaaggcggagcttgcagtaagccgagatagtgccactgagcctgggcgacagagcaagactccgtctcaaaaaaaaaaaagctttccgaatcatttttgaagaattcagaaacttgattgaaaagcttattccaactatgatctgacactcaagactgtcagatttaggttgctgttaattttgtcatgagaatgtaaaatactaaaatctctaagtgaaaaattttgcatactagtgcttgttataaaggataatgcaaaaataaacttgggaactttgca

SEQ ID NO: 360250 - DNA, 1031 bp, Homo sapiens
ccccttaatatcacttacaccccgcccacaaaaaaaaacaacttaggaaacctatggcatagttgaaagagtccaaatattccctggtgatacaattctggagactggagaagtaattccaccaatgaaagaatttcctgatcaacatcattaaagattatgtaaaaagttaaaaggcttatgagcctaagtttgttcctatattaccatatttactgaattttctggaaaagtaactttaataaagtttaatctcagaaattgtcatatctgttttcaagcattgtacaatttgagactgagtaatttaacaataagtaaaaagtggacatgctaaacaaatatgagagactacctactttttctggtcattcttgacttggaaaacggtatggaaaagtatttagttacatgtttgtttgtttttttcttacacagtacttacactaatttggtatcagggtatgcaacagtgaaatatcacaataaacaaatgtaagaacagcaattccatgcacttttgttttaaggaaatctttccggccaggcgcagtggctcatgcctgtaatcccagcactttgggaggccgaggcgggcagatcacgaagtcaggagatcgagaccatcatggctaacacagtgaaaccccgtccctactaaaaatacaaaaaaattagccgggcgtggtggcgggctcctgtagtcccagctactgcggaggctgaggcacgagattggtgtgaacccagaaggcggagcttgcagtaagccgagatagtgccactgagcctgggcgacagagcaagactccgtctcaaaaaaaaaaaagctttccgaatcatttttgaagaattcagaaacttgattgaaaagcttattccaactatgatctgacactcaagactgtcagatttaggttgctgttaattttgtcatgagaatgtaaaatactaaaatctctaagtgaaaaattttgcatactagtgcttgttataaaggataatgcaaaaataaacttgggaactttgca

SEQ ID NO: 360251 - DNA, 724 bp, Homo sapiens
gcatcgacatagaagaataatccttaacagtctgcatactgacattagattacagaatgttgacaatttgacttggaaaacggtatggaaaagtatttagttacatgtttgtttgtttttttcttacacagtacttacactaatttggtatcagggtatgcaacagtgaaatatcacaataaacaaatgtaagaacagcaattccatgcacttttgttttaaggaaatctttccggccaggcgcagtggctcatgcctgtaatcccagcactttgggaggccgaggcgggcagatcacgaagtcaggagatcgagaccatcatggctaacacagtgaaaccccgtccctactaaaaatacaaaaaaattagccgggcgtggtggcgggctcctgtagtcccagctactgcggaggctgaggcacgagattggtgtgaacccagaaggcggagcttgcagtaagccgagatagtgccactgagcctgggcgacagagcaagactccgtctcaaaaaaaaaaaagctttccgaatcatttttgaagaattcagaaacttgattgaaaagcttattccaactatgatctgacactcaagactgtcagatttaggttgctgttaattttgtcatgagaatgtaaaatactaaaatctctaagtgaaaaattttgcatactagtgcttgttataaaggataatgcaaaaataaacttgggaactttgca

SEQ ID NO: 360252 - DNA, 867 bp, Homo sapiens
aggccccacaactacgagtactccttgtccccacccggtcctaatttggtcgggtatagcggaggtgggcgtagagagaactggaggtggagacctttgtgcatgcccacacactgctttcctcgcgaggaatctggggcccttgcagaggcggaaccaggatgtgacgtaataaccgcgcgcggcgctcggcgttcccgcaaggtcgctttgcagagcgggagcgcgcttaagtaactagtccgtagttcgagggtgcgccgtgtccttttgcgttggtaccagcggcgacatgacggggtacactccggatgagaaactgcggctgcagcagctgcgagagctgagaaggcgatggctgaaggaccaggagctgagccctcgggagccggtgctgcccccacagaagatggggcctatggagaaattctggaataaatttttggagaataaatccccttggaggaaaatggtccatggggtatacaaaaagagtatctttgttttcactcatgtacttgtacctgtctggattattcattattacatgaagtatcatgtttctgaaaaaccatatggcatagttgaaaagaagtccagaatattccctggtgatacaattctggagactggagaagtaattccaccaatgaaagaatttcctgatcaacatcattaaagattatgtaaaaagttaaaaggcttatgagcctaagtttgttcctatattaccatatttactgaattttctggaaaagtaactttaataaagtttaatctcagaaattgtcatatctgttttcaagcattgtacaatttgagactgagtaatttaacaataagtaaaaagtggacatgctaaacaaa

SEQ ID NO: 360253 - DNA, 928 bp, Homo sapiens
  misc_feature (787)..(787): n is a, c, g, or t
  misc_feature (815)..(815): n is a, c, g, or t
  misc_feature (818)..(818): n is a, c, g, or t
  misc_feature (827)..(827): n is a, c, g, or t
  misc_feature (837)..(838): n is a, c, g, or t
  misc_feature (890)..(891): n is a, c, g, or t
  misc_feature (928)..(928): n is a, c, g, or t
aggccccacaactacgagtactccttgtccccacccggtcctaatttggtcgggtatagcggaggtgggcgtagagagaactggaggtggagacctttgtgcatgcccacacactgctttcctcgcgaggaatctggggcccttgcagaggcggaaccaggatgtgacgtaataaccgcgcgcggcgctcggcgttcccgcaaggtcgctttgcagagcgggagcgcgcttaagtaactagtccgtagttcgagggtgcgccgtgtccttttgcgttggtaccagcggcgacatgacggggtacactccggatgagaaactgcggctgcagcagctgcgagagctgagaaggcgatggctgaaggaccaggagctgagccctcgggagccggtgctgcccccacagaagatggggcctatggagaaattctggaataaatttttggagaataaatccccttggaggaaaatggtccatggggtatacaaaaagagtatctttgttttcactcatgtacttgtacctgtctggattattcattattacatgaagtatcatgtttctgaaaaaccatatggcatagttgaaaagaagtccagaatattccctggtgatacaattctggagactggagaagtaattccaccaatgaaagaatttcctgatcaacatcattaaagattatgtaaaaagttaaaaggcttatgagcctaagtttgttcctatattaccatatttactgaattttctggaaaagtaactttaataaagtttaatctcagaacnaaaaaccctccctcgccttccaaaaaanaantggccgcgnttaacacggnngactgggaaaccctgcgttaccaactaatcgcctgagacatccccttcgcanntgcgtatagcgagaagccgaacgatcgccttccacan

SEQ ID NO: 360254 - DNA, 774 bp, Homo sapiens
aggccccacaactacgagtactccttgtccccacccggtcctaatttggtcgggtatagcggaggtgggcgtagagagaactggaggtggagacctttgtgcatgcccacacactgctttcctcgcgaggaatctggggcccttgcagaggcggaaccaggatgtgacgtaataaccgcgcgcggcgctcggcgttcccgcaaggtcgctttgcagagcgggagcgcgcttaagtaactagtccgtagttcgagggtgcgccgtgtccttttgcgttggtaccagcggcgacatgacggggtacactccggatgagaaactgcggctgcagcagctgcgagagctgagaaggcgatggctgaaggaccaggagctgagccctcgggagccggtgctgcccccacagaagatggggcctatggagaaattctggaataaatttttggagaataaatccccttggaggaaaatggaaaaaccatatggcatagttgaaaagaagtccagaatattccctggtgatacaattctggagactggagaagtaattccaccaatgaaagaatttcctgatcaacatcattaaagattatgtaaaaagttaaaaggcttatgagcctaagtttgttcctatattaccatatttactgaattttctggaaaagtaactttaataaagtttaatctcagaaattgtcatatctgttttcaagcattgtacaatttgagactgagtaatttaacaataagtaaaaagtggacatgctaaacaaa

SEQ ID NO: 360255 - DNA, 1014 bp, Homo sapiens
aggccccacaactacgagtactccttgtccccacccggtcctaatttggtcgggtatagcggaggtgggcgtagagagaactggaggtggagacctttgtgcatgcccacacactgctttcctcgcgaggaatctggggcccttgcagaggcggaaccaggatgtgacgtaataaccgcgcgcggcgctcggcgttcccgcaaggtcgctttgcagagcgggagcgcgcttaagtaactagtccgtagttcgagggtgcgccgtgtccttttgcgttggtaccagcggcgacatgacggggtacactccggatgagaaactgcggctgcagcagctgcgagagctgagaaggcgatggctgaaggaccaggagctgagccctcgggagccggtgctgcccccacagaagatggggcctatggagaaattctggaataaatttttggagaataaatccccttggaggaaaatggtgagtgacagacctctccggtcccccccaacacatcccactgctgccggcagcctgaacactgaacgtccgctccctgcagccacaccaaggactgataacgctcagtgctctgggacactggccagtcccgagagtcctcctggagtctcgggaggcaggagtccaggaatatgtatggctttgagagaatcatgccttttactgtcaagtacagtggacgggggcgaattttaatacttaggttttccaggacgctgcacgtttggttctcttttgactgtagaaatcttccctcagaataataaccaaggactcgctagaattaaaattctgtgatttaagtatttgaggacacttgtctgacttttaagtgtgaggttctagagaccaagtaacacagtatccaaccaccagagggcacagccagcccctagctgatagtacagccccatgtgatccccgtaaaagacagggtcctgttggtatgccttgtgagtcacattcaagagctacctttctaaactaccgttctgtacttt

SEQ ID NO: 360256 - DNA, 1511 bp, Homo sapiens
aggccccacaactacgagtactccttgtccccacccggtcctaatttggtcgggtatagcggaggtgggcgtagagagaactggaggtggagacctttgtgcatgcccacacactgctttcctcgcgaggaatctggggcccttgcagaggcggaaccaggatgtgacgtaataaccgcgcgcggcgctcggcgttcccgcaaggtcgctttgcagagcgggagcgcgcttaagtaactagtccgtagttcgagggtgcgccgtgtccttttgcgttggtaccagcggcgacatgacggggtacactccggatgagaaactgcggctgcagcagctgcgagagctgagaaggcgatggctgaaggaccaggagctgagccctcgggagccggtgctgcccccacagaagatggggcctatggagaaattctggaataaatttttggagaataaatccccttggaggaaaatggtccatggggtatacaaaaagagtatctttgttttcactcatgtacttgtacctgtctggattattcattattacatgaagtatcatgtttctggtgatacaattctggagactggagaagtaattccaccaatgaaagaatttcctgatcaacatcattaaagattatgtaaaaagttaaaaggcttatgagcctaagtttgttcctatattaccatatttactgaattttctggaaaagtaactttaataaagtttaatctcagaaattgtcatatctgttttcaagcattgtacaatttgagactgagtaatttaacaataagtaaaaagtggacatgctaaacaaatatgagagactacctactttttctggtcattcttgacttggaaaacggtatggaaaagtatttagttacatgtttgtttgtttttttcttacacagtacttacactaatttggtatcagggtatgcaacagtgaaatatcacaataaacaaatgtaagaacagcaattccatgcacttttgttttaaggaaatctttccggccaggcgcagtggctcatgcctgtaatcccagcactttgggaggccgaggcgggcagatcacgaagtcaggagatcgagaccatcatggctaacacagtgaaaccccgtccctactaaaaatacaaaaaaattagccgggcgtggtggcgggctcctgtagtcccagctactgcggaggctgaggcacgagattggtgtgaacccagaaggcggagcttgcagtaagccgagatagtgccactgagcctgggcgacagagcaagactccgtctcaaaaaaaaaaaagctttccgaatcatttttgaagaattcagaaacttgattgaaaagcttattccaactatgatctgacactcaagactgtcagatttaggttgctgttaattttgtcatgagaatgtaaaatactaaaatctctaagtgaaaaattttgcatactagtgcttgttataaaggataatgcaaaaataaacttgggaactttgca

SEQ ID NO: 360257 - DNA, 1712 bp, Homo sapiens
  misc_feature (865)..(865): n is a, c, g, or t
cggtcctaggggtgcttccgtggtcggcggctgctgggctccgcgccggggtccgagtcccacgaagccccggcccgagccgccggatgcccgcgcgcagcggggcccagttttgccgacggatggggcaaaagaagcagcgaccagctagagcagggcagccacacagctcgtccgacgcagcccaggcacctgcagagcagccacacagctcgtccgatgcagcccaggcaccttgccccagggagcgctgcttgggaccgcccaccactccgggcccataccgcagcatctatttctcaagcccaaagggccaccttacccgactggggttggagttcttcgaccagccggcagtccccctggcccgggcatttctgggacaggtcctagtccggcgacttcctaatggcacagaactccgaggccgcatcgtggagaccgaggcatacctggggccagaggatgaagccgcccactcaaggggtggccggcagaccccccgcaaccgaggcatgttcatgaagccggggaccctgtacgtgtacatcatttacggcatgtacttctgcatgaacatctccagccagggacgggcatggcgactttgcggagaacacctggagaccccgggatagtttggaaccaatgtggtacatttcaacgccccccggaaaagcgacgcccaacggggcccaaaggaccggcgaacctaggggcccccacaaggggcgggcgcgggcacaacaacagtgtgacaagagccggcgcgagaaccaattgtcggggtcccaccccacacaagtgtagcaaaggccgtcgagagcagagaccaccatcccggtagagaggaagagcacactancttattaatccagataagaagactttacatacttttctactctcactgacatacacaaccaaccacacctacacgcgaccccacacaacaactctcacctccctcacgtccatcactcatcaccaccgccacccgacacccatcacccaccccactcctcgacacacgcacctgtccggcttcactatagcacccatcacctagaccagcacaatcagcacaacgaaagcgacacactcgaggcatgcccacacccgaccgcactcccacccgcagcgggcaaagggaacgtacgacggagcagcgcagagaacgcgaggagaacgaagcggagggaggcggaggcgagagatgactcagggctgcgcagacacgcgaggaggcgagggcagcaacggacggacgacagagaatcaagcggacgaacgggactaaaaccgacggcggaagaggcagcacgccgagcggccgagggcagacggaacggcggcgaagcacgcatgcggagcgaagtggacgaagcacacggacgaccgcgaccagacgaccaaaagcgcagccacgcagaggacggacggacggcggcgcgatgaagagagatagagcaggcagagcaggaggcagaaggaaggagacacacgaagagcggaacggggaaccgcatggggacgggacggcgagaacgaggccaaacacggaggacagagacgaaaggacgccacgacgacgacaccccacacgaccgagaacaccgaaccaacaccgacacgaagacgacgcgaccaacgagcagagagacagcagccagagtcaacccgcaacagacgcacaccaccaacccacacca

SEQ ID NO: 360258 - DNA, 1293 bp, Homo sapiens
  misc_feature (1293)..(1293): n is a, c, g, or t
cggtcctaggggtgcttccgtggtcggcggctgctgggctccgcgccggggtccgagtcccacgaagccccggcccgagccgccggatgcccgcgcgcagcggggcccaggtcatgcagcctgggcccccatgcccgtgcagctcgcacatatgtggggcagagcagccaccctgcccccagcagcagccgtccatcgtcagacgtgatcatttcctgaggcctcgagtgtgtcagggtgtttgtgcctcataacaacccacaggatggtcacccccgctttgcagatgaagaaaccaaagcagttttgccgacggatggggcaaaagaagcagcgaccagctagagcagggcagccacacagctcgtccgacgcagcccaggcacctgcagagcagccacacagctcgtccgatgcagcccaggcaccttgccccagggagcgctgcttgggaccgcccaccactccgggcccataccgcagcatctatttctcaagcccaaagggccaccttacccgactggggttggagttcttcgaccagccggcagtccccctggcccgggcatttctgggacaggtcctagtccggcgacttcctaatggcacagaactccgaggccgcatcgtggagaccgaggcatacctggggccagaggatgaagccgcccactcaaggggtggccggcagaccccccgcaaccgaggcatgttcatgaagccggggaccctgtacgtgtacatcatttacggcatgtacttctgcatgaacatctccagccagggggacggggcttgcgtcttgctgcgagcactggagcccctggaaggtctggagaccatgcgtcagcttcgcagcaccctccggaaaggcaccgccagccgtgtcctcaaggaccgcgagctctgcagtggcccctccaagctgtgccaggccctggccatcaacaagagctttgaccagagggacctggcacaggatgaagctgtatggctggagcgtggtcccctggagcccagtgagccggctgtagtggcagcagcccgggtgggcgtcggccatgcaggggagtgggcccggaaacccctccgcttctatgtccggggcagcccctgggtcagtgtggtcgacagagtggctgagcaggacacacaggcctgagcaaagggcctgcccagacaagattttttaattgtttaaaaaccgaataaatgttttatttctagaaaaacacactacaaaaaaaactcagactagttctctctccctcgttgccgaattcggcacgaagn

SEQ ID NO: 360259 - DNA, 1115 bp, Homo sapiens
  misc_feature (1115)..(1115): n is a, c, g, or t
cctttctgtaggaccaggtgtcacactcatctgagggctccagacacatggcctgtgcgtctgtcctgcccagcgtctcccacctgacgcggccaggtgcccagttgctcttcaaggccttttcagttttgccgacggatggggcaaaagaagcagcgaccagctagagcagggcagccacacagctcgtccgacgcagcccaggcacctgcagagcagccacacagctcgtccgatgcagcccaggcaccttgccccagggagcgctgcttgggaccgcccaccactccgggcccataccgcagcatctatttctcaagcccaaagggccaccttacccgactggggttggagttcttcgaccagccggcagtccccctggcccgggcatttctgggacaggtcctagtccggcgacttcctaatggcacagaactccgaggccgcatcgtggagaccgaggcatacctggggccagaggatgaagccgcccactcaaggggtggccggcagaccccccgcaaccgaggcatgttcatgaagccggggaccctgtacgtgtacatcatttacggcatgtacttctgcatgaacatctccagccagggggacggggcttgcgtcttgctgcgagcactggagcccctggaaggtctggagaccatgcgtcagcttcgcagcaccctccggaaaggcaccgccagccgtgtcctcaaggaccgcgagctctgcagtggcccctccaagctgtgccaggccctggccatcaacaagagctttgaccagagggacctggcacaggatgaagctgtatggctggagcgtggtcccctggagcccagtgagccggctgtagtggcagcagcccgggtgggcgtcggccatgcaggggagtgggcccggaaacccctccgcttctatgtccggggcagcccctgggtcagtgtggtcgacagagtggctgagcaggacacacaggcctgagcaaagggcctgcccagacaagattttttaattgtttaaaaaccgaataaatgttttatttctagaaaaacacactacaaaaaaaactcagactagttctctctccctcgttgccgaattcggcacgaagn

SEQ ID NO: 360260 - DNA, 1052 bp, Homo sapiens
  misc_feature (1052)..(1052): n is a, c, g, or t
cggtcctaggggtgcttccgtggtcggcggctgctgggctccgcgccggggtccgagtcccacgaagccccggcccgagccgccggatgcccgcgcgcagcggggcccagttttgccgacggatggggcaaaagaagcagcgaccagctagagcagggcagccacacagctcgtccgacgcagcccaggcacctgcagagcagccacacagctcgtccgatgcagcccaggcaccttgccccagggagcgctgcttgggaccgcccaccactccgggcccataccgcagcatctatttctcaagcccaaagggccaccttacccgactggggttggagttcttcgaccagccggcagtccccctggcccgggcatttctgggacaggtcctagtccggcgacttcctaatggcacagaactccgaggccgcatcgtggagaccgaggcatacctggggccagaggatgaagccgcccactcaaggggtggccggcagaccccccgcaaccgaggcatgttcatgaagccggggaccctgtacgtgggacggggcttgcgtcttgctgcgagcactggagcccctggaaggtctggagaccatgcgtcagcttcgcagcaccctccggaaaggcaccgccagccgtgtcctcaaggaccgcgagctctgcagtggcccctccaagctgtgccaggccctggccatcaacaagagctttgaccagagggacctggcacaggatgaagctgtatggctggagcgtggtcccctggagcccagtgagccggctgtagtggcagcagcccgggtgggcgtcggccatgcaggggagtgggcccggaaacccctccgcttctatgtccggggcagcccctgggtcagtgtggtcgacagagtggctgagcaggacacacaggcctgagcaaagggcctgcccagacaagattttttaattgtttaaaaaccgaataaatgttttatttctagaaaaacacactacaaaaaaaactcagactagttctctctccctcgttgccgaattcggcacgaagn

SEQ ID NO: 360261 - DNA, 1099 bp, Homo sapiens
  misc_feature (1099)..(1099): n is a, c, g, or t
cggtcctaggggtgcttccgtggtcggcggctgctgggctccgcgccggggtccgagtcccacgaagccccggcccgagccgccggatgcccgcgcgcagcggggcccagttttgccgacggatggggcaaaagaagcagcgaccagctagagcagggcagccacacagctcgtccgacgcagcccaggcacctgcagagcagccacacagctcgtccgatgcagcccaggcaccttgccccagggagcgctgcttgggaccgcccaccactccgggcccataccgcagcatctatttctcaagcccaaagggccaccttacccgactggggttggagttcttcgaccagccggcagtccccctggcccgggcatttctgggacaggtcctagtccggcgacttcctaatggcacagaactccgaggccgcatcgtggagaccgaggcatacctggggccagaggatgaagccgcccactcaaggggtggccggcagaccccccgcaaccgaggcatgttcatgaagccggggaccctgtacgtgtacatcatttacggcatgtacttctgcatgaacatctccagccagggggacggggcttgcgtcttgctgcgagcactggagcccctggaaggtctggagaccatgcgtcagcttcgcagcaccctccggaaaggcaccgccagccgtgtcctcaaggaccgcgagctctgcagtggcccctccaagctgtgccaggccctggccatcaacaagagctttgaccagagggacctggcacaggatgaagctgtatggctggagcgtggtcccctggagcccagtgagccggctgtagtggcagcagcccgggtgggcgtcggccatgcaggggagtgggcccggaaacccctccgcttctatgtccggggcagcccctgggtcagtgtggtcgacagagtggctgagcaggacacacaggcctgagcaaagggcctgcccagacaagattttttaattgtttaaaaaccgaataaatgttttatttctagaaaaacacactacaaaaaaaactcagactagttctctctccctcgttgccgaattcggcacgaagn

SEQ ID NO: 360262 - DNA, 1038 bp, Homo sapiens
cggtcctaggggtgcttccgtggtcggcggctgctgggctccgcgccggggtccgagtcccacgaagccccggcccgagccgccggatgcccgcgcgcagcggggcccagttttgccgacggatggggcaaaagaagcagcgaccagctagagcagggcagccacacagctcgtccgacgcagcccaggcacctgcagagcagccacacagctcgtccgatgcagcccaggcaccttgccccagggagcgctgcttgggaccgcccaccactccgggcccataccgcagcatctatttctcaagcccaaagggccaccttacccgactggggttggagttcttcgaccagccggcagtccccctggcccgggcatttctgggacaggtcctagtccggcgacttcctaatggcacagaactccgaggccgcatcgtggagaccgaggcatacctggggccagaggatgaagccgcccactcaaggggtggccggcagaccccccgcaaccgaggcatgttcatgaagccggggaccctgtacgtgtacatcatttacggcatgtacttctgcatgaacatctccagccagggggacggggcttgcgtcttgctgcgagcactggagcccctggaaggtctggagaccatgcgtcagcttcgcagcaccctccggaaaggcaccgccagccgtgtcctcaaggaccgcgagctctgcagtggcccctccaagctgtgccaggccctggccatcaacaagagctttgaccagagggacctggcacaggatgaagctgtatggctggagcgtggtcccctggagcccagtgagccggctgtagtggcagcagcccgggtgggcgtcggccatgcaggggagtgggcccggaaacccctccgcttctatgtccggggcagcccctgggtcagtgtggtcgacagagtggctgagcaggacacacaggcctgagcaaagggcctgcccagacaagattttttaattgtttaaaaaccgaacggcacgagctcgtgccgaattc

SEQ ID NO: 360263 - DNA, 3699 bp, Homo sapiens
acggatataagattgcgtgggttctgcctaaagctgaattcccagcgctttggcttctctgagttggggttgtgtataggggtcttcgaacagttccggaaccagccagcagcctttaattcttgggcggaccacggccggttctgtgttcttggctaagatgagcagccaccataccacctttccttttgaccctgagcggcgagtccggagtacgctgaagaaggtctttgggtttgactcttttaagacgcctttacaggagagtgcgaccatggctgtagtaaaaggtaacaaggacgtctttgtgtgcatgcccacaggggcaggaaaatccctatgctatcagctccctgctctgttggccaaaggcatcaccattgtagtctctcctctcattgctttgattcaggaccaagtggaccacttgctaaccctaaaggtacgagtaagttccctgaactcgaagctctctgcacaggaaaggaaggagctgcttgctgacctggagcgagaaaagccccagaccaagattctgtacatcaccccagagatggcagcttcatcctccttccagcccaccctgaactccctggtgtcccgccacctgctgtcttacttggtggtggatgaagctcattgtgtttcccaatgggggcatgactttcgtcctgactacttgcgtctgggtgccctgcgctcccgcctgggacatgccccttgtgtggctctgaccgccacagccaccccacaggtccaagaggacgtgtttgctgccctgcacctgaagaaaccagttgccatcttcaagactccctgcttccgggccaacctcttctatgatgtgcaattcaaggaactgatttctgatccctatgggaacctgaaggacttctgccttaaggctcttggacaggaggctgataaagggttatctggctgcggcattgtgtactgcaggactagagaggcttgtgaacagctggccatagagctcagctgcaggggtgtgaacgccaaggcttaccatgcagggctgaaggcctctgaaagaacgctggtgcagaacgactggatggaggagaaggtccctgtaattgttgcaaccattagttttgggatgggagtggataaagccaatgtcaggtttgtcgcccattggaatattgccaagtctatggctgggtactaccaggagtctggccgggctggcagggatgggaagccttcctggtgccgtctctattactccaggaatgaccgggaccaagtcagcttcctgatcaggaaggaagtagcaaaactccaggaaaagagaggaaacaaagcatctgataaagccactatcatggcctttgatgccctggtgaccttctgtgaagaactggggtgccgccatgccgccattgccaagtacttcggggatgcgctgcctgcctgcgccaaaggctgcgaccactgccagaaccccacggccgtgcggaggcggctggaggccttggagcgcagcagcagctggagcaagacctgcatcgggccctcccaggggaacggctttgaccccgagctgtacgagggaggccgcaagggctacggggacttcagcaggtatgacgaaggttctggaggcagcggggatgaaggcagagatgaggcccacaagcgggagtggaacctcttctatcagaagcagatgcagctgcgcaagggcaaagaccccaagatagaagaatttgtacccccagatgagaactgtcccctgaaagaggcttctagcaggaggatccccaggctgactgtgaaggcacgggagcactgcctgcggcttctggaggaggcgctgagcagcaaccgccagtcaacacgtaccgctgatgaagctgacctccgggccaaggccgtggagctggaacatgagacattccggaacgccaaggtggccaacctctacaaggccagcgtgctgaagaaggtggccgatatccacagagcctccaaggatgggcagccctatgacatgggaggcagtgccaagagctgcagtgcccaagctgagcccccggagcccaatgagtatgacattccaccagcctcccatgtgtactcgctcaaacccaagcgggtgggagctggtttccccaaaggctcctgcccgttccagacggccacggaactgatggagacgactcggatcagggagcaagccccccagcccgagcggggaggcgagcacgagcccccgagccggccctgtggcctcctggatgaggatgggagtgagcccctccctgggcccagaggggaggtccctggaggcagcgctcactatggggggccctcccctgagaagaaggcaaaaagttcctctgggggcagttcccttgccaagggccgggctagcaagaaacagcagctcctagccacagcggcccacaaggattctcagagcatcgcccgcttcttctgccgaagggtggaaagcccagctctgctggcatcagccccagaggcagaaggtgcctgcccctcctgtgagggggttcagggacccccgatggccccagagaagtacacaggggaggaagatggagccgggggacattcgcctgcccctccccagactgaggagtgcctcagggagaggccaagcacctgcccgcccagagaccagggcacccctgaagtccagcccacccctgcaaaggacacatggaagggcaagcggcctcgatcccagcaggagaacccagagagccagcctcagaagaggccacgcccctcagccaagccctccgtcgtagctgaggtcaagggcagcgtctcggccagcgaacagggcaccttgaatcccacggctcaagaccccttccagctctccgctcctggcgtctccttgaaggaggctgcaaatgttgtggtcaagtgcctcacccctttctacaaggagggcaagtttgcttccaaggagttgtttaaaggctttgcccgccacctctcacacttgctgactcagaagacctctcctggaaggagcgtgaaagaagaggcccagaacctcatcaggcacttcttccatggccgggcccggtgcgagagcgaagctgactggcatggcctgtgtggcccccagagatgaccaactgctggctgggcagggcccgcgtcctcccccagattctagcatgggtcatcctgggcctcacctgctgatgccagggccatcgtcttttctcagtccttctcctttccaaccatacttggctttggggatgaccccagacaccccctgaatccaggtcagaggtcagcccacctttctttctgcttgcaaagcctatagacccttctcagagcggtcctcatggctgggttttctgggacacatgtcgaggacagaaggtggagggtggtggagctgctgctggaagaaggggaaggaagagtggcccctccccgagttctaagtcaggatgaggcccacctgtccaaggtatcggaacctacccaggggaccctcagatcctccacccactcccccatccattacgatgccagcttccagccttgcccaggtcagagctgtggcagaggagaggcagccaggccctgttcctgctcagctcctgctcaggaaggccaggcctgacagatgtttgggagaggaataaagttgtgttgttgtggggcatgcaggcgtgc

SEQ ID NO: 360264 - DNA, 3243 bp, Homo sapiens
  misc_feature (3065)..(3065): n is a, c, g, or t
acggatataagattgcgtgggttctgcctaaagctgaattcccagcgctttggcttctctgagttggggttgtgtataggggtcttcgaacagttccggaaccagccagcagcctttaattcttgggcggaccacggccggttctgtgttcttggctaagatgagcagccaccataccacctttccttttgaccctgagcggcgagtccggagtacgctgaagaaggtctttgggtttgactcttttaagacgcctttacaggagagtgcgaccatggctgtagtaaaaggtaacaaggacgtctttgtgtgcatgcccacaggggcaggaaaatccctatgctatcagctccctgctctgttggccaaaggcatcaccattgtagtctctcctctcattgctttgattcaggaccaagtggaccacttgctaaccctaaaggtacgagtaagttccctgaactcgaagctctctgcacaggaaaggaaggagctgcttgctgacctggagcgagaaaagccccagaccaagattctgtacatcaccccagagatggcagcttcatcctccttccagcccaccctgaactccctggtgtcccgccacctgctgtcttacttggtggtggatgaagctcattgtgtttcccaatgggggcatgactttcgtcctgactacttgcgtctgggtgccctgcgctcccgcctgggacatgccccttgtgtggctctgaccgccacagccaccccacaggtccaagaggacgtgtttgctgccctgcacctgaagaaaccagttgccatcttcaagactccctgcttccgggccaacctcttctatgatgtgcaattcaaggaactgatttctgatccctatgggaacctgaaggacttctgccttaaggctcttggacaggaggctgataaagggttatctggctgcggcattgtgtactgcaggactagagaggcttgtgaacagctggccatagagctcagctgcaggggtgtgaacgccaaggcttaccatgcagggctgaaggcctctgaaagaacgctggtgcagaacgactggatggaggagaaggtccctgtaattgttgcaaccattagttttgggatgggagtggataaagccaatgtcaggtttgtcgcccattggaatattgccaagtctatggctgggtactaccaggagtctggccgggctggcagggatgggaagccttcctggtgccgtctctattactccaggaatgaccgggaccaagtcagcttcctgatcaggaaggaagtagcaaaactccaggaaaagagaggaaacaaagcatctgataaagccactatcatggcctttgatgccctggtgaccttctgtgaagaactggggcgatggggcaggggccacggaaagagtctgagggctgcttggtgtagtcaggttgtgtccaggcatgcggagctgtgagtgcctgcaggagagacacccaggaggagtttttacattttggtctaaaaagctcttggattcatctcatctcatggaatgatcctgtcggatgacgctgacgtgattgcttcagacttagaggtgaataaattgaggtccagagaggtcacagtcacgaagctcatggtagactgaggccactaaacacccgtctcctgattttcagtggcgtcctcatttgcatacacctgggccatcttggtttttgcaagaaaaaagcgaggaaatcagagaaactctttgggctgtgtgtttttatttccacctcctcctgttgaccagtgagtcggtggcttctggactgaagctattttcttctccaaactgctgtctctaatttggcctctgtggcaagaccacgcccagcaaaagtggtcggctgcagtgccaggaccacccttgcctgcagcctttgcgaccagagcccttttcaagcacaattaatatgggagttgctaaatttggccttcttaggcttcttgagcagagctcttatttctggtgaggaatgaaagggccaagtgttcctgttcattgtgagtcctgtttgctgaaaaaagctctggggctgtctgaggctctggaatgctctctggagggttaactctgcctgtccccagggtctgctccgcctgccaggcaagggaacaggtcctcccaagggcctctgccttcatttctcctgtcaccttccggggagctgggacttcttagtgcatcagtggcctggttgccaggggctggggtccaggcatctgtggactcaaggagtccaggtgacggtgttgcgctgcctcttgagcagcctcgtgcctgtctcctttgctacatgtgatgattctgaaatccaggcagcaggctggaataaacgctgctggtatgtctgtattggctactgttctttgaataagtgaatgtttctttattgcataactggcgtgtagcacaaagaaaaagccccttctccaccagatatttgcttcctaagaatagttctcattggaggctgaggtcgaagcagcctcccaccagcgatcccttggggcgggcacctggcagtgagggacagagctagtggggtgggctcagcagaagtgggtgcatttctgcaaaggaagctgtaggtttcttgtcagtttgttgtggggtctgaggcacatgggagtgggaccagcagaaaagatactcaggtcagttaactaatgaggcggggctgtggcagccagcggttttcctctcttctctatctgtagctactttctctgggctgcagccttgaaaaagcagtgtttgattattcataacaatgagtgtcttttagtgtcacagggaacagttattaggtttgaagcaacctccagcttgaggcctcggcatcttgagatggaagagcagccttgtgtttagacctggattgaattgggccctgttgtttcctgggatcttggggctgggggtgcccaacagcctggcatcttcttgtttctctgtgtgtttactcattcattcatttattcagctgataaatattgactgatgccagctctgtgccagncacattggacatgggggatacactagtgggcagaaatagccccgtcccagagccggccatggtggctcatacctgttataccagcactttgggaggctgaagtgggaggatcgcttgagcctgggagttcaagaccagcctgggcaacatggcaagaccctgtctctactaaaaatac

SEQ ID NO: 360265 - DNA, 1186 bp, Homo sapiens
cactgggcgtctgaagctcagagctcacccctgagatgggctctcctaggcctcctgggatgagggagccaccaggacccagtgctgtgatgcctgctcttccctctaccagcacctgcccgcccagagaccagggcacccctgaagtccagcccacccctgcaaaggacacatggaagggcaagcggcctcgatcccagcaggagaacccagagagccagcctcagaagaggccacgcccctcagccaagccctccgtcgtagctgaggtcaagggcagcgtctcggccagcgaacagggcaccttgaatcccacggctcaagaccccttccagctctccgctcctggcgtctccttgaaggaggctgcaaatgttgtggtcaagtgcctcacccctttctacaaggagggcaagtttgcttccaaggagttgtttaaaggctttgcccgccacctctcacacttgctgactcagaagacctctcctggaaggagcgtgaaagaagaggcccagaacctcatcaggcacttcttccatggccgggcccggtgcgagagcgaagctgactggcatggcctgtgtggcccccagagatgaccaactgctggctgggcagggcccgcgtcctcccccagattctagcatgggtcatcctgggcctcacctgctgatgccagggccatcgtcttttctcagtccttctcctttccaaccatacttggctttggggatgaccccagacaccccctgaatccaggtcagaggtcagcccacctttctttctgcttgcaaagcctatagacccttctcagagcggtcctcatggctgggttttctgggacacatgtcgaggacagaaggtggagggtggtggagctgctgctggaagaaggggaaggaagagtggcccctccccgagttctaagtcaggatgaggcccacctgtccaaggtatcggaacctacccaggggaccctcagatcctccacccactcccccatccattacgatgccagcttccagccttgcccaggtcagagctgtggcagaggagaggcagccaggccctgttcctgctcagctcctgctcaggaaggccaggcctgacagatgtttgggagaggaataaagttgtgttgttgtggggcatgcaggcgtgcacacagcccttttcaaaaaaaaaa

SEQ ID NO: 360266 - DNA, 553 bp, Homo sapiens
aaggagtctagacatgaatgaggtctaaaatgagaattgtgactcctgagttcttcccactgtatgcctacccagcagcaggtgatacgtttttacaagccaaggtaatggtgttgtaggaagagcacaggctttggaggccaacggacttgggcttgaatcatggccctaacctttgccaaatgctctgtgccacacatgggctagggtctttgtgcctgtcagctgaggctcagtaaagttaagcgcctgatgttaaggtcagacagctgggaagtgaaagattcagggtttgtgaagtgcctagcacacagtgtcaaacccaaaataggcccccggtaaacccaagggaaatgtgagttcccttctccatcttcccctcctttacagggctgaaggcctctgaaagaacgctggtgcagaacgactggatggaggagaaggtccctgtaattgttgcaaccattagttttgggatgggagtggataaagccaatgtcaggtgagctttggttcttgccctgcctgcgaacctatgagaggatcctctaga

SEQ ID NO: 360267 - DNA, 3055 bp, Homo sapiens
aaggagtctagacatgaatgaggtctaaaatgagaattgtgactcctgagttcttcccactgtatgcctacccagcagcaggtgatacgtttttacaagccaaggtaatggtgttgtaggaagagcacaggctttggaggccaacggacttgggcttgaatcatggccctaacctttgccaaatgctctgtgccacacatgggctagggtctttgtgcctgtcagctgaggctcagtaaagttaagcgcctgatgttaaggtcagacagctgggaagtgaaagattcagggtttgtgaagtgcctagcacacagtgtcaaacccaaaataggcccccggtaaacccaagggaaatgtgagttcccttctccatcttcccctcctttacagggctgaaggcctctgaaagaacgctggtgcagaacgactggatggaggagaaggtccctgtaattgttgcaaccattagttttgggatgggagtggataaagccaatgtcaggtttgtcgcccattggaatattgccaagtctatggctgggtactaccaggagtctggccgggctggcagggatgggaagccttcctggtgccgtctctattactccaggaatgaccgggaccaagtcagcttcctgatcaggaaggaagtagcaaaactccaggaaaagagaggaaacaaagcatctgataaagccactatcatggcctttgatgccctggtgaccttctgtgaagaactggggtgccgccatgccgccattgccaagtacttcggggatgcgctgcctgcctgcgccaaaggctgcgaccactgccagaaccccacggccgtgcggaggcggctggaggccttggagcgcagcagcagctggagcaagacctgcatcgggccctcccaggggaacggctttgaccccgagctgtacgagggaggccgcaagggctacggggacttcagcaggtatgacgaaggttctggaggcagcggggatgaaggcagagatgaggcccacaagcgggagtggaacctcttctatcagaagcagatgcagctgcgcaagggcaaagaccccaagatagaagaatttgtacccccagatgagaactgtcccctgaaagaggcttctagcaggaggatccccaggctgactgtgaaggcacgggagcactgcctgcggcttctggaggaggcgctgagcagcaaccgccagtcaacacgtaccgctgatgaagctgacctccgggccaaggccgtggagctggaacatgagacattccggaacgccaaggtggccaacctctacaaggccagcgtgctgaagaaggtggccgatatccacagagcctccaaggatgggcagccctatgacatgggaggcagtgccaagagctgcagtgcccaagctgagcccccggagcccaatgagtatgacattccaccagcctcccatgtgtactcgctcaaacccaagcgggtgggagctggtttccccaaaggctcctgcccgttccagacggccacggaactgatggagacgactcggatcagggagcaagccccccagcccgagcggggaggcgagcacgagcccccgagccggccctgtggcctcctggatgaggatgggagtgagcccctccctgggcccagaggggaggtccctggaggcagcgctcactatggggggccctcccctgagaagaaggcaaaaagttcctctgggggcagttcccttgccaagggccgggctagcaagaaacagcagctcctagccacagcggcccacaaggattctcagagcatcgcccgcttcttctgccgaagggtggaaagcccagctctgctggcatcagccccagaggcagaaggtgcctgcccctcctgtgagggggttcagggacccccgatggccccagagaagtacacaggggaggaagatggagccgggggacattcgcctgcccctccccagactgaggagtgcctcagggagaggccaagcacctgcccgcccagagaccagggcacccctgaagtccagcccacccctgcaaaggacacatggaagggcaagcggcctcgatcccagcaggagaacccagagagccagcctcagaagaggccacgcccctcagccaagccctccgtcgtagctgaggtcaagggcagcgtctcggccagcgaacagggcaccttgaatcccacggctcaagaccccttccagctctccgctcctggcgtctccttgaaggaggctgcaaatgttgtggtcaagtgcctcacccctttctacaaggagggcaagtttgcttccaaggagttgtttaaaggctttgcccgccacctctcacacttgctgactcagaagacctctcctggaaggagcgtgaaagaagaggcccagaacctcatcaggcacttcttccatggccgggcccggtgcgagagcgaagctgactggcatggcctgtgtggcccccagagatgaccaactgctggctgggcagggcccgcgtcctcccccagattctagcatgggtcatcctgggcctcacctgctgatgccagggccatcgtcttttctcagtccttctcctttccaaccatacttggctttggggatgaccccagacaccccctgaatccaggtcagaggtcagcccacctttctttctgcttgcaaagcctatagacccttctcagagcggtcctcatggctgggttttctgggacacatgtcgaggacagaaggtggagggtggtggagctgctgctggaagaaggggaaggaagagtggcccctccccgagttctaagtcaggatgaggcccacctgtccaaggtatcggaacctacccaggggaccctcagatcctccacccactcccccatccattacgatgccagcttccagccttgcccaggtcagagctgtggcagaggagaggcagccaggccctgttcctgctcagctcctgctcaggaaggccaggcctgacagatgtttgggagaggaataaagttgtgttgttgtggggcatgcaggcgtgc

SEQ ID NO: 360268 - DNA, 3195 bp, Homo sapiens
acggatataagattgcgtgggttctgcctaaagctgaattcccagcgctttggcttctctgagttggggttgtgtataggggtcttcgaacagttccggaaccagccagcagcctttaattcttgggcggaccacggccggttctgtgttcttggctaagatgagcagccaccataccacctttccttttgaccctgagcggcgagtccggagtacgctgaagaaggtctttgggtttgactcttttaagacgcctttacaggagagtgcgaccatggctgtagtaaaaggtaacaaggacgtctttgtgtgcatgcccacaggggcaggaaaatccctatgctatcagctccctgctctgttggccaaaggcatcaccattgtagtctctcctctcattgctttgattcaggaccaagtggaccacttgctaaccctaaaggtacgagtaagttccctgaactcgaagctctctgcacaggaaaggaaggagctgcttgctgacctggagcgagaaaagccccagaccaagattctgtacatcaccccagagatggcagcttcatcctccttccagcccaccctgaactccctggtgtcccgccacctgctgtcttacttggtggtggatgaagctcattgtgtttcccaatgggggcatgactttcgtcctgactacttgcgtctgggtgccctgcgctcccgcctgggacatgccccttgtgtggctctgaccgccacagccaccccacaggtccaagaggacgtgtttgctgccctgcacctgaagaaaccagttgccatcttcaagactccctgcttccgggccaacctcttctatgatgtgcaattcaaggaactgatttctgatccctatgggaacctgaaggacttctgccttaaggctcttggacaggaggctgataaagggttatctggctgcggcattgtgtactgcaggactagagaggcttgtgaacagctggccatagagctcagctgcaggggtgtgaacgccaaggcttaccatgcagggctgaaggcctctgaaagaacgctggtgcagaacgactggatggaggagaaggtccctgtaattgttgcaaccattagttttgggatgggagtggataaagccaatgtcaggtttgtcgcccattggaatattgccaagtctatggctgggtactaccaggagtctggccgggctggcagggatgggaagccttcctggtgccgtctctattactccaggaatgaccgggaccaagtcagcttcctgatcaggaaggaagtagcaaaactccaggaaaagagaggaaacaaagcatctgataaagccactatcatggcctttgatgccctggtgaccttctgtgaagaactggggtgccgccatgccgccattgccaagtacttcggggatgcgctgcctgcctgcgccaaaggctgcgaccactgccagaaccccacggccgtgcggaggcggctggaggccttggagcgcagcagcagctggagcaagacctgcatcgggccctcccaggggaacggctttgaccccaatgagtatgacattccaccagcctcccatgtgtactcgctcaaacccaagcgggtgggagctggtttccccaaaggctcctgcccgttccagacggccacggaactgatggagacgactcggatcagggagcaagccccccagcccgagcggggaggcgagcacgagcccccgagccggccctgtggcctcctggatgaggatgggagtgagcccctccctgggcccagaggggaggtccctggaggcagcgctcactatggggggccctcccctgagaagaaggcaaaaagttcctctgggggcagttcccttgccaagggccgggctagcaagaaacagcagctcctagccacagcggcccacaaggattctcagagcatcgcccgcttcttctgccgaagggtggaaagcccagctctgctggcatcagccccagaggcagaaggtgcctgcccctcctgtgagggggttcagggacccccgatggccccagagaagtacacaggggaggaagatggagccgggggacattcgcctgcccctccccagactgaggagtgcctcagggagaggccaagcacctgcccgcccagagaccagggcacccctgaagtccagcccacccctgcaaaggacacatggaagggcaagcggcctcgatcccagcaggagaacccagagagccagcctcagaagaggccacgcccctcagccaagccctccgtcgtagctgaggtcaagggcagcgtctcggccagcgaacagggcaccttgaatcccacggctcaagaccccttccagctctccgctcctggcgtctccttgaaggaggctgcaaatgttgtggtcaagtgcctcacccctttctacaaggagggcaagtttgcttccaaggagttgtttaaaggctttgcccgccacctctcacacttgctgactcagaagacctctcctggaaggagcgtgaaagaagaggcccagaacctcatcaggcacttcttccatggccgggcccggtgcgagagcgaagctgactggcatggcctgtgtggcccccagagatgaccaactgctggctgggcagggcccgcgtcctcccccagattctagcatgggtcatcctgggcctcacctgctgatgccagggccatcgtcttttctcagtccttctcctttccaaccatacttggctttggggatgaccccagacaccccctgaatccaggtcagaggtcagcccacctttctttctgcttgcaaagcctatagacccttctcagagcggtcctcatggctgggttttctgggacacatgtcgaggacagaaggtggagggtggtggagctgctgctggaagaaggggaaggaagagtggcccctccccgagttctaagtcaggatgaggcccacctgtccaaggtatcggaacctacccaggggaccctcagatcctccacccactcccccatccattacgatgccagcttccagccttgcccaggtcagagctgtggcagaggagaggcagccaggccctgttcctgctcagctcctgctcaggaaggccaggcctgacagatgtttgggagaggaataaagttgtgttgttgtggggcatgcaggcgtgc

SEQ ID NO: 360269 - DNA, 2334 bp, Homo sapiens
cctctgcggtgctgcctgctccaggtgccgccatgccgccattgccaagtacttcggggatgcgctgcctgcctgcgccaaaggctgcgaccactgccagaaccccacggccgtgcggaggcggctggaggccttggagcgcagcagcagctggagcaagacctgcatcgggccctcccaggggaacggctttgaccccgagctgtacgagggaggccgcaagggctacggggacttcagcaggtatgacgaaggttctggaggcagcggggatgaaggcagagatgaggcccacaagcgggagtggaacctcttctatcagaagcagatgcagctgcgcaagggcaaagaccccaagatagaagaatttgtacccccagatgagaactgtcccctgaaagaggcttctagcaggaggatccccaggctgactgtgaaggcacgggagcactgcctgcggcttctggaggaggcgctgagcagcaaccgccagtcaacacgtaccgctgatgaagctgacctccgggccaaggccgtggagctggaacatgagacattccggaacgccaaggtggccaacctctacaaggccagcgtgctgaagaaggtggccgatatccacagagcctccaaggatgggcagccctatgacatgggaggcagtgccaagagctgcagtgcccaagctgagcccccggagcccaatgagtatgacattccaccagcctcccatgtgtactcgctcaaacccaagcgggtgggagctggtttccccaaaggctcctgcccgttccagacggccacggaactgatggagacgactcggatcagggagcaagccccccagcccgagcggggaggcgagcacgagcccccgagccggccctgtggcctcctggatgaggatgggagtgagcccctccctgggcccagaggggaggtccctggaggcagcgctcactatggggggccctcccctgagaagaaggcaaaaagttcctctgggggcagttcccttgccaagggccgggctagcaagaaacagcagctcctagccacagcggcccacaaggattctcagagcatcgcccgcttcttctgccgaagggtggaaagcccagctctgctggcatcagccccagaggcagaaggtgcctgcccctcctgtgagggggttcagggacccccgatggccccagagaagtacacaggggaggaagatggagccgggggacattcgcctgcccctccccagactgaggagtgcctcagggagaggccaagcacctgcccgcccagagaccagggcacccctgaagtccagcccacccctgcaaaggacacatggaagggcaagcggcctcgatcccagcaggagaacccagagagccagcctcagaagaggccacgcccctcagccaagccctccgtcgtagctgaggtcaagggcagcgtctcggccagcgaacagggcaccttgaatcccacggctcaagaccccttccagctctccgctcctggcgtctccttgaaggaggctgcaaatgttgtggtcaagtgcctcacccctttctacaaggagggcaagtttgcttccaaggagttgtttaaaggctttgcccgccacctctcacacttgctgactcagaagacctctcctggaaggagcgtgaaagaagaggcccagaacctcatcaggcacttcttccatggccgggcccggtgcgagagcgaagctgactggcatggcctgtgtggcccccagagatgaccaactgctggctgggcagggcccgcgtcctcccccagattctagcatgggtcatcctgggcctcacctgctgatgccagggccatcgtcttttctcagtccttctcctttccaaccatacttggctttggggatgaccccagacaccccctgaatccaggtcagaggtcagcccacctttctttctgcttgcaaagcctatagacccttctcagagcggtcctcatggctgggttttctgggacacatgtcgaggacagaaggtggagggtggtggagctgctgctggaagaaggggaaggaagagtggcccctccccgagttctaagtcaggatgaggcccacctgtccaaggtatcggaacctacccaggggaccctcagatcctccacccactcccccatccattacgatgccagcttccagccttgcccaggtcagagctgtggcagaggagaggcagccaggccctgttcctgctcagctcctgctcaggaaggccaggcctgacagatgtttgggagaggaataaagttgtgttgttgtggggcatgcaggcgtgc

SEQ ID NO: 360270 - DNA, 3903 bp, Homo sapiens
  misc_feature (3760)..(3760): n is a, c, g, or t
acggatataagattgcgtgggttctgcctaaagctgaattcccagcgctttggcttctctgagttggggttgtgtataggggtcttcgaacagttccggaaccagccagcagcctttaattcttgggcggaccacggccggttctgtgttcttggctaagatgagcagccaccataccacctttccttttgaccctgagcggcgagtccggagtacgctgaagaaggtctttgggtttgactcttttaagacgcctttacaggagagtgcgaccatggctgtagtaaaaggtaacaaggacgtctttgtgtgcatgcccacaggggcaggaaaatccctatgctatcagctccctgctctgttggccaaaggcatcaccattgtagtctctcctctcattgctttgattcaggaccaagtggaccacttgctaaccctaaaggtacgagtaagttccctgaactcgaagctctctgcacaggaaaggaaggagctgcttgctgacctggagcgagaaaagccccagaccaagattctgtacatcaccccagagatggcagcttcatcctccttccagcccaccctgaactccctggtgtcccgccacctgctgtcttacttggtggtggatgaagctcattgtgtttcccaatgggggcatgactttcgtcctgactacttgcgtctgggtgccctgcgctcccgcctgggacatgccccttgtgtggctctgaccgccacagccaccccacaggtccaagaggacgtgtttgctgccctgcacctgaagaaaccagttgccatcttcaagactccctgcttccgggccaacctcttctatgatgtgcaattcaaggaactgatttctgatccctatgggaacctgaaggacttctgccttaaggctcttggacaggaggctgataaagggttatctggctgcggcattgtgtactgcaggactagagaggcttgtgaacagctggccatagagctcagctgcaggggtgtgaacgccaaggcttaccatgcagggctgaaggcctctgaaagaacgctggtgcagaacgactggatggaggagaaggtccctgtaattgttgcaaccattagttttgggatgggagtggataaagccaatgtcaggtttgtcgcccattggaatattgccaagtctatggctgggtactaccaggagtctggccgggctggcagggatgggaagccttcctggtgccgtctctattactccaggaatgaccgggaccaagtcagcttcctgatcaggaaggaagtagcaaaactccaggaaaagagaggaaacaaagcatctgataaagccactatcatggcctttgatgccctggtgaccttctgtgaagaactggggtgccgccatgccgccattgccaagtacttcggggatgcgctgcctgcctgcgccaaaggctgcgaccactgccagaaccccacggccgtgcggaggcggctggaggccttggagcgcagcagcagctggagcaagacctgcatcgggccctcccaggggaacggctttgaccccgagctgtacgagggaggccgcaagggctacggggacttcagcaggtatgacgaaggttctggaggcagcggggatgaaggcagagatgaggcccacaagcgggagtggaacctcttctatcagaagcagatgcagctgcgcaagggcaaagaccccaagatagaagaatttgtacccccagatgagaactgtcccctgaaagaggcttctagcaggaggatccccaggctgactgtgaaggcacgggagcactgcctgcggcttctggaggaggcgctgagcagcaaccgccagtcaacacgtaccgctgatgaagctgacctccgggccaaggccgtggagctggaacatgagacattccggaacgccaaggtggccaacctctacaaggccagcgtgctgaagaaggtggccgatatccacagagcctccaaggatgggcagccctatgacatgggaggcagtgccaagagctgcagtgcccaagctgagcccccggagcccaatgagtatgacattccaccagcctcccatgtgtactcgctcaaacccaagcgggtgggagctggtttccccaaaggctcctgcccgttccagacggccacggaactgatggagacgactcggatcagggagcaagccccccagcccgagcggggaggcgagcacgagcccccgagccggccctgtggcctcctggatgaggatgggagtgagcccctccctgggcccagaggggaggtccctggaggcagcgctcactatggggggccctcccctgagaagaaggcaaaaagttcctctgggggcagttcccttgccaagggccgggctagcaagaaacagcagctcctagccacagcggcccacaaggattctcagagcatcgcccgcttcttctgccgaagggtggaaagcccagctctgctggcatcagccccagaggcagaaggtgcctgcccctcctgtgagggggttcagggacccccgatggccccagagaagtacacaggggaggaagatggagccgggggacattcgcctgcccctccccagactgaggagtgcctcagggagaggccaagcacctgcccgcccagagaccagggcacccctgaagtccagcccacccctgcaaaggacacatggaagggcaagcggcctcgatcccagcaggagaacccagagagccagcctcagaagaggccacgcccctcagccaagccctccgtcgtagctgaggtcaagggcagcgtctcggccagcgaacagggcaccttgaatcccacggctcaagaccccttccagctctccgctcctggcgtctccttgaaggaggctgcaaatgttgtggtcaagtgcctcacccctttctacaaggagggcaagtttgcttccaaggagttgtttaaaggctttgcccgccacctctcacacttgctgactcagaagacctctcctggaaggagcgtgaaagaagaggcccagaacctcatcaggcacttcttccatggccgggcccggtgcgagagcgaagctgactggcatggcctgtgtggcccccagagatgaccaactgctggctgggcagggcccgcgtcctcccccagattctagcatgggtcatcctgggcctcacctgctgatgccagggccatcgtcttttctcagtccttctcctttccaaccatacttggctttggggatgaccccagacaccccctgaatccaggtcagaggtcagcccacctttctttctgcttgcaaagcctatagacccttctcagagcggtcctcatggctgggttttctgggacacatgtcgaggacagaaggtggagggtggtggagctgctgctggaagaaggggaaggaagagtggcccctccccgagttctaagtcaggatgaggcccacctgtccaaggtatcggaacctacccaggggaccctcagatcctccacccactcccccatccattacgatgccagcttccagccttgcccaggtcagagctgtggcagaggagaggcagccaggccctgttcctgctcagctcctgctcaggaaggccaggcctgacagatgtttgggagaggaataaagttgtgttgttgtggggcatgcaggcgtgcccccaaaaaaaaaaaaccacgaaaaaaaagggggggggttaaaatcccggggggcccaatnaccgccccgtttttggacaagggccccaggggggatataagagagcggggcgctcaagtgcgggggaaacgcggcattgaggacacctgggggcagggcccccagagtagccggaaaacggttgggaccgtgggggagcgtaa

SEQ ID NO: 360271 - DNA, 2189 bp, Homo sapiens
  misc_feature (2151)..(2151): n is a, c, g, or t
  misc_feature (2153)..(2153): n is a, c, g, or t
  misc_feature (2168)..(2168): n is a, c, g, or t
  misc_feature (2179)..(2179): n is a, c, g, or t
acggatataagattgcgtgggttctgcctaaagctgaattcccagcgctttggcttctctgagttggggttgtgtataggggtcttcgaacagttccggaaccagccagcagcctttaattcttgggcggaccacggccggttctgtgttcttggctaagatgagcagccaccataccacctttccttttgaccctgagcggcgagtccggagtacgctgaagaaggtctttgggtttgactcttttaagacgcctttacaggagagtgcgaccatggctgtagtaaaaggtaacaaggacgtctttgtgtgcatgcccacaggggcaggaaaatccctatgctatcagctccctgctctgttggccaaaggcatcaccattgtagtctctcctctcattgctttgattcaggaccaagtggaccacttgctaaccctaaaggtacgagtaagttccctgaactcgaagctctctgcacaggaaaggaaggagctgcttgctgacctggagcgagaaaagccccagaccaagattctgtacatcaccccagagatggcagcttcatcctccttccagcccaccctgaactccctggtgtcccgccacctgctgtcttacttggtggtggatgaagctcattgtgtttcccaatgggggcatgactttcgtcctgactacttgcgtctgggtgccctgcgctcccgcctgggacatgccccttgtgtggctctgaccgccacagccaccccacaggtccaagaggacgtgtttgctgccctgcacctgaagaaaccagttgccatcttcaagactccctgcttccgggccaacctcttctatgatgtgcaattcaaggaactgatttctgatccctatgggaacctgaaggacttctgccttaaggctcttggacaggaggctgataaagggttatctggctgcggcattgtgtactgcaggactagagaggcttgtgaacagctggccatagagctcagctgcaggggtgtgaacgccaaggcttaccatgcagggctgaaggcctctgaaagaacgctggtgcagaacgactggatggaggagaaggtccctgtaattgttgcaaccattagttttgggatgggagtggataaagccaatgtcaggtttgtcgcccattggaatattgccaagtctatggctgggtactaccaggagtctggccgggctggcagggatgggaagccttcctggtgccgtctctattactccaggaatgaccgggaccaagtcagcttcctgatcaggaaggaagtagcaaaactccaggaaaagagaggaaacaaagcatctgataaagccactatcatggcctttgatgccctggtgaccttctgtgaagaactggggtaagtgacttattttatatgtggagcaaagtgtcagtgagatcatttacttccccggcacgccctagttaagcagctgacataagacagcccgtaggctaccaagggacacctgcctgcaaaggctgttgtgtcgggcagtgtggaagtcaggaccttgctcttctctattggaggccccgggatctctcgcagtgtggggatttgctcagtattctgagtggtgtccttccctccactccaccctcttctgggatggctggccccacaagccactcagttccaagggatgtgaccagctctgagccatcggctttgtggtcatcatgtgccaccgagctgggacttctggcatcacttgagtagtcctcacccttatccaggacccacacagaagcctgtggccccacttacctcggggagtcatgtgctttgaactcacgcatctgttttacctgcatctgcaggcgatggggcaggggccacggaaagagtctgagggctgcttggtgtagtcaggttgtgtccaggcatgcggagctgtgagtgcctgcaggagagacacccaggaggagtttttacattttggtctaaaaagctcttggattcatctcatctcatggaatgatcctgtcggatgacgctgacgtgattgcttcagacttagaggtgaataaattgaggtccagagaggtcacagtcacgaagctcatggtagactgaggccactaaacacccgtctcctgattccaccttgcaggntncgagctcaatcgtanctggctgcgancccgggggaa

SEQ ID NO: 360272 - DNA, 3221 bp, Homo sapiens
acggatataagattgcgtgggttctgcctaaagctgaattcccagcgctttggcttctctgagttggggttgtgtataggggtcttcgaacagttccggaaccagccagcagcctttaattcttgggcggaccacggccggttctgtgttcttggctaagatgagcagccaccataccacctttccttttgaccctgagcggcgagtccggagtacgctgaagaaggtctttgggtttgactcttttaagacgcctttacaggagagtgcgaccatggctgtagtaaaaggtaacaaggacgtctttgtgtgcatgcccacaggggcaggaaaatccctatgctatcagctccctgctctgttggccaaaggcatcaccattgtagtctctcctctcattgctttgattcaggaccaagtggaccacttgctaaccctaaaggtacgagtaagttccctgaactcgaagctctctgcacaggaaaggaaggagctgcttgctgacctggagcgagaaaagccccagaccaagattctgtacatcaccccagagatggcagcttcatcctccttccagcccaccctgaactccctggtgtcccgccacctgctgtcttacttggtggtggatgaagctcattgtgtttcccaatgggggcatgactttcgtcctgactacttgcgtctgggtgccctgcgctcccgcctgggacatgccccttgtgtggctctgaccgccacagccaccccacaggtccaagaggacgtgtttgctgccctgcacctgaagaaaccagttgccatcttcaagactccctgcttccgggccaacctcttctatgatgtgcaattcaaggaactgatttctgatccctatgggaacctgaaggacttctgccttaaggctcttggacaggaggctgataaagggttatctggctgcggcattgtgtactgcaggactagagaggcttgtgaacagctggccatagagctcagctgcaggggtgtgaacgccaaggcttaccatgcagggctgaaggcctctgaaagaacgctggtgcagaacgactggatggaggagaaggtccctgtaattgttgcaaccattagttttgggatgggagtggataaagccaatgtcaggtttgtcgcccattggaatattgccaagtctatggctgggtactaccaggagtctggccgggctggcagggatgggaagccttcctggtgccgtctctattactccaggaatgaccgggaccaagtcagcttcctgatcaggaaggaagtagcaaaactccaggaaaagagaggaaacaaagcatctgataaagccactatcatggcctttgatgccctggtgaccttctgtgaagaactggggtgccgccatgccgccattgccaagtacttcggggatgcgctgcctgcctgcgccaaaggctgcgaccactgccagaaccccacggccgtgcggaggcggctggaggccttggagcgcagcagcagctggagcaagacctgcatcgggccctcccaggggaacggctttgaccccgagctgtacgagggaggccgcaagggctacggggacttcagcaggtatgacgaaggttctggaggcagcggggatgaaggcagagatgaggcccacaagcgggagtggaacctcttctatcagaagcagatgcagctgcgcaagggcaaagaccccaagatagaagaatttgtacccccagatgagaactgtcccctgaaagaggcttctagcaggaggatccccaggctgactgtgaaggcacgggagcactgcctgcggcttctggaggaggcgctgagcagcaaccgccagtcaacacgtaccgctgatgaagctgacctccgggccaaggccgtggagctggaacatgagacattccggaacgccaaggtggccaacctctacaaggccagcgtgctgaagaaggtggccgatatccacagagcctccaaggatgggcagccctatgacatgggaggcagtgccaagagctgcagtgcccaagctgagcccccggagcccaatgagtatgacattccaccagcctcccatgtgtactcgctcaaacccaagcgggtgggagctggtttccccaaaggctcctgcccgttccagacggccacggaactgatggagacgactcggatcagggagcaagccccccagcccgagcggggaggcgagcacgagcccccgagccggccctgtggcctcctggatgaggatgggagtgagcccctccctgggcccagaggggaggtccctggaggcagcgctcactatggggggccctcccctgagaagaaggcaaaaagttcctctgggggcagttcccttgccaagggccgggctagcaagaaacagcagctcctagccacagcggcccacaaggattctcagagcatcgcccgcttcttctgccgaagggtggaaagcccagctctgctggcatcagccccagaggcagaaggtgcctgcccctcctgtgagggggttcagggacccccgatggccccagagaagtacacaggggaggaagatggagccgggggacattcgcctgcccctccccagactgaggagtgcctcagggagaggccaagcacctgcccgcccagagaccagggcacccctgaagtccagcccacccctgcaaaggacacatggaagggcaagcggcctcgatcccagcaggagaacccagagagccagcctcagaagaggccacgcccctcagccaagccctccgtcgtagctgaggtcaagggcagcgtctcggccagcgaacagggcaccttgaatcccacggctcaagaccccttccagctctccgctcctggcgtctccttgaaggaggctgcaaatgttgtggtcaagtgcctcacccctttctacaaggagggcaagtttgcttccaaggagttgtttaaaggctttgcccgccacctctcacacttgctgactcagaagacctctcctggaaggagcgtgaaagaagaggcccagaacctcatcaggcacttcttccatggccgggcccggtgcgagagcgaagctgactggcatcagcaggtgaggcccaggatgacccatgctagaatctgggggaggactgcggccctgcccagccagcagttggtcacctctggggccacacagccatgccaggtcgagc

SEQ ID NO: 360273 - DNA, 3495 bp, Homo sapiens
  misc_feature (3317)..(3317): n is a, c, g, or t
acggatataagattgcgtgggttctgcctaaagctgaattcccagcgctttggcttctctgagttggggttgtgtataggggtcttcgaacagttccggaaccagccagcagcctttaattcttgggcggaccacggccggttctgtgttcttggctaagatgagcagccaccataccacctttccttttgaccctgagcggcgagtccggagtacgctgaagaaggtctttgggtttgactcttttaagacgcctttacaggagagtgcgaccatggctgtagtaaaaggtaacaaggacgtctttgtgtgcatgcccacaggggcaggaaaatccctatgctatcagctccctgctctgttggccaaaggcatcaccattgtagtctctcctctcattgctttgattcaggaccaagtggaccacttgctaaccctaaaggtacgagtaagttccctgaactcgaagctctctgcacaggaaaggaaggagctgcttgctgacctggagcgagaaaagccccagaccaagattctgtacatcaccccagagatggcagcttcatcctccttccagcccaccctgaactccctggtgtcccgccacctgctgtcttacttggtggtggatgaagctcattgtgtttcccaatgggggcatgactttcgtcctgactacttgcgtctgggtgccctgcgctcccgcctgggacatgccccttgtgtggctctgaccgccacagccaccccacaggtccaagaggacgtgtttgctgccctgcacctgaagaaaccagttgccatcttcaagactccctgcttccgggccaacctcttctatgatgtgcaattcaaggaactgatttctgatccctatgggaacctgaaggacttctgccttaaggctcttggacaggaggctgataaaggggtttgtcgcccattggaatattgccaagtctatggctgggtactaccaggagtctggccgggctggcagggatgggaagccttcctggtgccgtctctattactccaggaatgaccgggaccaagtcagcttcctgatcaggaaggaagtagcaaaactccaggaaaagagaggaaacaaagcatctgataaagccactatcatggcctttgatgccctggtgaccttctgtgaagaactggggtaagtgacttattttatatgtggagcaaagtgtcagtgagatcatttacttccccggcacgccctagttaagcagctgacataagacagcccgtaggctaccaagggacacctgcctgcaaaggctgttgtgtcgggcagtgtggaagtcaggaccttgctcttctctattggaggccccgggatctctcgcagtgtggggatttgctcagtattctgagtggtgtccttccctccactccaccctcttctgggatggctggccccacaagccactcagttccaagggatgtgaccagctctgagccatcggctttgtggtcatcatgtgccaccgagctgggacttctggcatcacttgagtagtcctcacccttatccaggacccacacagaagcctgtggccccacttacctcggggagtcatgtgctttgaactcacgcatctgttttacctgcatctgcaggcgatggggcaggggccacggaaagagtctgagggctgcttggtgtagtcaggttgtgtccaggcatgcggagctgtgagtgcctgcaggagagacacccaggaggagtttttacattttggtctaaaaagctcttggattcatctcatctcatggaatgatcctgtcggatgacgctgacgtgattgcttcagacttagaggtgaataaattgaggtccagagaggtcacagtcacgaagctcatggtagactgaggccactaaacacccgtctcctgattttcagtggcgtcctcatttgcatacacctgggccatcttggtttttgcaagaaaaaagcgaggaaatcagagaaactctttgggctgtgtgtttttatttccacctcctcctgttgaccagtgagtcggtggcttctggactgaagctattttcttctccaaactgctgtctctaatttggcctctgtggcaagaccacgcccagcaaaagtggtcggctgcagtgccaggaccacccttgcctgcagcctttgcgaccagagcccttttcaagcacaattaatatgggagttgctaaatttggccttcttaggcttcttgagcagagctcttatttctggtgaggaatgaaagggccaagtgttcctgttcattgtgagtcctgtttgctgaaaaaagctctggggctgtctgaggctctggaatgctctctggagggttaactctgcctgtccccagggtctgctccgcctgccaggcaagggaacaggtcctcccaagggcctctgccttcatttctcctgtcaccttccggggagctgggacttcttagtgcatcagtggcctggttgccaggggctggggtccaggcatctgtggactcaaggagtccaggtgacggtgttgcgctgcctcttgagcagcctcgtgcctgtctcctttgctacatgtgatgattctgaaatccaggcagcaggctggaataaacgctgctggtatgtctgtattggctactgttctttgaataagtgaatgtttctttattgcataactggcgtgtagcacaaagaaaaagccccttctccaccagatatttgcttcctaagaatagttctcattggaggctgaggtcgaagcagcctcccaccagcgatcccttggggcgggcacctggcagtgagggacagagctagtggggtgggctcagcagaagtgggtgcatttctgcaaaggaagctgtaggtttcttgtcagtttgttgtggggtctgaggcacatgggagtgggaccagcagaaaagatactcaggtcagttaactaatgaggcggggctgtggcagccagcggttttcctctcttctctatctgtagctactttctctgggctgcagccttgaaaaagcagtgtttgattattcataacaatgagtgtcttttagtgtcacagggaacagttattaggtttgaagcaacctccagcttgaggcctcggcatcttgagatggaagagcagccttgtgtttagacctggattgaattgggccctgttgtttcctgggatcttggggctgggggtgcccaacagcctggcatcttcttgtttctctgtgtgtttactcattcattcatttattcagctgataaatattgactgatgccagctctgtgccagncacattggacatgggggatacactagtgggcagaaatagccccgtcccagagccggccatggtggctcatacctgttataccagcactttgggaggctgaagtgggaggatcgcttgagcctgggagttcaagaccagcctgggcaacatggcaagaccctgtctctactaaaaatac

SEQ ID NO: 360274 - DNA, 1315 bp, Homo sapiens
acggatataagattgcgtgggttctgcctaaagctgaattcccagcgctttggcttctctgagttggggttgtgtataggggtcttcgaacagttccggaaccagccagcagcctttaattcttgggcggaccacggccggttctgtgttcttggctaagatgagcagccaccataccacctttccttttgaccctgagcggcgagtccggagtacgctgaagaaggtctttgggtttgactcttttaagacgcctttacaggagagtgcgaccatggctgtagtaaaaggtaacaaggacgtctttgtgtgcatgcccacaggggcaggaaaatccctatgctatcagctccctgctctgttggccaaaggcatcaccattgtagtctctcctctcattgctttgattcaggaccaagtggaccacttgctaaccctaaaggtacgagtaagttccctgaactcgaagctctctgcacaggaaaggaaggagctgcttgctgacctggagcgagaaaagccccagaccaagattctgtacatcaccccagagatggcagcttcatcctccttccagcccaccctgaactccctggtgtcccgccacctgctgtcttacttggtggtggatgaagctcattgtgtttcccaatgggggcatgactttcgtcctgactacttgcgtctgggtgccctgcgctcccgcctgggacatgccccttgtgtggctctgaccgccacagccaccccacaggtccaagaggacgtgtttgctgccctgcacctgaagaaaccagttgccatcttcaagactccctgcttccgggccaacctcttctatgatgtgcaattcaaggaactgatttctgatccctatgggaacctgaaggacttctgccttaaggctcttggacaggaggctgataaagggttatctggctgcggcattgtgtactgcaggactagagaggcttgtgaacagctggccatagagctcagctgcaggggtgtgaacgccaaggcttaccatgcagggctgaaggcctctgaaagaacgctggtgcagaacgactggatggaggagaaggtccctgtaattgttgcaaccattagttttgggatgggagtggataaagccaatgtcaggtttgtcgcccattggaatattgccaagtctatggctgggtactaccaggagtctggccgggctggcagggatgggaagccttcctggtgccgtctctattactccaggaataaagttgtgttgttgtggggcatgcaggcgtgcacacagcccttttcaaaaaaaaaa

SEQ ID NO: 360275 - DNA, 3710 bp, Homo sapiens
  misc_feature (3532)..(3532): n is a, c, g, or t
acggatataagattgcgtgggttctgcctaaagctgaattcccagcgctttggcttctctgagttggggttgtgtataggggtcttcgaacagttccggaaccagccagcagcctttaattcttgggcggaccacggccggttctgtgttcttggctaagatgagcagccaccataccacctttccttttgaccctgagcggcgagtccggagtacgctgaagaaggtctttgggtttgactcttttaagacgcctttacaggagagtgcgaccatggctgtagtaaaaggtaacaaggacgtctttgtgtgcatgcccacaggggcaggaaaatccctatgctatcagctccctgctctgttggccaaaggcatcaccattgtagtctctcctctcattgctttgattcaggaccaagtggaccacttgctaaccctaaaggtacgagtaagttccctgaactcgaagctctctgcacaggaaaggaaggagctgcttgctgacctggagcgagaaaagccccagaccaagattctgtacatcaccccagagatggcagcttcatcctccttccagcccaccctgaactccctggtgtcccgccacctgctgtcttacttggtggtggatgaagctcattgtgtttcccaatgggggcatgactttcgtcctgactacttgcgtctgggtgccctgcgctcccgcctgggacatgccccttgtgtggctctgaccgccacagccaccccacaggtccaagaggacgtgtttgctgccctgcacctgaagaaaccagttgccatcttcaagactccctgcttccgggccaacctcttctatgatgtgcaattcaaggaactgatttctgatccctatgggaacctgaaggacttctgccttaaggctcttggacaggaggctgataaagggttatctggctgcggcattgtgtactgcaggactagagaggcttgtgaacagctggccatagagctcagctgcaggggtgtgaacgccaaggcttaccatgcagggctgaaggcctctgaaagaacgctggtgcagaacgactggatggaggagaaggtccctgtaattgttgcaaccattagttttgggatgggagtggataaagccaatgtcaggtttgtcgcccattggaatattgccaagtctatggctgggtactaccaggagtctggccgggctggcagggatgggaagccttcctggtgccgtctctattactccaggaatgaccgggaccaagtcagcttcctgatcaggaaggaagtagcaaaactccaggaaaagagaggaaacaaagcatctgataaagccactatcatggcctttgatgccctggtgaccttctgtgaagaactggggtaagtgacttattttatatgtggagcaaagtgtcagtgagatcatttacttccccggcacgccctagttaagcagctgacataagacagcccgtaggctaccaagggacacctgcctgcaaaggctgttgtgtcgggcagtgtggaagtcaggaccttgctcttctctattggaggccccgggatctctcgcagtgtggggatttgctcagtattctgagtggtgtccttccctccactccaccctcttctgggatggctggccccacaagccactcagttccaagggatgtgaccagctctgagccatcggctttgtggtcatcatgtgccaccgagctgggacttctggcatcacttgagtagtcctcacccttatccaggacccacacagaagcctgtggccccacttacctcggggagtcatgtgctttgaactcacgcatctgttttacctgcatctgcaggcgatggggcaggggccacggaaagagtctgagggctgcttggtgtagtcaggttgtgtccaggcatgcggagctgtgagtgcctgcaggagagacacccaggaggagtttttacattttggtctaaaaagctcttggattcatctcatctcatggaatgatcctgtcggatgacgctgacgtgattgcttcagacttagaggtgaataaattgaggtccagagaggtcacagtcacgaagctcatggtagactgaggccactaaacacccgtctcctgattttcagtggcgtcctcatttgcatacacctgggccatcttggtttttgcaagaaaaaagcgaggaaatcagagaaactctttgggctgtgtgtttttatttccacctcctcctgttgaccagtgagtcggtggcttctggactgaagctattttcttctccaaactgctgtctctaatttggcctctgtggcaagaccacgcccagcaaaagtggtcggctgcagtgccaggaccacccttgcctgcagcctttgcgaccagagcccttttcaagcacaattaatatgggagttgctaaatttggccttcttaggcttcttgagcagagctcttatttctggtgaggaatgaaagggccaagtgttcctgttcattgtgagtcctgtttgctgaaaaaagctctggggctgtctgaggctctggaatgctctctggagggttaactctgcctgtccccagggtctgctccgcctgccaggcaagggaacaggtcctcccaagggcctctgccttcatttctcctgtcaccttccggggagctgggacttcttagtgcatcagtggcctggttgccaggggctggggtccaggcatctgtggactcaaggagtccaggtgacggtgttgcgctgcctcttgagcagcctcgtgcctgtctcctttgctacatgtgatgattctgaaatccaggcagcaggctggaataaacgctgctggtatgtctgtattggctactgttctttgaataagtgaatgtttctttattgcataactggcgtgtagcacaaagaaaaagccccttctccaccagatatttgcttcctaagaatagttctcattggaggctgaggtcgaagcagcctcccaccagcgatcccttggggcgggcacctggcagtgagggacagagctagtggggtgggctcagcagaagtgggtgcatttctgcaaaggaagctgtaggtttcttgtcagtttgttgtggggtctgaggcacatgggagtgggaccagcagaaaagatactcaggtcagttaactaatgaggcggggctgtggcagccagcggttttcctctcttctctatctgtagctactttctctgggctgcagccttgaaaaagcagtgtttgattattcataacaatgagtgtcttttagtgtcacagggaacagttattaggtttgaagcaacctccagcttgaggcctcggcatcttgagatggaagagcagccttgtgtttagacctggattgaattgggccctgttgtttcctgggatcttggggctgggggtgcccaacagcctggcatcttcttgtttctctgtgtgtttactcattcattcatttattcagctgataaatattgactgatgccagctctgtgccagncacattggacatgggggatacactagtgggcagaaatagccccgtcccagagccggccatggtggctcatacctgttataccagcactttgggaggctgaagtgggaggatcgcttgagcctgggagttcaagaccagcctgggcaacatggcaagaccctgtctctactaaaaatac

SEQ ID NO: 360276 - DNA, 3891 bp, Homo sapiens
acggatataagattgcgtgggttctgcctaaagctgaattcccagcgctttggcttctctgagttggggttgtgtataggggtcttcgaacagttccggaaccagccagcagcctttaattcttgggcggaccacggccggttctgatatcttagggtgaagagagggaggtgtcggccagccaagagagaaaattgcggatcttgggctcaggaagacgggagaaggggttcggggtcccggggtggaagaacggtcgtcgtggttgcgcttatagaagtaggagcagagggttctcgtggcaaccttttactacctttgccttaacctttggccactgttcttggctaagatgagcagccaccataccacctttccttttgaccctgagcggcgagtccggagtacgctgaagaaggtctttgggtttgactcttttaagacgcctttacaggagagtgcgaccatggctgtagtaaaaggtaacaaggacgtctttgtgtgcatgcccacaggggcaggaaaatccctatgctatcagctccctgctctgttggccaaaggcatcaccattgtagtctctcctctcattgctttgattcaggaccaagtggaccacttgctaaccctaaaggtacgagtaagttccctgaactcgaagctctctgcacaggaaaggaaggagctgcttgctgacctggagcgagaaaagccccagaccaagattctgtacatcaccccagagatggcagcttcatcctccttccagcccaccctgaactccctggtgtcccgccacctgctgtcttacttggtggtggatgaagctcattgtgtttcccaatgggggcatgactttcgtcctgactacttgcgtctgggtgccctgcgctcccgcctgggacatgccccttgtgtggctctgaccgccacagccaccccacaggtccaagaggacgtgtttgctgccctgcacctgaagaaaccagttgccatcttcaagactccctgcttccgggccaacctcttctatgatgtgcaattcaaggaactgatttctgatccctatgggaacctgaaggacttctgccttaaggctcttggacaggaggctgataaagggttatctggctgcggcattgtgtactgcaggactagagaggcttgtgaacagctggccatagagctcagctgcaggggtgtgaacgccaaggcttaccatgcagggctgaaggcctctgaaagaacgctggtgcagaacgactggatggaggagaaggtccctgtaattgttgcaaccattagttttgggatgggagtggataaagccaatgtcaggtttgtcgcccattggaatattgccaagtctatggctgggtactaccaggagtctggccgggctggcagggatgggaagccttcctggtgccgtctctattactccaggaatgaccgggaccaagtcagcttcctgatcaggaaggaagtagcaaaactccaggaaaagagaggaaacaaagcatctgataaagccactatcatggcctttgatgccctggtgaccttctgtgaagaactggggtgccgccatgccgccattgccaagtacttcggggatgcgctgcctgcctgcgccaaaggctgcgaccactgccagaaccccacggccgtgcggaggcggctggaggccttggagcgcagcagcagctggagcaagacctgcatcgggccctcccaggggaacggctttgaccccgagctgtacgagggaggccgcaagggctacggggacttcagcaggtatgacgaaggttctggaggcagcggggatgaaggcagagatgaggcccacaagcgggagtggaacctcttctatcagaagcagatgcagctgcgcaagggcaaagaccccaagatagaagaatttgtacccccagatgagaactgtcccctgaaagaggcttctagcaggaggatccccaggctgactgtgaaggcacgggagcactgcctgcggcttctggaggaggcgctgagcagcaaccgccagtcaacacgtaccgctgatgaagctgacctccgggccaaggccgtggagctggaacatgagacattccggaacgccaaggtggccaacctctacaaggccagcgtgctgaagaaggtggccgatatccacagagcctccaaggatgggcagccctatgacatgggaggcagtgccaagagctgcagtgcccaagctgagcccccggagcccaatgagtatgacattccaccagcctcccatgtgtactcgctcaaacccaagcgggtgggagctggtttccccaaaggctcctgcccgttccagacggccacggaactgatggagacgactcggatcagggagcaagccccccagcccgagcggggaggcgagcacgagcccccgagccggccctgtggcctcctggatgaggatgggagtgagcccctccctgggcccagaggggaggtccctggaggcagcgctcactatggggggccctcccctgagaagaaggcaaaaagttcctctgggggcagttcccttgccaagggccgggctagcaagaaacagcagctcctagccacagcggcccacaaggattctcagagcatcgcccgcttcttctgccgaagggtggaaagcccagctctgctggcatcagccccagaggcagaaggtgcctgcccctcctgtgagggggttcagggacccccgatggccccagagaagtacacaggggaggaagatggagccgggggacattcgcctgcccctccccagactgaggagtgcctcagggagaggccaagcacctgcccgcccagagaccagggcacccctgaagtccagcccacccctgcaaaggacacatggaagggcaagcggcctcgatcccagcaggagaacccagagagccagcctcagaagaggccacgcccctcagccaagccctccgtcgtagctgaggtcaagggcagcgtctcggccagcgaacagggcaccttgaatcccacggctcaagaccccttccagctctccgctcctggcgtctccttgaaggaggctgcaaatgttgtggtcaagtgcctcacccctttctacaaggagggcaagtttgcttccaaggagttgtttaaaggctttgcccgccacctctcacacttgctgactcagaagacctctcctggaaggagcgtgaaagaagaggcccagaacctcatcaggcacttcttccatggccgggcccggtgcgagagcgaagctgactggcatggcctgtgtggcccccagagatgaccaactgctggctgggcagggcccgcgtcctcccccagattctagcatgggtcatcctgggcctcacctgctgatgccagggccatcgtcttttctcagtccttctcctttccaaccatacttggctttggggatgaccccagacaccccctgaatccaggtcagaggtcagcccacctttctttctgcttgcaaagcctatagacccttctcagagcggtcctcatggctgggttttctgggacacatgtcgaggacagaaggtggagggtggtggagctgctgctggaagaaggggaaggaagagtggcccctccccgagttctaagtcaggatgaggcccacctgtccaaggtatcggaacctacccaggggaccctcagatcctccacccactcccccatccattacgatgccagcttccagccttgcccaggtcagagctgtggcagaggagaggcagccaggccctgttcctgctcagctcctgctcaggaaggccaggcctgacagatgtttgggagaggaataaagttgtgttgttgtggggcatgcaggcgtgc

SEQ ID NO: 360277 - DNA, 4040 bp, Homo sapiens
acggatataagattgcgtgggttctgcctaaagctgaattcccagcgctttggcttctctgagttggggttgtgtataggggtcttcgaacagttccggaaccagccagcagcctttaattcttgggcggaccacggccggttctgtgttcttggctaagatgagcagccaccataccacctttccttttgaccctgagcggcgagtccggagtacgctgaagaaggtctttgggtttgactcttttaagacgcctttacaggagagtgcgaccatggctgtagtaaaaggtaacaaggacgtctttgtgtgcatgcccacaggggcaggaaaatccctatgctatcagctccctgctctgttggccaaaggcatcaccattgtagtctctcctctcattgctttgattcaggaccaagtggaccacttgctaaccctaaaggtacgagtaagttccctgaactcgaagctctctgcacaggaaaggaaggagctgcttgctgacctggagcgagaaaagccccagaccaagattctgtacatcaccccagagatggcagcttcatcctccttccagcccaccctgaactccctggtgtcccgccacctgctgtcttacttggtggtggatgaagctcattgtgtttcccaatgggggcatgactttcgtcctgactacttgcgtctgggtgccctgcgctcccgcctgggacatgccccttgtgtggctctgaccgccacagccaccccacaggtccaagaggacgtgtttgctgccctgcacctgaagaaaccagttgccatcttcaagactccctgcttccgggccaacctcttctatgatgtgcaattcaaggaactgatttctgatccctatgggaacctgaaggacttctgccttaaggctcttggacaggaggctgataaagggttatctggctgcggcattgtgtactgcaggactagagaggcttgtgaacagctggccatagagctcagctgcaggggtgtgaacgccaaggcttaccatgcagggctgaaggcctctgaaagaacgctggtgcagaacgactggatggaggagaaggtccctgtaattgttgcaaccattagttttgggatgggagtggataaagccaatgtcaggtttgtcgcccattggaatattgccaagtctatggctgggtactaccaggagtctggccgggctggcagggatgggaagccttcctggtgccgtctctattactccaggaatgaccgggaccaagtcagcttcctgatcaggaaggaagtagcaaaactccaggaaaagagaggaaacaaagcatctgataaagccactatcatggcctttgatgccctggtgaccttctgtgaagaactggggtgccgccatgccgccattgccaagtacttcggggatgcgctgcctgcctgcgccaaaggctgcgaccactgccagaaccccacggccgtgcggaggcggctggaggccttggagcgcagcagcagctggagcaagacctgcatcgggccctcccaggggaacggctttgaccccgagctgtacgagggaggccgcaagggctacggggacttcagcaggtatgacgaaggttctggaggcagcggggatgaaggcagagatgaggcccacaagcgggagtggaacctcttctatcagaagcagatgcagctgcgcaagggcaaagaccccaagatagaagaatttgtacccccagatgagaactgtcccctgaaagaggcttctagcaggaggatccccaggctgactgtgaaggcacgggagcactgcctgcggcttctggaggaggcgctgagcagcaaccgccagtcaacacgtaccgctgatgagtgagttccacgatcactgggctgaggagcactccaagctctcgttcccttggagactgcaggaccctgtcaaccctggcctgtttgggccacctctccccagattgtacctctcctactccaggggactgcccctacaaccccaccagggccaggcatggctacaacttaggtgctaccagcagctgctgagggacagtaagccacagggtgctcagagagccctaatcagaatccctgtgcccaaggcctaccccaccaggcctggagtcccgcaagagctcagcagggagaagcccaggcccacctgataccttgtgcctgttaccttgcacccacagagctgacctccgggccaaggccgtggagctggaacatgagacattccggaacgccaaggtggccaacctctacaaggccagcgtgctgaagaaggtggccgatatccacagagcctccaaggatgggcagccctatgacatgggaggcagtgccaagagctgcagtgcccaagctgagcccccggagcccaatgagtatgacattccaccagcctcccatgtgtactcgctcaaacccaagcgggtgggagctggtttccccaaaggctcctgcccgttccagacggccacggaactgatggagacgactcggatcagggagcaagccccccagcccgagcggggaggcgagcacgagcccccgagccggccctgtggcctcctggatgaggatgggagtgagcccctccctgggcccagaggggaggtccctggaggcagcgctcactatggggggccctcccctgagaagaaggcaaaaagttcctctgggggcagttcccttgccaagggccgggctagcaagaaacagcagctcctagccacagcggcccacaaggattctcagagcatcgcccgcttcttctgccgaagggtggaaagcccagctctgctggcatcagccccagaggcagaaggtgcctgcccctcctgtgagggggttcagggacccccgatggccccagagaagtacacaggggaggaagatggagccgggggacattcgcctgcccctccccagactgaggagtgcctcagggagaggccaagcacctgcccgcccagagaccagggcacccctgaagtccagcccacccctgcaaaggacacatggaagggcaagcggcctcgatcccagcaggagaacccagagagccagcctcagaagaggccacgcccctcagccaagccctccgtcgtagctgaggtcaagggcagcgtctcggccagcgaacagggcaccttgaatcccacggctcaagaccccttccagctctccgctcctggcgtctccttgaaggaggctgcaaatgttgtggtcaagtgcctcacccctttctacaaggagggcaagtttgcttccaaggagttgtttaaaggctttgcccgccacctctcacacttgctgactcagaagacctctcctggaaggagcgtgaaagaagaggcccagaacctcatcaggcacttcttccatggccgggcccggtgcgagagcgaagctgactggcatggcctgtgtggcccccagagatgaccaactgctggctgggcagggcccgcgtcctcccccagattctagcatgggtcatcctgggcctcacctgctgatgccagggccatcgtcttttctcagtccttctcctttccaaccatacttggctttggggatgaccccagacaccccctgaatccaggtcagaggtcagcccacctttctttctgcttgcaaagcctatagacccttctcagagcggtcctcatggctgggttttctgggacacatgtcgaggacagaaggtggagggtggtggagctgctgctggaagaaggggaaggaagagtggcccctccccgagttctaagtcaggatgaggcccacctgtccaaggtatcggaacctacccaggggaccctcagatcctccacccactcccccatccattacgatgccagcttccagccttgcccaggtcagagctgtggcagaggagaggcagccaggccctgttcctgctcagctcctgctcaggaaggccaggcctgacagatgtttgggagaggaataaagttgtgttgttgtggggcatgcaggcgtgc

SEQ ID NO: 360278 - DNA, 2094 bp, Homo sapiens
cgactctagaggatcccccattggatacggggatgaaggcagagatgaggcccacaagcgggagtggaacctcttctatcagaagcagatgcagctgcgcaagggcaaagaccccaagatagaagaatttgtacccccagatgagaactgtcccctgaaagaggcttctagcaggaggatccccaggctgactgtgaaggcacgggagcactgcctgcggcttctggaggaggcgctgagcagcaaccgccagtcaacacgtaccgctgatgaagctgacctccgggccaaggccgtggagctggaacatgagacattccggaacgccaaggtggccaacctctacaaggccagcgtgctgaagaaggtggccgatatccacagagcctccaaggatgggcagccctatgacatgggaggcagtgccaagagctgcagtgcccaagctgagcccccggagcccaatgagtatgacattccaccagcctcccatgtgtactcgctcaaacccaagcgggtgggagctggtttccccaaaggctcctgcccgttccagacggccacggaactgatggagacgactcggatcagggagcaagccccccagcccgagcggggaggcgagcacgagcccccgagccggccctgtggcctcctggatgaggatgggagtgagcccctccctgggcccagaggggaggtccctggaggcagcgctcactatggggggccctcccctgagaagaaggcaaaaagttcctctgggggcagttcccttgccaagggccgggctagcaagaaacagcagctcctagccacagcggcccacaaggattctcagagcatcgcccgcttcttctgccgaagggtggaaagcccagctctgctggcatcagccccagaggcagaaggtgcctgcccctcctgtgagggggttcagggacccccgatggccccagagaagtacacaggggaggaagatggagccgggggacattcgcctgcccctccccagactgaggagtgcctcagggagaggccaagcacctgcccgcccagagaccagggcacccctgaagtccagcccacccctgcaaaggacacatggaagggcaagcggcctcgatcccagcaggagaacccagagagccagcctcagaagaggccacgcccctcagccaagccctccgtcgtagctgaggtcaagggcagcgtctcggccagcgaacagggcaccttgaatcccacggctcaagaccccttccagctctccgctcctggcgtctccttgaaggaggctgcaaatgttgtggtcaagtgcctcacccctttctacaaggagggcaagtttgcttccaaggagttgtttaaaggctttgcccgccacctctcacacttgctgactcagaagacctctcctggaaggagcgtgaaagaagaggcccagaacctcatcaggcacttcttccatggccgggcccggtgcgagagcgaagctgactggcatggcctgtgtggcccccagagatgaccaactgctggctgggcagggcccgcgtcctcccccagattctagcatgggtcatcctgggcctcacctgctgatgccagggccatcgtcttttctcagtccttctcctttccaaccatacttggctttggggatgaccccagacaccccctgaatccaggtcagaggtcagcccacctttctttctgcttgcaaagcctatagacccttctcagagcggtcctcatggctgggttttctgggacacatgtcgaggacagaaggtggagggtggtggagctgctgctggaagaaggggaaggaagagtggcccctccccgagttctaagtcaggatgaggcccacctgtccaaggtatcggaacctacccaggggaccctcagatcctccacccactcccccatccattacgatgccagcttccagccttgcccaggtcagagctgtggcagaggagaggcagccaggccctgttcctgctcagctcctgctcaggaaggccaggcctgacagatgtttgggagaggaataaagttgtgttgttgtggggcatgcaggcgtgc

SEQ ID NO: 360279 - DNA, 3762 bp, Homo sapiens
acggatataagattgcgtgggttctgcctaaagctgaattcccagcgctttggcttctctgagttggggttgtgtataggggtcttcgaacagttccggaaccagccagcagcctttaattcttgggcggaccacggccggttctgtgttcttggctaagatgagcagccaccataccacctttccttttgaccctgagcggcgagtccggagtacgctgaagaaggtctttgggtttgactcttttaagacgcctttacaggagagtgcgaccatggctgtagtaaaaggtaacaaggacgtctttgtgtgcatgcccacaggggcaggaaaatccctatgctatcagctccctgctctgttggccaaaggcatcaccattgtagtctctcctctcattgctttgattcaggaccaagtggaccacttgctaaccctaaaggtacgagtaagttccctgaactcgaagctctctgcacaggaaaggaaggagctgcttgctgacctggagcgagaaaagccccagaccaagattctgtacatcaccccagagatggcagcttcatcctccttccagcccaccctgaactccctggtgtcccgccacctgctgtcttacttggtggtggatgaagctcattgtgtttcccaatgggggcatgactttcgtcctgactacttgcgtctgggtgccctgcgctcccgcctgggacatgccccttgtgtggctctgaccgccacagccaccccacaggtccaagaggacgtgtttgctgccctgcacctgaagaaaccagttgccatcttcaagactccctgcttccgggccaacctcttctatgatgtgcaattcaaggaactgatttctgatccctatgggaacctgaaggacttctgccttaaggctcttggacaggaggctgataaagggttatctggctgcggcattgtgtactgcaggactagagaggcttgtgaacagctggccatagagctcagctgcaggggtgtgaacgccaaggcttaccatgcagggctgaaggcctctgaaagaacgctggtgcagaacgactggatggaggagaaggtccctgtaattgttgcaaccattagttttgggatgggagtggataaagccaatgtcaggtttgtcgcccattggaatattgccaagtctatggctgggtactaccaggagtctggccgggctggcagggatgggaagccttcctggtgccgtctctattactccaggaatgaccgggaccaagtcagcttcctgatcaggaaggaagtagcaaaactccaggaaaagagaggaaacaaagcatctgataaagccactatcatggcctttgatgccctggtgaccttctgtgaagaactggggtgccgccatgccgccattgccaagtacttcggggatgcgctgcctgcctgcgccaaaggctgcgaccactgccagaaccccacggccgtgcggaggcggctggaggccttggagcgcagcagcagctggagcaagacctgcatcgggccctcccaggggaacggctttgaccccgagctgtacgagggaggccgcaagggctacggggacttcagcaggtatgacgaaggttctggaggcagcggggatgaaggcagagatgaggcccacaagcgggagtggaacctcttctatcagaagcagatgcagctgcgcaagggcaaagaccccaagatagaagaatttgtacccccagatgagaactgtcccctgaaagaggcttctagcaggaggatccccaggctgactgtgaaggcacgggagcactgcctgcggcttctggaggaggcgctgagcagcaaccgccagtcaacacgtaccgctgatgaagctgacctccgggccaaggccgtggagctggaacatgagacattccggaacgccaaggtggccaacctctacaaggccagcgtgctgaagaaggtggccgatatccacagagcctccaaggatgggcagccctatgacatgggaggcagtgccaagagctgcagtgcccaagctgagcccccggagcccaatgagtatgacattccaccagcctcccatgtgtactcgctcaaacccaagcgggtgggagctggtttccccaaaggctcctgcccgttccagacggccacggaactgatggagacgactcggatcagggagcaagccccccagcccgagcggggaggcgagcacgagcccccgagccggccctgtggcctcctggatgaggatgggagtgagcccctccctgggcccagaggggaggtccctggaggcagcgctcactatggggggccctcccctgagaagaaggcaaaaagttcctctgggggcagttcccttgccaagggccgggctagcaagaaacagcagctcctagccacagcggcccacaaggattctcagagcatcgcccgcttcttctgccgaagggtggaaagcccagctctgctggcatcagccccagaggcagaaggtgcctgcccctcctgtgagggggttcagggacccccgatggccccagagaagtacacaggggaggaagatggagccgggggacattcgcctgcccctccccagactgaggagtgcctcagggagaggccaaggcctcctgggatgagggagccaccaggacccagtgctgtgatgcctgctcttccctctaccagcacctgcccgcccagagaccagggcacccctgaagtccagcccacccctgcaaaggacacatggaagggcaagcggcctcgatcccagcaggagaacccagagagccagcctcagaagaggccacgcccctcagccaagccctccgtcgtagctgaggtcaagggcagcgtctcggccagcgaacagggcaccttgaatcccacggctcaagaccccttccagctctccgctcctggcgtctccttgaaggaggctgcaaatgttgtggtcaagtgcctcacccctttctacaaggagggcaagtttgcttccaaggagttgtttaaaggctttgcccgccacctctcacacttgctgactcagaagacctctcctggaaggagcgtgaaagaagaggcccagaacctcatcaggcacttcttccatggccgggcccggtgcgagagcgaagctgactggcatggcctgtgtggcccccagagatgaccaactgctggctgggcagggcccgcgtcctcccccagattctagcatgggtcatcctgggcctcacctgctgatgccagggccatcgtcttttctcagtccttctcctttccaaccatacttggctttggggatgaccccagacaccccctgaatccaggtcagaggtcagcccacctttctttctgcttgcaaagcctatagacccttctcagagcggtcctcatggctgggttttctgggacacatgtcgaggacagaaggtggagggtggtggagctgctgctggaagaaggggaaggaagagtggcccctccccgagttctaagtcaggatgaggcccacctgtccaaggtatcggaacctacccaggggaccctcagatcctccacccactcccccatccattacgatgccagcttccagccttgcccaggtcagagctgtggcagaggagaggcagccaggccctgttcctgctcagctcctgctcaggaaggccaggcctgacagatgtttgggagaggaataaagttgtgttgttgtggggcatgcaggcgtgc

SEQ ID NO: 360280 - DNA, 3723 bp, Homo sapiens
acggatataagattgcgtgggttctgcctaaagctgaattcccagcgctttggcttctctgagttggggttgtgtataggggtcttcgaacagttccggaaccagccagcagcctttaattcttgggcggaccacggccggttctgtgttcttggctaagatgagcagccaccataccacctttccttttgaccctgagcggcgagtccggagtacgctgaagaaggtctttgggtttgactcttttaagacgcctttacaggagagtgcgaccatggctgtagtaaaaggtaacaaggacgtctttgtgtgcatgcccacaggggcaggaaaatccctatgctatcagctccctgctctgttggccaaaggcatcaccattgtagtctctcctctcattgctttgattcaggaccaagtggaccacttgctaaccctaaaggtacgagtaagttccctgaactcgaagctctctgcacaggaaaggaaggagctgcttgctgacctggagcgagaaaagccccagaccaagattctgtacatcaccccagagatggcagcttcatcctccttccagcccaccctgaactccctggtgtcccgccacctgctgtcttacttggtggtggatgaagctcattgtgtttcccaatgggggcatgactttcgtcctgactacttgcgtctgggtgccctgcgctcccgcctgggacatgccccttgtgtggctctgaccgccacagccaccccacaggtccaagaggacgtgtttgctgccctgcacctgaagaaaccagttgccatcttcaagactccctgcttccgggccaacctcttctatgatgtgcaattcaaggaactgatttctgatccctatgggaacctgaaggacttctgccttaaggctcttggacaggaggctgataaagggttatctggctgcggcattgtgtactgcaggactagagaggcttgtgaacagctggccatagagctcagctgcaggggtgtgaacgccaaggcttaccatgcagggctgaaggcctctgaaagaacgctggtgcagaacgactggatggaggagaaggtccctgtaattgttgcaaccattagttttgggatgggagtggataaagccaatgtcaggtttgtcgcccattggaatattgccaagtctatggctgggtactaccaggagtctggccgggctggcagggatgggaagccttcctggtgccgtctctattactccaggaatgaccgggaccaagtcagcttcctgatcaggaaggaagtagcaaaactccaggaaaagagaggaaacaaagcatctgataaagccactatcatggcctttgatgccctggtgaccttctgtgaagaactggggtgccgccatgccgccattgccaagtacttcggggatgcgctgcctgcctgcgccaaaggctgcgaccactgccagaaccccacggccgtgcggaggcggctggaggccttggagcgcagcagcagctggagcaagacctgcatcgggccctcccaggggaacggctttgaccccgagctgtacgagggaggccgcaagggctacggggacttcagcaggtatgacgaaggttctggaggcagcggggatgaaggcagagatgaggcccacaagcgggagtggaacctcttctatcagaagcagatgcagctgcgcaagggcaaagaccccaagatagaagaatttgtacccccagatgagaactgtcccctgaaagaggcttctagcaggaggatccccaggctgactgtgaaggcacgggagcactgcctgcggcttctggaggaggcgctgagcagcaaccgccagtcaacacgtaccgctgatgaagctgacctccgggccaaggccgtggagctggaacatgagacattccggaacgccaaggtggccaacctctacaaggccagcgtgctgaagaaggtggccgatatccacagagcctccaaggatgggcagccctatgacatgggaggcagtgccaagagctgcagtgcccaagctgagcccccggagcccaatgagtatgacattccaccagcctcccatgtgtactcgctcaaacccaagcgggtgggagctggtttccccaaaggctcctgcccgttccagacggccacggaactgatggagacgactcggatcagggagcaagccccccagcccgagcggggaggcgagcacgagcccccgagccggccctgtggcctcctggatgaggatgggagtgagcccctccctgggcccagaggggaggtccctggaggcagcgctcactatggggggccctcccctgagaagaaggcaaaaagttcctctgggggcagttcccttgccaagggccgggctagcaagaaacagcagctcctagccacagcggcccacaaggattctcagagcatcgcccgcttcttctgccgaagggtggaaagcccagctctgctggcatcagccccagaggcagaaggtgcctgcccctcctgtgagggggttcagggacccccgatggccccagagaagtacacaggggaggaagatggagccgggggacattcgcctgcccctccccagactgaggagtgcctcagggagaggccaagcacctgcccgcccagagaccagggcacccctgaagtccagcccacccctgcaaaggacacatggaagggcaagcggcctcgatcccagcaggagaacccagagagccagcctcagaagaggccacgcccctcagccaagccctccgtcgtagctgaggtcaagggcagcgtctcggccagcgaacagggcaccttgaatcccacggctcaagaccccttccagctctccgctcctggcgtctccttgaaggaggctgcaaatgttgtggtcaagtgcctcacccctttctacaaggagggcaagtttgcttccaaggagttgtttaaaggctttgcccgccacctctcacacttgctgactcagaagacctctcctggaaggagcgtgaaagaagaggcccagaacctcatcaggcacttcttccatggccgggcccggtgcgagagcgaagctgactggcatggcctgtgtggcccccagagatgaccaactgctggctgggcagggcccgcgtcctcccccagattctagcatgggtcatcctgggcctcacctgctgatgccagggccatcgtcttttctcagtccttctcctttccaaccatacttggctttggggatgaccccagacaccccctgaatccaggtcagaggtcagcccacctttctttctgcttgcaaagcctatagacccttctcagagcggtcctcatggctgggttttctgggacacatgtcgaggacagaaggtggagggtggtggagctgctgctggaagaaggggaaggaagagtggcccctccccgagttctaagtcaggatgaggcccacctgtccaaggtatcggaacctacccaggggaccctcagatcctccacccactcccccatccattacgatgccagcttccagccttgcccaggtcagagctgtggcagaggagaggcagccaggccctgttcctgctcagctcctgctcaggaaggccaggcctgacagatgtttgggagaggaataaagttgtgttgttgtggggcatgcaggcgtgcacacagcccttttcaaaaaaaaaa

SEQ ID NO: 360281 - DNA, 2255 bp, Homo sapiens
acggatataagattgcgtgggttctgcctaaagctgaattcccagcgctttggcttctctgagttggggttgtgtataggggtcttcgaacagttccggaaccagccagcagcctttaattcttgggcggaccacggccggttctgtgttcttggctaagatgagcagccaccataccacctttccttttgaccctgagcggcgagtccggagtacgctgaagaaggtctttgggtttgactcttttaagacgcctttacaggagagtgcgaccatggctgtagtaaaaggtaacaaggacgtctttgtgtgcatgcccacaggggcaggaaaatccctatgctatcagctccctgctctgttggccaaaggcatcaccattgtagtctctcctctcattgctttgattcaggaccaagtggaccacttgctaaccctaaaggtacgagtaagttccctgaactcgaagctctctgcacaggaaaggaaggagctgcttgctgacctggagcgagaaaagccccagaccaagattctgtacatcaccccagagatggcagcttcatcctccttccagcccaccctgaactccctggtgtcccgccacctgctgtcttacttggtggtggatgaagctcattgtgtttcccaatgggggcatgactttcgtcctgactacttgcgtctgggtgccctgcgctcccgcctgggacatgccccttgtgtggctctgaccgccacagccaccccacaggtccaagaggacgtgtttgctgccctgcacctgaagaaaccagttgccatcttcaagactccctgcttccgggccaacctcttctatgatgtgcaattcaaggaactgatttctgatccctatgggaacctgaaggacttctgccttaaggctcttggacaggaggctgataaagggttatctggctgcggcattgtgtactgcaggactagagaggcttgtgaacagctggccatagagctcagctgcaggggtgtgaacgccaaggcttaccatgcagggctgaaggcctctgaaagaacgctggtgcagaacgactggatggaggagaaggtccctgtaattgttgcaaccattagttttgggatgggagtggataaagccaatgtcaggtttgtcgcccattggaatattgccaagtctatggctgggtactaccaggagtctggccgggctggcagggatgggaagccttcctggtgccgtctctattactccaggaatgaccgggaccaagtcagcttcctgatcaggaaggaagtagcaaaactccaggaaaagagaggaaacaaagcatctgataaagccactatcatggcctttgatgccctggtgaccttctgtgaagaactggggtgccgccatgccgccattgccaagtacttcggggatgcgctgcctgcctgcgccaaaggctgcgaccactgccagaaccccacggccgtgcggaggcggctggaggccttggagcgcagcagcagctggagcaagacctgcatcgggccctcccaggggaacggctttgaccccgagctgtacgagggaggccgcaagggctacggggacttcagcaggtatgacgaaggttctggaggcagcggggatgaaggcagagatgaggcccacaagcgggagtggaacctcttctatcagaagcagatgcagctgcgcaagggcaaagaccccaagatagaagaatttgtacccccagatgagaactgtcccctgaaagaggcttctagcaggaggatccccaggctgactgtgaaggcacgggagcactgcctgcggcttctggaggaggcgctgagcagcaaccgccagtcaacacgtaccgctgatgaagctgacctccgggccaaggccgtggagctggaacatgagacattccggaacgccaaggtggccaacctctacaaggccagcgtgctgaagaaggtggccgatatccacagagcctccaaggatgggcagccctatgacatgggaggcagtgccaagagctgcagtgcccaagctgagcccccggagcccaatgagtatgacattccaccagcctcccatgtgtactcggtgagctgtggcccagtggcctccagacctgtgaccaggaaaggcttcacttcccctctgccctcaggggtgcacctcttgccaaggcctggctccccaccagggtcctgcctgcctcttccctcccacactcctgagagccccgtcc

SEQ ID NO: 360282 - DNA, 1542 bp, Homo sapiens
acggatataagattgcgtgggttctgcctaaagctgaattcccagcgctttggcttctctgagttggggttgtgtataggggtcttcgaacagttccggaaccagccagcagcctttaattcttgggcggaccacggccggttctgtgttcttggctaagatgagcagccaccataccacctttccttttgaccctgagcggcgagtccggagtacgctgaagaaggtctttgggtttgactcttttaagacgcctttacaggagagtgcgaccatggctgtagtaaaaggtaacaaggacgtctttgtgtgcatgcccacaggggcaggaaaatccctatgctatcagctccctgctctgttggccaaaggcatcaccattgtagtctctcctctcattgctttgattcaggaccaagtggaccacttgctaaccctaaaggtacgagtaagttccctgaactcgaagctctctgcacaggaaaggaaggagctgcttgctgacctggagcgagaaaagccccagaccaagattctgtacatcaccccagagatggcagcttcatcctccttccagcccaccctgaactccctggtgtcccgccacctgctgtcttacttggtggtggatgaagctcattgtgtttcccaatgggggcatgactttcgtcctgactacttgcgtctgggtgccctgcgctcccgcctgggacatgccccttgtgtggctctgaccgccacagccaccccacaggtccaagaggacgtgtttgctgccctgcacctgaagaaaccagttgccatcttcaagactccctgcttccgggccaacctcttctatgatgtgcaattcaaggaactgatttctgatccctatgggaacctgaaggacttctgccttaaggctcttggacaggaggctgataaagggttatctggctgcggcattgtgtactgcaggactagagaggcttgtgaacagctggccatagagctcagctgcaggggtgtgaacgccaaggcttaccatgcagggctgaaggcctctgaaagaacgctggtgcagaacgactggatggaggagaaggtccctgtaattgttgcaaccattagttttgggatgggagtggataaagccaatgtcaggtgagctttggttcttgccctgccctcctggtctgggcctggctcagggtggattgcctagtgctgtgcccaaaggaccaggtgcatgtgctccttcgagggctagaggggaaggaagctccaggagagagtccttagaatacagcctgaatgctgacagctcctgtgcggcctgctcccaggtgactgcacggcatggttctggcaccccccaggatggggcagcatgcagtctgtcaggcttgtcctttaacatagtcctgttcactcacatctcagtaggtggatcctatgaggaggtgggaataaaggaactatagtcatgcacctcatgttgatgtttcggtcaatgacagactgcatagactgagatcctgtaagattgtaatggagttg

SEQ ID NO: 360283 - DNA, 1269 bp, Homo sapiens
  misc_feature (1036)..(1036): n is a, c, g, or t
  misc_feature (1057)..(1057): n is a, c, g, or t
acggatataagattgcgtgggttctgcctaaagctgaattcccagcgctttggcttctctgagttggggttgtgtataggggtcttcgaacagttccggaaccagccagcagcctttaattcttgggcggaccacggccggttctgtgttcttggctaagatgagcagccaccataccacctttccttttgaccctgagcggcgagtccggagtacgctgaagaaggtctttgggtttgactcttttaagacgcctttacaggagagtgcgaccatggctgtagtaaaaggtaacaaggacgtctttgtgtgcatgcccacaggggcaggaaaatccctatgctatcagctccctgctctgttggccaaaggcatcaccattgtagtctctcctctcattgctttgattcaggaccaagtggaccacttgctaaccctaaaggtacgagtaagttccctgaactcgaagctctctgcacaggaaaggaaggagctgcttgctgacctggagcgagaaaagccccagaccaagattctgtacatcaccccagagatggcagcttcatcctccttccagcccaccctgaactccctggtgtcccgccacctgctgtcttacttggtggtggatgaagctcattgtgtttcccaatgggggcatgactttcgtcctgactacttgcgtctgggtgccctgcgctcccgcctgggacatgccccttgtgtggctctgaccgccacagccaccccacaggtccaagaggacgtgtttgctgccctgcacctgaagaaaccagttgccatcttcaagactccctgcttccgggccaacctcttctatgatgtgcaattcaaggaactgatttctgatccctatgggaacctgaaggacttctgccttaaggctcttggacaggaggctgataaagggttatctggctgcggcattgtgtactgcaggactagagaggcttgtgaacagctggccatagagctcagctgcaggggtgtgaacgccaaggcttaccatgcaggntgaaggcctttgaaagaacgntggtgcagatcctccacccactcccccatccattacgatgccagcttccagccttgcccaggtcagagctgtggcagaggagaggcagccaggccctgttcctgctcagctcctgctcaggaaggccaggcctgacagatgtttgggagaggaataaagttgtgttgttgtggggcatgcaggcgtgcacacagcccttttcaaaaaaaaaa

SEQ ID NO: 360284 - DNA, 5471 bp, Homo sapiens
cccgccccctcccctggggaggctcgcgttcccgctgctcgcgcctgccgcccgccggcctcaggaacgcgccctcttcgccggcgcgcgccctcgcagtcaccgccacccaccagctccggcaccaacagcagcgccgctgccaccgcccaccttctgccgccgccaccacagccaccttctcctcctccgctgtcctctcccgtcctcgcctctgtcgactatcaggtgaactttgaaccaggatggctgagccccgccaggagttcgaagtgatggaagatcacgctgggacgtacgggttgggggacaggaaagatcaggggggctacaccatgcaccaagaccaagagggtgacacggacgctggcctgaaagctgaagaagcaggcattggagacacccccagcctggaagacgaagctgctggtcacgtgacccaagctcgcatggtcagtaaaagcaaagacgggactggaagcgatgacaaaaaagccaagggggctgatggtaaaacgaagatcgccacaccgcggggagcagcccctccaggccagaagggccaggccaacgccaccaggattccagcaaaaaccccgcccgctccaaagacaccacccagctctggtgaacctccaaaatcaggggatcgcagcggctacagcagccccggctccccaggcactcccggcagccgctcccgcaccccgtcccttccaaccccacccacccgggagcccaagaaggtggcagtggtccgtactccacccaagtcgccgtcttccgccaagagccgcctgcagacagcccccgtgcccatgccagacctgaagaatgtcaagtccaagatcggctccactgagaacctgaagcaccagccgggaggcgggaaggtgcaaatagtctacaaaccagttgacctgagcaaggtgacctccaagtgtggctcattaggcaacatccatcataaaccaggaggtggccaggtggaagtaaaatctgagaagcttgacttcaaggacagagtccagtcgaagattgggtccctggacaatatcacccacgtccctggcggaggaaataaaaagattgaaacccacaagctgaccttccgcgagaacgccaaagccaagacagaccacggggcggagatcgtgtacaagtcgccagtggtgtctggggacacgtctccacggcatctcagcaatgtctcctccaccggcagcatcgacatggtagactcgccccagctcgccacgctagctgacgaggtgtctgcctccctggccaagcagggtttgtgatcaggcccctggggcggtcaataattgtggagaggagagaatgagagagtgtggaaaaaaaaagaataatgacccggcccccgccctctgcccccagctgctcctcgcagttcggttaattggttaatcacttaacctgcttttgtcactcggctttggctcgggacttcaaaatcagtgatgggagtaagagcaaatttcatctttccaaattgatgggtgggctagtaataaaatatttaaaaaaaaacattcaaaaacatggccacatccaacatttcctcaggcaattccttttgattcttttttcttccccctccatgtagaagagggagaaggagaggctctgaaagctgcttctgggggatttcaagggactgggggtgccaaccacctctggccctgttgtgggggtgtcacagaggcagtggcagcaacaaaggatttgaaacttggtgtgttcgtggagccacaggcagacgatgtcaaccttgtgtgagtgtgacgggggttggggtggggcgggaggccacgggggaggccgaggcaggggctgggcagaggggagaggaagcacaagaagtgggagtgggagaggaagccacgtgctggagagtagacatccccctccttgccgctgggagagccaaggcctatgccacctgcagcgtctgagcggccgcctgtccttggtggccgggggtgggggcctgctgtgggtcagtgtgccaccctctgcagggcagcctgtgggagaagggacagcgggtaaaaagagaaggcaagctggcaggagggtggcacttcgtggatgacctccttagaaaagactgaccttgatgtcttgagagcgctggcctcttcctccctccctgcagggtagggggcctgagttgaggggcttccctctctgctccacagaaaccctgttttattgagttctgaaggttggaactgctgccatgattttggccactttgcagacctgggactttagggctaaccagttctctttgtaaggacttgtgcctcttgggagacgtccacccgtttccaagcctgggccactggcatctctggagtgtgtgggggtctgggaggcaggtcccgagccccctgtccttcccacggccactgcagtcacccctgtctgcgccgctgtgctgttgtctgccgtgagagcccaatcactgcctatacccctcatcacacgtcacaatgtcccgaattcccagcctcaccaccccttctcagtaatgaccctggttggttgcaggaggtacctactccatactgagggtgaaattaagggaaggcaaagtccaggcacaagagtgggaccccagcctctcactctcagttccactcatccaactgggaccctcaccacgaatctcatgatctgattcggttccctgtctcctcctcccgtcacagatgtgagccagggcactgctcagctgtgaccctaggtgtttctgccttgttgacatggagagagccctttcccctgagaaggcctggccccttcctgtgctgagcccacagcagcaggctgggtgtcttggttgtcagtggtggcaccaggatggaagggcaaggcacccagggcaggcccacagtcccgctgtcccccacttgcaccctagcttgtagctgccaacctcccagacagcccagcccgctgctcagctccacatgcatagtatcagccctccacacccgacaaaggggaacacacccccttggaaatggttcttttcccccagtcccagctggaagccatgctgtctgttctgctggagcagctgaacatatacatagatgttgccctgccctccccatctgcaccctgttgagttgtagttggatttgtctgtttatgcttggattcaccagagtgactatgatagtgaaaagaaaaaaaaaaaaaaaaaaggacgcatgtatcttgaaatgcttgtaaagaggtttctaacccaccctcacgaggtgtctctcacccccacactgggactcgtgtggcctgtgtggtgccaccctgctggggcctcccaagttttgaaaggctttcctcagcacctgggacccaacagagaccagcttctagcagctaaggaggccgttcagctgtgacgaaggcctgaagcacaggattaggactgaagcgatgatgtccccttccctacttccccttggggctccctgtgtcagggcacagactaggtcttgtggctggtctggcttgcggcgcgaggatggttctctctggtcatagcccgaagtctcatggcagtcccaaaggaggcttacaactcctgcatcacaagaaaaaggaagccactgccagctggggggatctgcagctcccagaagctccgtgagcctcagccacccctcagactgggttcctctccaagctcgccctctggaggggcagcgcagctcccaccaagggccctgcgaccacagcagggattgggatgaattgcctgtcctggatctgctctagaggcccaagctgcctgcctgaggaaggatgacttgacaagtcaggagacactgttcccaaagccttgaccagagcacctcagcccgctgaccttgcacaaactccatctgctgccatgagaaaagggaagccgcctttgcaaaacattgctgcctaaagaaactcagcagcctcaggcccaattctgccacttctggtttgggtacagttaaaggcaaccctgagggacttggcagtagaaatccagggcctcccctggggctggcagcttcgtgtgcagctagagctttacctgaaaggaagtctctgggcccagaactctccaccaagagcctccctgccgttcgctgagtcccagcaattctcctaagttgaagggatctgagaaggagaaggaaatgtggggtagatttggtggtggttagagatatgcccccctcattactgccaacagtttcggctgcatttcttcacgcacctcggttcctcttcctgaagttcttgtgccctgctcttcagcaccatgggccttcttatacggaaggctctgggatctcccccttgtgggggcaggctcttggggccagcctaagatcatggtttagggtgatcagtgctggcagataaattgaaaaggcacgctggcttgtgatcttaaatgaggacaatccccccagggctgggcactcctcccctcccctcacttctcccacctgcagagccagtgtccttgggtgggctagataggatatactgtatgccggctccttcaagctgctgactcactttatcaatagttccatttaaattgacttcagtggtgagactgtatcctgtttgctattgcttgttgtgctatggggggaggggggaggaatgtgtaagatagttaacatgggcaaagggagatcttggggtgcagcacttaaactgcctcgtaacccttttcatgatttcaaccacatttgctagagggagggagcagccacggagttagaggcccttggggtttctcttttccactgacaggctttcccaggcagctggctagttcattccctccccagccaggtgcaggcgtaggaatatggacatctggttgctttggcctgctgccctctttcaggggtcctaagcccacaatcatgcctccctaagaccttggcatccttccctctaagccgttggcacctctgtgccacctctcacactggctccagacacacagcctgtgcttttggagctgagatcactcgcttcaccctcctcatctttgttctccaagtaaagccacgaggtcggggcgagggcagaggtgatcacctgcgtgtcccatctacagacctgcggcttcataaaacttctgatttctcttcagctttgaaaagggttaccctgggcactggcctagagcctcacctcctaatagacttagccccatgagtttgccatgttgagcaggactatttctggcacttgcaagtcccatgatttcttcggtaattctgagggtggggggagggacatgaaatcatcttagcttagctttctgtctgtgaatgtctatatagtgtattgtgtgttttaacaaatgatttacactgactgttgctgtaaaagtgaatttggaaataaagttattactctgattaaaa

SEQ ID NO: 360285 - DNA, 5564 bp, Homo sapiens
cccgccccctcccctggggaggctcgcgttcccgctgctcgcgcctgccgcccgccggcctcaggaacgcgccctcttcgccggcgcgcgccctcgcagtcaccgccacccaccagctccggcaccaacagcagcgccgctgccaccgcccaccttctgccgccgccaccacagccaccttctcctcctccgctgtcctctcccgtcctcgcctctgtcgactatcaggtgaactttgaaccaggatggctgagccccgccaggagttcgaagtgatggaagatcacgctgggacgtacgggttgggggacaggaaagatcaggggggctacaccatgcaccaagaccaagagggtgacacggacgctggcctgaaagctgaagaagcaggcattggagacacccccagcctggaagacgaagctgctggtcacgtgacccaagctcgcatggtcagtaaaagcaaagacgggactggaagcgatgacaaaaaagccaagggggctgatggtaaaacgaagatcgccacaccgcggggagcagcccctccaggccagaagggccaggccaacgccaccaggattccagcaaaaaccccgcccgctccaaagacaccacccagctctggtgaacctccaaaatcaggggatcgcagcggctacagcagccccggctccccaggcactcccggcagccgctcccgcaccccgtcccttccaaccccacccacccgggagcccaagaaggtggcagtggtccgtactccacccaagtcgccgtcttccgccaagagccgcctgcagacagcccccgtgcccatgccagacctgaagaatgtcaagtccaagatcggctccactgagaacctgaagcaccagccgggaggcgggaaggtgcagataattaataagaagctggatcttagcaacgtccagtccaagtgtggctcaaaggataatatcaaacacgtcccgggaggcggcagtgtgcaaatagtctacaaaccagttgacctgagcaaggtgacctccaagtgtggctcattaggcaacatccatcataaaccaggaggtggccaggtggaagtaaaatctgagaagcttgacttcaaggacagagtccagtcgaagattgggtccctggacaatatcacccacgtccctggcggaggaaataaaaagattgaaacccacaagctgaccttccgcgagaacgccaaagccaagacagaccacggggcggagatcgtgtacaagtcgccagtggtgtctggggacacgtctccacggcatctcagcaatgtctcctccaccggcagcatcgacatggtagactcgccccagctcgccacgctagctgacgaggtgtctgcctccctggccaagcagggtttgtgatcaggcccctggggcggtcaataattgtggagaggagagaatgagagagtgtggaaaaaaaaagaataatgacccggcccccgccctctgcccccagctgctcctcgcagttcggttaattggttaatcacttaacctgcttttgtcactcggctttggctcgggacttcaaaatcagtgatgggagtaagagcaaatttcatctttccaaattgatgggtgggctagtaataaaatatttaaaaaaaaacattcaaaaacatggccacatccaacatttcctcaggcaattccttttgattcttttttcttccccctccatgtagaagagggagaaggagaggctctgaaagctgcttctgggggatttcaagggactgggggtgccaaccacctctggccctgttgtgggggtgtcacagaggcagtggcagcaacaaaggatttgaaacttggtgtgttcgtggagccacaggcagacgatgtcaaccttgtgtgagtgtgacgggggttggggtggggcgggaggccacgggggaggccgaggcaggggctgggcagaggggagaggaagcacaagaagtgggagtgggagaggaagccacgtgctggagagtagacatccccctccttgccgctgggagagccaaggcctatgccacctgcagcgtctgagcggccgcctgtccttggtggccgggggtgggggcctgctgtgggtcagtgtgccaccctctgcagggcagcctgtgggagaagggacagcgggtaaaaagagaaggcaagctggcaggagggtggcacttcgtggatgacctccttagaaaagactgaccttgatgtcttgagagcgctggcctcttcctccctccctgcagggtagggggcctgagttgaggggcttccctctctgctccacagaaaccctgttttattgagttctgaaggttggaactgctgccatgattttggccactttgcagacctgggactttagggctaaccagttctctttgtaaggacttgtgcctcttgggagacgtccacccgtttccaagcctgggccactggcatctctggagtgtgtgggggtctgggaggcaggtcccgagccccctgtccttcccacggccactgcagtcacccctgtctgcgccgctgtgctgttgtctgccgtgagagcccaatcactgcctatacccctcatcacacgtcacaatgtcccgaattcccagcctcaccaccccttctcagtaatgaccctggttggttgcaggaggtacctactccatactgagggtgaaattaagggaaggcaaagtccaggcacaagagtgggaccccagcctctcactctcagttccactcatccaactgggaccctcaccacgaatctcatgatctgattcggttccctgtctcctcctcccgtcacagatgtgagccagggcactgctcagctgtgaccctaggtgtttctgccttgttgacatggagagagccctttcccctgagaaggcctggccccttcctgtgctgagcccacagcagcaggctgggtgtcttggttgtcagtggtggcaccaggatggaagggcaaggcacccagggcaggcccacagtcccgctgtcccccacttgcaccctagcttgtagctgccaacctcccagacagcccagcccgctgctcagctccacatgcatagtatcagccctccacacccgacaaaggggaacacacccccttggaaatggttcttttcccccagtcccagctggaagccatgctgtctgttctgctggagcagctgaacatatacatagatgttgccctgccctccccatctgcaccctgttgagttgtagttggatttgtctgtttatgcttggattcaccagagtgactatgatagtgaaaagaaaaaaaaaaaaaaaaaaggacgcatgtatcttgaaatgcttgtaaagaggtttctaacccaccctcacgaggtgtctctcacccccacactgggactcgtgtggcctgtgtggtgccaccctgctggggcctcccaagttttgaaaggctttcctcagcacctgggacccaacagagaccagcttctagcagctaaggaggccgttcagctgtgacgaaggcctgaagcacaggattaggactgaagcgatgatgtccccttccctacttccccttggggctccctgtgtcagggcacagactaggtcttgtggctggtctggcttgcggcgcgaggatggttctctctggtcatagcccgaagtctcatggcagtcccaaaggaggcttacaactcctgcatcacaagaaaaaggaagccactgccagctggggggatctgcagctcccagaagctccgtgagcctcagccacccctcagactgggttcctctccaagctcgccctctggaggggcagcgcagctcccaccaagggccctgcgaccacagcagggattgggatgaattgcctgtcctggatctgctctagaggcccaagctgcctgcctgaggaaggatgacttgacaagtcaggagacactgttcccaaagccttgaccagagcacctcagcccgctgaccttgcacaaactccatctgctgccatgagaaaagggaagccgcctttgcaaaacattgctgcctaaagaaactcagcagcctcaggcccaattctgccacttctggtttgggtacagttaaaggcaaccctgagggacttggcagtagaaatccagggcctcccctggggctggcagcttcgtgtgcagctagagctttacctgaaaggaagtctctgggcccagaactctccaccaagagcctccctgccgttcgctgagtcccagcaattctcctaagttgaagggatctgagaaggagaaggaaatgtggggtagatttggtggtggttagagatatgcccccctcattactgccaacagtttcggctgcatttcttcacgcacctcggttcctcttcctgaagttcttgtgccctgctcttcagcaccatgggccttcttatacggaaggctctgggatctcccccttgtgggggcaggctcttggggccagcctaagatcatggtttagggtgatcagtgctggcagataaattgaaaaggcacgctggcttgtgatcttaaatgaggacaatccccccagggctgggcactcctcccctcccctcacttctcccacctgcagagccagtgtccttgggtgggctagataggatatactgtatgccggctccttcaagctgctgactcactttatcaatagttccatttaaattgacttcagtggtgagactgtatcctgtttgctattgcttgttgtgctatggggggaggggggaggaatgtgtaagatagttaacatgggcaaagggagatcttggggtgcagcacttaaactgcctcgtaacccttttcatgatttcaaccacatttgctagagggagggagcagccacggagttagaggcccttggggtttctcttttccactgacaggctttcccaggcagctggctagttcattccctccccagccaggtgcaggcgtaggaatatggacatctggttgctttggcctgctgccctctttcaggggtcctaagcccacaatcatgcctccctaagaccttggcatccttccctctaagccgttggcacctctgtgccacctctcacactggctccagacacacagcctgtgcttttggagctgagatcactcgcttcaccctcctcatctttgttctccaagtaaagccacgaggtcggggcgagggcagaggtgatcacctgcgtgtcccatctacagacctgcggcttcataaaacttctgatttctcttcagctttgaaaagggttaccctgggcactggcctagagcctcacctcctaatagacttagccccatgagtttgccatgttgagcaggactatttctggcacttgcaagtcccatgatttcttcggtaattctgagggtggggggagggacatgaaatcatcttagcttagctttctgtctgtgaatgtctatatagtgtattgtgtgttttaacaaatgatttacactgactgttgctgtaaaagtgaatttggaaataaagttattactctgattaaaa

SEQ ID NO: 360286 - DNA, 6689 bp, Homo sapiens
  misc_feature (1486)..(1486): n is a, c, g, or t
cccgccccctcccctggggaggctcgcgttcccgctgctcgcgcctgccgcccgccggcctcaggaacgcgccctcttcgccggcgcgcgccctcgcagtcaccgccacccaccagctccggcaccaacagcagcgccgctgccaccgcccaccttctgccgccgccaccacagccaccttctcctcctccgctgtcctctcccgtcctcgcctctgtcgactatcaggtgaactttgaaccaggatggctgagccccgccaggagttcgaagtgatggaagatcacgctgggacgtacgggttgggggacaggaaagatcaggggggctacaccatgcaccaagaccaagagggtgacacggacgctggcctgaaagaatctcccctgcagacccccactgaggacggatctgaggaaccgggctctgaaacctctgatgctaagagcactccaacagcggaagatgtgacagcacccttagtggatgagggagctcccggcaagcaggctgccgcgcagccccacacggagatcccagaaggaaccacagctgaagaagcaggcattggagacacccccagcctggaagacgaagctgctggtcacgtgacccaagagcctgaaagtggtaaggtggtccaggaaggcttcctccgagagccaggccccccaggtctgagccaccagctcatgtccggcatgcctggggctcccctcctgcctgagggccccagagaggccacacgccaaccttcggggacaggacctgaggacacagagggcggccgccacgcccctgagctgctcaagcaccagcttctaggagacctgcaccaggaggggccgccgctgaagggggcagggggcaaagagaggccggggagcaaggaggaggtggatgaagaccgcgacgtcgatgagtcctccccccaagactcccctccctccaaggcctccccagcccaagatgggcggcctccccagacagccgccagagaagccaccagcatcccaggcttcccagcggagggtgccatccccctccctgtggatttcctctccaaagtttccacagagatcccagcctcagagcccgacgggcccagtgtagggcgggccaaagggcaggatgcccccctggagttcacgtttcacgtggaaatcacacccaacgtgcagaaggagcaggcgcactcggaggagcatttgggaagggctgcatttccaggggcccctggagaggggccagaggcccggggcccctctttgggagaggacacaaaagaggctgaccttccagagccctctgaaaagcagcctgctgctgctccgcgggggaagcccgtcagccgggtccctcaactcaaagctcgcatggtcagtaaaagcaaagacgggactggaagcgatgacaaaaaagccaagacatccacacgttcctctgctaaaaccttgaaaaataggccttgccttagccccaaacnccccactcctggtagctcagaccctctgatccaaccctccagccctgctgtgtgcccagagccaccttcctctcctaaacacgtctcttctgtcacttcccgaactggcagttctggagcaaaggagatgaaactcaagggggctgatggtaaaacgaagatcgccacaccgcggggagcagcccctccaggccagaagggccaggccaacgccaccaggattccagcaaaaaccccgcccgctccaaagacaccacccagctctggtgaacctccaaaatcaggggatcgcagcggctacagcagccccggctccccaggcactcccggcagccgctcccgcaccccgtcccttccaaccccacccacccgggagcccaagaaggtggcagtggtccgtactccacccaagtcgccgtcttccgccaagagccgcctgcagacagcccccgtgcccatgccagacctgaagaatgtcaagtccaagatcggctccactgagaacctgaagcaccagccgggaggcgggaaggtgcagataattaataagaagctggatcttagcaacgtccagtccaagtgtggctcaaaggataatatcaaacacgtcccgggaggcggcagtgtgcaaatagtctacaaaccagttgacctgagcaaggtgacctccaagtgtggctcattaggcaacatccatcataaaccaggaggtggccaggtggaagtaaaatctgagaagcttgacttcaaggacagagtccagtcgaagattgggtccctggacaatatcacccacgtccctggcggaggaaataaaaagattgaaacccacaagctgaccttccgcgagaacgccaaagccaagacagaccacggggcggagatcgtgtacaagtcgccagtggtgtctggggacacgtctccacggcatctcagcaatgtctcctccaccggcagcatcgacatggtagactcgccccagctcgccacgctagctgacgaggtgtctgcctccctggccaagcagggtttgtgatcaggcccctggggcggtcaataattgtggagaggagagaatgagagagtgtggaaaaaaaaagaataatgacccggcccccgccctctgcccccagctgctcctcgcagttcggttaattggttaatcacttaacctgcttttgtcactcggctttggctcgggacttcaaaatcagtgatgggagtaagagcaaatttcatctttccaaattgatgggtgggctagtaataaaatatttaaaaaaaaacattcaaaaacatggccacatccaacatttcctcaggcaattccttttgattcttttttcttccccctccatgtagaagagggagaaggagaggctctgaaagctgcttctgggggatttcaagggactgggggtgccaaccacctctggccctgttgtgggggtgtcacagaggcagtggcagcaacaaaggatttgaaacttggtgtgttcgtggagccacaggcagacgatgtcaaccttgtgtgagtgtgacgggggttggggtggggcgggaggccacgggggaggccgaggcaggggctgggcagaggggagaggaagcacaagaagtgggagtgggagaggaagccacgtgctggagagtagacatccccctccttgccgctgggagagccaaggcctatgccacctgcagcgtctgagcggccgcctgtccttggtggccgggggtgggggcctgctgtgggtcagtgtgccaccctctgcagggcagcctgtgggagaagggacagcgggtaaaaagagaaggcaagctggcaggagggtggcacttcgtggatgacctccttagaaaagactgaccttgatgtcttgagagcgctggcctcttcctccctccctgcagggtagggggcctgagttgaggggcttccctctctgctccacagaaaccctgttttattgagttctgaaggttggaactgctgccatgattttggccactttgcagacctgggactttagggctaaccagttctctttgtaaggacttgtgcctcttgggagacgtccacccgtttccaagcctgggccactggcatctctggagtgtgtgggggtctgggaggcaggtcccgagccccctgtccttcccacggccactgcagtcacccctgtctgcgccgctgtgctgttgtctgccgtgagagcccaatcactgcctatacccctcatcacacgtcacaatgtcccgaattcccagcctcaccaccccttctcagtaatgaccctggttggttgcaggaggtacctactccatactgagggtgaaattaagggaaggcaaagtccaggcacaagagtgggaccccagcctctcactctcagttccactcatccaactgggaccctcaccacgaatctcatgatctgattcggttccctgtctcctcctcccgtcacagatgtgagccagggcactgctcagctgtgaccctaggtgtttctgccttgttgacatggagagagccctttcccctgagaaggcctggccccttcctgtgctgagcccacagcagcaggctgggtgtcttggttgtcagtggtggcaccaggatggaagggcaaggcacccagggcaggcccacagtcccgctgtcccccacttgcaccctagcttgtagctgccaacctcccagacagcccagcccgctgctcagctccacatgcatagtatcagccctccacacccgacaaaggggaacacacccccttggaaatggttcttttcccccagtcccagctggaagccatgctgtctgttctgctggagcagctgaacatatacatagatgttgccctgccctccccatctgcaccctgttgagttgtagttggatttgtctgtttatgcttggattcaccagagtgactatgatagtgaaaagaaaaaaaaaaaaaaaaaaggacgcatgtatcttgaaatgcttgtaaagaggtttctaacccaccctcacgaggtgtctctcacccccacactgggactcgtgtggcctgtgtggtgccaccctgctggggcctcccaagttttgaaaggctttcctcagcacctgggacccaacagagaccagcttctagcagctaaggaggccgttcagctgtgacgaaggcctgaagcacaggattaggactgaagcgatgatgtccccttccctacttccccttggggctccctgtgtcagggcacagactaggtcttgtggctggtctggcttgcggcgcgaggatggttctctctggtcatagcccgaagtctcatggcagtcccaaaggaggcttacaactcctgcatcacaagaaaaaggaagccactgccagctggggggatctgcagctcccagaagctccgtgagcctcagccacccctcagactgggttcctctccaagctcgccctctggaggggcagcgcagctcccaccaagggccctgcgaccacagcagggattgggatgaattgcctgtcctggatctgctctagaggcccaagctgcctgcctgaggaaggatgacttgacaagtcaggagacactgttcccaaagccttgaccagagcacctcagcccgctgaccttgcacaaactccatctgctgccatgagaaaagggaagccgcctttgcaaaacattgctgcctaaagaaactcagcagcctcaggcccaattctgccacttctggtttgggtacagttaaaggcaaccctgagggacttggcagtagaaatccagggcctcccctggggctggcagcttcgtgtgcagctagagctttacctgaaaggaagtctctgggcccagaactctccaccaagagcctccctgccgttcgctgagtcccagcaattctcctaagttgaagggatctgagaaggagaaggaaatgtggggtagatttggtggtggttagagatatgcccccctcattactgccaacagtttcggctgcatttcttcacgcacctcggttcctcttcctgaagttcttgtgccctgctcttcagcaccatgggccttcttatacggaaggctctgggatctcccccttgtgggggcaggctcttggggccagcctaagatcatggtttagggtgatcagtgctggcagataaattgaaaaggcacgctggcttgtgatcttaaatgaggacaatccccccagggctgggcactcctcccctcccctcacttctcccacctgcagagccagtgtccttgggtgggctagataggatatactgtatgccggctccttcaagctgctgactcactttatcaatagttccatttaaattgacttcagtggtgagactgtatcctgtttgctattgcttgttgtgctatggggggaggggggaggaatgtgtaagatagttaacatgggcaaagggagatcttggggtgcagcacttaaactgcctcgtaacccttttcatgatttcaaccacatttgctagagggagggagcagccacggagttagaggcccttggggtttctcttttccactgacaggctttcccaggcagctggctagttcattccctccccagccaggtgcaggcgtaggaatatggacatctggttgctttggcctgctgccctctttcaggggtcctaagcccacaatcatgcctccctaagaccttggcatccttccctctaagccgttggcacctctgtgccacctctcacactggctccagacacacagcctgtgcttttggagctgagatcactcgcttcaccctcctcatctttgttctccaagtaaagccacgaggtcggggcgagggcagaggtgatcacctgcgtgtcccatctacagacctgcggcttcataaaacttctgatttctcttcagctttgaaaagggttaccctgggcactggcctagagcctcacctcctaatagacttagccccatgagtttgccatgttgagcaggactatttctggcacttgcaagtcccatgatttcttcggtaattctgagggtggggggagggacatgaaatcatcttagcttagctttctgtctgtgaatgtctatatagtgtattgtgtgttttaacaaatgatttacactgactgttgctgtaaaagtgaatttggaaataaagttattactctgattaaaa

SEQ ID NO: 360287 - DNA, 5071 bp, Homo sapiens
cccgccccctcccctggggaggctcgcgttcccgctgctcgcgcctgccgcccgccggcctcaggaacgcgccctcttcgccggcgcgcgccctcgcagtcaccgccacccaccagctccggcaccaacagcagcgccgctgccaccgcccaccttctgccgccgccaccacagccaccttctcctcctccgctgtcctctcccgtcctcgcctctgtcgactatcaggtgaactttgaaccaggatggctgagccccgccaggagttcgaagtgatggaagatcacgctgggacgtacgggttgggggacaggaaagatcaggggggctacaccatgcaccaagaccaagagggtgacacggacgctggcctgaaagctgaagaagcaggcattggagacacccccagcctggaagacgaagctgctggtcacgtgacccaagctcgcatggtcagtaaaagcaaagacgggactggaagcgatgacaaaaaagccaagggggctgatggtaaaacgaagatcgccacaccgcggggagcagcccctccaggccagaagggccaggccaacgccaccaggattccagcaaaaaccccgcccgctccaaagacaccacccagctctggtgaacctccaaaatcaggggatcgcagcggctacagcagccccggctccccaggcactcccggcagccgctcccgcaccccgtcccttccaaccccacccacccgggagcccaagaaggtggcagtggtccgtactccacccaagtcgccgtcttccgccaagagccgcctgcagacagcccccgtgcccatgccagacctgaagaatgtcaagtccaagatcggctccactgagaacctgaagcaccagccgggaggcgggaaggtgcaaatagtctacaaaccagttgacctgagcaaggtgacctccaagtgtggctcattaggcaacatccatcataaaccaggaggtggccaggtggaagtaaaatctgagaagcttgacttcaaggacagagtccagtcgaagattgggtccctggacaatatcacccacgtccctggcggaggaaataaaaagattgaaacccacaagctgaccttccgcgagaacgccaaagccaagacagaccacggggcggagatcgtgtacaagtcgccagtggtgtctggggacacgtctccacggcatctcagcaatgtctcctccaccggcagcatcgacatggtagactcgccccagctcgccacgctagctgacgaggtgtctgcctccctggccaagcagggtttgtgatcaggcccctggggcggtcaataattgtggagaggagagaatgagagagtgtggaaaaaaaaagaataatgacccggcccccgccctctgcccccagctgctcctcgcagttcggttaattggttaatcacttaacctgcttttgtcactcggctttggctcgggacttcaaaatcagtgatgggagtaagagcaaatttcatctttccaaattgatgggtgggctagtaataaaatatttaaaaaaaaacattcaaaaacatggccacatccaacatttcctcaggcaattccttttgattcttttttcttccccctccatgtagaagagggagaaggagaggctctgaaagctgcttctgggggatttcaagggactgggggtgccaaccacctctggccctgttgtgggggtgtcacagaggcagtggcagcaacaaaggatttgaaacttggtgtgttcgtggagccacaggcagacgatgtcaaccttgtgtgagtgtgacgggggttggggtggggcgggaggccacgggggaggccgaggcaggggctgggcagaggggagaggaagcacaagaagtgggagtgggagaggaagccacgtgctggagagtagacatccccctccttgccgctgggagagccaaggcctatgccacctgcagcgtctgagcggccgcctgtccttggtggccgggggtgggggcctgctgtgggtcagtgtgccaccctctgcagggcagcctgtgggagaagggacagcgggtaaaaagagaaggcaagctggcaggagggtggcacttcgtggatgacctccttagaaaagactgaccttgatgtcttgagagcgctggcctcttcctccctccctgcagggtagggggcctgagttgaggggcttccctctctgctccacagaaaccctgttttattgagttctgaaggttggaactgctgccatgattttggccactttgcagacctgggactttagggctaaccagttctctttgtaaggacttgtgcctcttgggagacgtccacccgtttccaagcctgggccactggcatctctggagtgtgtgggggtctgggaggcaggtcccgagccccctgtccttcccacggccactgcagtcacccctgtctgcgccgctgtgctgttgtctgccgtgagagcccaatcactgcctatacccctcatcacacgtcacaatgtcccgaattcccagcctcaccaccccttctcagtaatgaccctggttggttgcaggaggtacctactccatactgagggtgaaattaagggaaggcaaagtccaggcacaagagtgggaccccagcctctcactctcagttccactcatccaactgggaccctcaccacgaatctcatgatctgattcggttccctgtctcctcctcccgtcacagatgtgagccagggcactgctcagctgtgaccctaggtgtttctgccttgttgacatggagagagccctttcccctgagaaggcctggccccttcctgtgctgagcccacagcagcaggctgggtgtcttggttgtcagtggtggcaccaggatggaagggcaaggcacccagggcaggcccacagtcccgctgtcccccacttgcaccctagcttgtagctgccaacctcccagacagcccagcccgctgctcagctccacatgcatagtatcagccctccacacccgacaaaggggaacacacccccttggaaatggttcttttcccccagtcccagctggaagccatgctgtctgttctgctggagcagctgaacatatacatagatgttgccctgccctccccatctgcaccctgttgagttgtagttggatttgtctgtttatgcttggattcaccagagtgactatgatagtgaaaagaaaaaaaaaaaaaaaaaaggacgcatgtatcttgaaatgcttgtaaagaggtttctaacccaccctcacgaggtgtctctcacccccacactgggactcgtgtggcctgtgtggtgccaccctgctggggcctcccaagttttgaaaggctttcctcagcacctgggacccaacagagaccagcttctagcagctaaggaggccgttcagctgtgacgaaggcctgaagcacaggattaggactgaagcgatgatgtccccttccctacttccccttggggctccctgtgtcagggcacagactaggtcttgtggctggtctggcttgcggcgcgaggatggttctctctggtcatagcccgaagtctcatggcagtcccaaaggaggcttacaactcctgcatcacaagaaaaaggaagccactgccagctggggggatctgcagctcccagaagctccgtgagcctcagccacccctcagactgggttcctctccaagctcgccctctggaggggcagcgcagctcccaccaagggccctgcgaccacagcagggattgggatgaattgcctgtcctggatctgctctagaggcccaagctgcctgcctgaggaaggatgacttgacaagtcaggagacactgttcccaaagccttgaccagagcacctcagcccgctgaccttgcacaaactccatctgctgccatgagaaaagggaagccgcctttgcaaaacattgctgcctaaagaaactcagcagcctcaggcccaattctgccacttctggtttgggtacagttaaaggcaaccctgagggacttggcagtagaaatccagggcctcccctggggctggcagcttcgtgtgcagctagagctttacctgaaaggaagtctctgggcccagaactctccaccaagagcctccctgccgttcgctgagtcccagcaattctcctaagttgaagggatctgagaaggagaaggaaatgtggggtagatttggtggtggttagagatatgcccccctcattactgccaacagtttcggctgcatttcttcacgcacctcggttcctcttcctgaagttcttgtgccctgctcttcagcaccatgggccttcttatacggaaggctctgggatctcccccttgtgggggcaggctcttggggccagcctaagatcatggtttagggtgatcagtgctggcagataaattgaaaaggcacgctggcttgtgatcttaaatgaggacaatccccccagggctgggcactcctcccctcccctcacttctcccacctgcagagccagtgtccttgggtgggctagataggatatactgtatgccggctccttcaagctgctgactcactttatcaatagttccatttaaattgacttcagtggtgagactgtatcctgtttgctattgcttgttgtgctatggggggaggggggaggaatgtgtaagtaaagccacgaggtcggggcgagggcagaggtgatcacctgcgtgtcccatctacagacctgcggcttcataaaacttctgatttctcttcagctttgaaaagggttaccctgggcactggcctagagcctcacctcctaatagacttagccccatgagtttgccatgttgagcaggactatttctggcacttgcaagtcccatgatttcttcggtaattctgagggtggggggagggacatgaaatcatcttagcttagctttctgtctgtgaatgtctatatagtgtattgtgtgttttaacaaatgatttacactgactgttgctgtaaaagtgaatttggaaataaagttattactctgattaaaa

SEQ ID NO: 360288 - DNA, 5738 bp, Homo sapiens
cccgccccctcccctggggaggctcgcgttcccgctgctcgcgcctgccgcccgccggcctcaggaacgcgccctcttcgccggcgcgcgccctcgcagtcaccgccacccaccagctccggcaccaacagcagcgccgctgccaccgcccaccttctgccgccgccaccacagccaccttctcctcctccgctgtcctctcccgtcctcgcctctgtcgactatcaggtgaactttgaaccaggatggctgagccccgccaggagttcgaagtgatggaagatcacgctgggacgtacgggttgggggacaggaaagatcaggggggctacaccatgcaccaagaccaagagggtgacacggacgctggcctgaaagaatctcccctgcagacccccactgaggacggatctgaggaaccgggctctgaaacctctgatgctaagagcactccaacagcggaagatgtgacagcacccttagtggatgagggagctcccggcaagcaggctgccgcgcagccccacacggagatcccagaaggaaccacagctgaagaagcaggcattggagacacccccagcctggaagacgaagctgctggtcacgtgacccaagctcgcatggtcagtaaaagcaaagacgggactggaagcgatgacaaaaaagccaagggggctgatggtaaaacgaagatcgccacaccgcggggagcagcccctccaggccagaagggccaggccaacgccaccaggattccagcaaaaaccccgcccgctccaaagacaccacccagctctggtgaacctccaaaatcaggggatcgcagcggctacagcagccccggctccccaggcactcccggcagccgctcccgcaccccgtcccttccaaccccacccacccgggagcccaagaaggtggcagtggtccgtactccacccaagtcgccgtcttccgccaagagccgcctgcagacagcccccgtgcccatgccagacctgaagaatgtcaagtccaagatcggctccactgagaacctgaagcaccagccgggaggcgggaaggtgcagataattaataagaagctggatcttagcaacgtccagtccaagtgtggctcaaaggataatatcaaacacgtcccgggaggcggcagtgtgcaaatagtctacaaaccagttgacctgagcaaggtgacctccaagtgtggctcattaggcaacatccatcataaaccaggaggtggccaggtggaagtaaaatctgagaagcttgacttcaaggacagagtccagtcgaagattgggtccctggacaatatcacccacgtccctggcggaggaaataaaaagattgaaacccacaagctgaccttccgcgagaacgccaaagccaagacagaccacggggcggagatcgtgtacaagtcgccagtggtgtctggggacacgtctccacggcatctcagcaatgtctcctccaccggcagcatcgacatggtagactcgccccagctcgccacgctagctgacgaggtgtctgcctccctggccaagcagggtttgtgatcaggcccctggggcggtcaataattgtggagaggagagaatgagagagtgtggaaaaaaaaagaataatgacccggcccccgccctctgcccccagctgctcctcgcagttcggttaattggttaatcacttaacctgcttttgtcactcggctttggctcgggacttcaaaatcagtgatgggagtaagagcaaatttcatctttccaaattgatgggtgggctagtaataaaatatttaaaaaaaaacattcaaaaacatggccacatccaacatttcctcaggcaattccttttgattcttttttcttccccctccatgtagaagagggagaaggagaggctctgaaagctgcttctgggggatttcaagggactgggggtgccaaccacctctggccctgttgtgggggtgtcacagaggcagtggcagcaacaaaggatttgaaacttggtgtgttcgtggagccacaggcagacgatgtcaaccttgtgtgagtgtgacgggggttggggtggggcgggaggccacgggggaggccgaggcaggggctgggcagaggggagaggaagcacaagaagtgggagtgggagaggaagccacgtgctggagagtagacatccccctccttgccgctgggagagccaaggcctatgccacctgcagcgtctgagcggccgcctgtccttggtggccgggggtgggggcctgctgtgggtcagtgtgccaccctctgcagggcagcctgtgggagaagggacagcgggtaaaaagagaaggcaagctggcaggagggtggcacttcgtggatgacctccttagaaaagactgaccttgatgtcttgagagcgctggcctcttcctccctccctgcagggtagggggcctgagttgaggggcttccctctctgctccacagaaaccctgttttattgagttctgaaggttggaactgctgccatgattttggccactttgcagacctgggactttagggctaaccagttctctttgtaaggacttgtgcctcttgggagacgtccacccgtttccaagcctgggccactggcatctctggagtgtgtgggggtctgggaggcaggtcccgagccccctgtccttcccacggccactgcagtcacccctgtctgcgccgctgtgctgttgtctgccgtgagagcccaatcactgcctatacccctcatcacacgtcacaatgtcccgaattcccagcctcaccaccccttctcagtaatgaccctggttggttgcaggaggtacctactccatactgagggtgaaattaagggaaggcaaagtccaggcacaagagtgggaccccagcctctcactctcagttccactcatccaactgggaccctcaccacgaatctcatgatctgattcggttccctgtctcctcctcccgtcacagatgtgagccagggcactgctcagctgtgaccctaggtgtttctgccttgttgacatggagagagccctttcccctgagaaggcctggccccttcctgtgctgagcccacagcagcaggctgggtgtcttggttgtcagtggtggcaccaggatggaagggcaaggcacccagggcaggcccacagtcccgctgtcccccacttgcaccctagcttgtagctgccaacctcccagacagcccagcccgctgctcagctccacatgcatagtatcagccctccacacccgacaaaggggaacacacccccttggaaatggttcttttcccccagtcccagctggaagccatgctgtctgttctgctggagcagctgaacatatacatagatgttgccctgccctccccatctgcaccctgttgagttgtagttggatttgtctgtttatgcttggattcaccagagtgactatgatagtgaaaagaaaaaaaaaaaaaaaaaaggacgcatgtatcttgaaatgcttgtaaagaggtttctaacccaccctcacgaggtgtctctcacccccacactgggactcgtgtggcctgtgtggtgccaccctgctggggcctcccaagttttgaaaggctttcctcagcacctgggacccaacagagaccagcttctagcagctaaggaggccgttcagctgtgacgaaggcctgaagcacaggattaggactgaagcgatgatgtccccttccctacttccccttggggctccctgtgtcagggcacagactaggtcttgtggctggtctggcttgcggcgcgaggatggttctctctggtcatagcccgaagtctcatggcagtcccaaaggaggcttacaactcctgcatcacaagaaaaaggaagccactgccagctggggggatctgcagctcccagaagctccgtgagcctcagccacccctcagactgggttcctctccaagctcgccctctggaggggcagcgcagctcccaccaagggccctgcgaccacagcagggattgggatgaattgcctgtcctggatctgctctagaggcccaagctgcctgcctgaggaaggatgacttgacaagtcaggagacactgttcccaaagccttgaccagagcacctcagcccgctgaccttgcacaaactccatctgctgccatgagaaaagggaagccgcctttgcaaaacattgctgcctaaagaaactcagcagcctcaggcccaattctgccacttctggtttgggtacagttaaaggcaaccctgagggacttggcagtagaaatccagggcctcccctggggctggcagcttcgtgtgcagctagagctttacctgaaaggaagtctctgggcccagaactctccaccaagagcctccctgccgttcgctgagtcccagcaattctcctaagttgaagggatctgagaaggagaaggaaatgtggggtagatttggtggtggttagagatatgcccccctcattactgccaacagtttcggctgcatttcttcacgcacctcggttcctcttcctgaagttcttgtgccctgctcttcagcaccatgggccttcttatacggaaggctctgggatctcccccttgtgggggcaggctcttggggccagcctaagatcatggtttagggtgatcagtgctggcagataaattgaaaaggcacgctggcttgtgatcttaaatgaggacaatccccccagggctgggcactcctcccctcccctcacttctcccacctgcagagccagtgtccttgggtgggctagataggatatactgtatgccggctccttcaagctgctgactcactttatcaatagttccatttaaattgacttcagtggtgagactgtatcctgtttgctattgcttgttgtgctatggggggaggggggaggaatgtgtaagatagttaacatgggcaaagggagatcttggggtgcagcacttaaactgcctcgtaacccttttcatgatttcaaccacatttgctagagggagggagcagccacggagttagaggcccttggggtttctcttttccactgacaggctttcccaggcagctggctagttcattccctccccagccaggtgcaggcgtaggaatatggacatctggttgctttggcctgctgccctctttcaggggtcctaagcccacaatcatgcctccctaagaccttggcatccttccctctaagccgttggcacctctgtgccacctctcacactggctccagacacacagcctgtgcttttggagctgagatcactcgcttcaccctcctcatctttgttctccaagtaaagccacgaggtcggggcgagggcagaggtgatcacctgcgtgtcccatctacagacctgcggcttcataaaacttctgatttctcttcagctttgaaaagggttaccctgggcactggcctagagcctcacctcctaatagacttagccccatgagtttgccatgttgagcaggactatttctggcacttgcaagtcccatgatttcttcggtaattctgagggtggggggagggacatgaaatcatcttagcttagctttctgtctgtgaatgtctatatagtgtattgtgtgttttaacaaatgatttacactgactgttgctgtaaaagtgaatttggaaataaagttattactctgattaaaa

SEQ ID NO: 360289 - DNA, 5420 bp, Homo sapiens
  misc_feature (25)..(25): n is a, c, g, or t
gctaggtagaggctgggtgtgaatnggcgaggcacttctcctcctccgctgtcctctcccgtcctcgcctctgtcgactatcaggtgaactttgaaccaggatggctgagccccgccaggagttcgaagtgatggaagatcacgctgggacgtacgggttgggggacaggaaagatcaggggggctacaccatgcaccaagaccaagagggtgacacggacgctggcctgaaagctgaagaagcaggcattggagacacccccagcctggaagacgaagctgctggtcacgtgacccaagctcgcatggtcagtaaaagcaaagacgggactggaagcgatgacaaaaaagccaagggggctgatggtaaaacgaagatcgccacaccgcggggagcagcccctccaggccagaagggccaggccaacgccaccaggattccagcaaaaaccccgcccgctccaaagacaccacccagctctggtgaacctccaaaatcaggggatcgcagcggctacagcagccccggctccccaggcactcccggcagccgctcccgcaccccgtcccttccaaccccacccacccgggagcccaagaaggtggcagtggtccgtactccacccaagtcgccgtcttccgccaagagccgcctgcagacagcccccgtgcccatgccagacctgaagaatgtcaagtccaagatcggctccactgagaacctgaagcaccagccgggaggcgggaaggtgcagataattaataagaagctggatcttagcaacgtccagtccaagtgtggctcaaaggataatatcaaacacgtcccgggaggcggcagtgtgcaaatagtctacaaaccagttgacctgagcaaggtgacctccaagtgtggctcattaggcaacatccatcataaaccaggaggtggccaggtggaagtaaaatctgagaagcttgacttcaaggacagagtccagtcgaagattgggtccctggacaatatcacccacgtccctggcggaggaaataaaaagattgaaacccacaagctgaccttccgcgagaacgccaaagccaagacagaccacggggcggagatcgtgtacaagtcgccagtggtgtctggggacacgtctccacggcatctcagcaatgtctcctccaccggcagcatcgacatggtagactcgccccagctcgccacgctagctgacgaggtgtctgcctccctggccaagcagggtttgtgatcaggcccctggggcggtcaataattgtggagaggagagaatgagagagtgtggaaaaaaaaagaataatgacccggcccccgccctctgcccccagctgctcctcgcagttcggttaattggttaatcacttaacctgcttttgtcactcggctttggctcgggacttcaaaatcagtgatgggagtaagagcaaatttcatctttccaaattgatgggtgggctagtaataaaatatttaaaaaaaaacattcaaaaacatggccacatccaacatttcctcaggcaattccttttgattcttttttcttccccctccatgtagaagagggagaaggagaggctctgaaagctgcttctgggggatttcaagggactgggggtgccaaccacctctggccctgttgtgggggtgtcacagaggcagtggcagcaacaaaggatttgaaacttggtgtgttcgtggagccacaggcagacgatgtcaaccttgtgtgagtgtgacgggggttggggtggggcgggaggccacgggggaggccgaggcaggggctgggcagaggggagaggaagcacaagaagtgggagtgggagaggaagccacgtgctggagagtagacatccccctccttgccgctgggagagccaaggcctatgccacctgcagcgtctgagcggccgcctgtccttggtggccgggggtgggggcctgctgtgggtcagtgtgccaccctctgcagggcagcctgtgggagaagggacagcgggtaaaaagagaaggcaagctggcaggagggtggcacttcgtggatgacctccttagaaaagactgaccttgatgtcttgagagcgctggcctcttcctccctccctgcagggtagggggcctgagttgaggggcttccctctctgctccacagaaaccctgttttattgagttctgaaggttggaactgctgccatgattttggccactttgcagacctgggactttagggctaaccagttctctttgtaaggacttgtgcctcttgggagacgtccacccgtttccaagcctgggccactggcatctctggagtgtgtgggggtctgggaggcaggtcccgagccccctgtccttcccacggccactgcagtcacccctgtctgcgccgctgtgctgttgtctgccgtgagagcccaatcactgcctatacccctcatcacacgtcacaatgtcccgaattcccagcctcaccaccccttctcagtaatgaccctggttggttgcaggaggtacctactccatactgagggtgaaattaagggaaggcaaagtccaggcacaagagtgggaccccagcctctcactctcagttccactcatccaactgggaccctcaccacgaatctcatgatctgattcggttccctgtctcctcctcccgtcacagatgtgagccagggcactgctcagctgtgaccctaggtgtttctgccttgttgacatggagagagccctttcccctgagaaggcctggccccttcctgtgctgagcccacagcagcaggctgggtgtcttggttgtcagtggtggcaccaggatggaagggcaaggcacccagggcaggcccacagtcccgctgtcccccacttgcaccctagcttgtagctgccaacctcccagacagcccagcccgctgctcagctccacatgcatagtatcagccctccacacccgacaaaggggaacacacccccttggaaatggttcttttcccccagtcccagctggaagccatgctgtctgttctgctggagcagctgaacatatacatagatgttgccctgccctccccatctgcaccctgttgagttgtagttggatttgtctgtttatgcttggattcaccagagtgactatgatagtgaaaagaaaaaaaaaaaaaaaaaaggacgcatgtatcttgaaatgcttgtaaagaggtttctaacccaccctcacgaggtgtctctcacccccacactgggactcgtgtggcctgtgtggtgccaccctgctggggcctcccaagttttgaaaggctttcctcagcacctgggacccaacagagaccagcttctagcagctaaggaggccgttcagctgtgacgaaggcctgaagcacaggattaggactgaagcgatgatgtccccttccctacttccccttggggctccctgtgtcagggcacagactaggtcttgtggctggtctggcttgcggcgcgaggatggttctctctggtcatagcccgaagtctcatggcagtcccaaaggaggcttacaactcctgcatcacaagaaaaaggaagccactgccagctggggggatctgcagctcccagaagctccgtgagcctcagccacccctcagactgggttcctctccaagctcgccctctggaggggcagcgcagctcccaccaagggccctgcgaccacagcagggattgggatgaattgcctgtcctggatctgctctagaggcccaagctgcctgcctgaggaaggatgacttgacaagtcaggagacactgttcccaaagccttgaccagagcacctcagcccgctgaccttgcacaaactccatctgctgccatgagaaaagggaagccgcctttgcaaaacattgctgcctaaagaaactcagcagcctcaggcccaattctgccacttctggtttgggtacagttaaaggcaaccctgagggacttggcagtagaaatccagggcctcccctggggctggcagcttcgtgtgcagctagagctttacctgaaaggaagtctctgggcccagaactctccaccaagagcctccctgccgttcgctgagtcccagcaattctcctaagttgaagggatctgagaaggagaaggaaatgtggggtagatttggtggtggttagagatatgcccccctcattactgccaacagtttcggctgcatttcttcacgcacctcggttcctcttcctgaagttcttgtgccctgctcttcagcaccatgggccttcttatacggaaggctctgggatctcccccttgtgggggcaggctcttggggccagcctaagatcatggtttagggtgatcagtgctggcagataaattgaaaaggcacgctggcttgtgatcttaaatgaggacaatccccccagggctgggcactcctcccctcccctcacttctcccacctgcagagccagtgtccttgggtgggctagataggatatactgtatgccggctccttcaagctgctgactcactttatcaatagttccatttaaattgacttcagtggtgagactgtatcctgtttgctattgcttgttgtgctatggggggaggggggaggaatgtgtaagatagttaacatgggcaaagggagatcttggggtgcagcacttaaactgcctcgtaacccttttcatgatttcaaccacatttgctagagggagggagcagccacggagttagaggcccttggggtttctcttttccactgacaggctttcccaggcagctggctagttcattccctccccagccaggtgcaggcgtaggaatatggacatctggttgctttggcctgctgccctctttcaggggtcctaagcccacaatcatgcctccctaagaccttggcatccttccctctaagccgttggcacctctgtgccacctctcacactggctccagacacacagcctgtgcttttggagctgagatcactcgcttcaccctcctcatctttgttctccaagtaaagccacgaggtcggggcgagggcagaggtgatcacctgcgtgtcccatctacagacctgcggcttcataaaacttctgatttctcttcagctttgaaaagggttaccctgggcactggcctagagcctcacctcctaatagacttagccccatgagtttgccatgttgagcaggactatttctggcacttgcaagtcccatgatttcttcggtaattctgagggtggggggagggacatgaaatcatcttagcttagctttctgtctgtgaatgtctatatagtgtattgtgtgttttaacaaatgatttacactgactgttgctgtaaaagtgaatttggaaataaagttattactctgattaaaa

SEQ ID NO: 360290 - DNA, 5651 bp, Homo sapiens
cccgccccctcccctggggaggctcgcgttcccgctgctcgcgcctgccgcccgccggcctcaggaacgcgccctcttcgccggcgcgcgccctcgcagtcaccgccacccaccagctccggcaccaacagcagcgccgctgccaccgcccaccttctgccgccgccaccacagccaccttctcctcctccgctgtcctctcccgtcctcgcctctgtcgactatcaggtgaactttgaaccaggatggctgagccccgccaggagttcgaagtgatggaagatcacgctgggacgtacgggttgggggacaggaaagatcaggggggctacaccatgcaccaagaccaagagggtgacacggacgctggcctgaaagaatctcccctgcagacccccactgaggacggatctgaggaaccgggctctgaaacctctgatgctaagagcactccaacagcggaagctgaagaagcaggcattggagacacccccagcctggaagacgaagctgctggtcacgtgacccaagctcgcatggtcagtaaaagcaaagacgggactggaagcgatgacaaaaaagccaagggggctgatggtaaaacgaagatcgccacaccgcggggagcagcccctccaggccagaagggccaggccaacgccaccaggattccagcaaaaaccccgcccgctccaaagacaccacccagctctggtgaacctccaaaatcaggggatcgcagcggctacagcagccccggctccccaggcactcccggcagccgctcccgcaccccgtcccttccaaccccacccacccgggagcccaagaaggtggcagtggtccgtactccacccaagtcgccgtcttccgccaagagccgcctgcagacagcccccgtgcccatgccagacctgaagaatgtcaagtccaagatcggctccactgagaacctgaagcaccagccgggaggcgggaaggtgcagataattaataagaagctggatcttagcaacgtccagtccaagtgtggctcaaaggataatatcaaacacgtcccgggaggcggcagtgtgcaaatagtctacaaaccagttgacctgagcaaggtgacctccaagtgtggctcattaggcaacatccatcataaaccaggaggtggccaggtggaagtaaaatctgagaagcttgacttcaaggacagagtccagtcgaagattgggtccctggacaatatcacccacgtccctggcggaggaaataaaaagattgaaacccacaagctgaccttccgcgagaacgccaaagccaagacagaccacggggcggagatcgtgtacaagtcgccagtggtgtctggggacacgtctccacggcatctcagcaatgtctcctccaccggcagcatcgacatggtagactcgccccagctcgccacgctagctgacgaggtgtctgcctccctggccaagcagggtttgtgatcaggcccctggggcggtcaataattgtggagaggagagaatgagagagtgtggaaaaaaaaagaataatgacccggcccccgccctctgcccccagctgctcctcgcagttcggttaattggttaatcacttaacctgcttttgtcactcggctttggctcgggacttcaaaatcagtgatgggagtaagagcaaatttcatctttccaaattgatgggtgggctagtaataaaatatttaaaaaaaaacattcaaaaacatggccacatccaacatttcctcaggcaattccttttgattcttttttcttccccctccatgtagaagagggagaaggagaggctctgaaagctgcttctgggggatttcaagggactgggggtgccaaccacctctggccctgttgtgggggtgtcacagaggcagtggcagcaacaaaggatttgaaacttggtgtgttcgtggagccacaggcagacgatgtcaaccttgtgtgagtgtgacgggggttggggtggggcgggaggccacgggggaggccgaggcaggggctgggcagaggggagaggaagcacaagaagtgggagtgggagaggaagccacgtgctggagagtagacatccccctccttgccgctgggagagccaaggcctatgccacctgcagcgtctgagcggccgcctgtccttggtggccgggggtgggggcctgctgtgggtcagtgtgccaccctctgcagggcagcctgtgggagaagggacagcgggtaaaaagagaaggcaagctggcaggagggtggcacttcgtggatgacctccttagaaaagactgaccttgatgtcttgagagcgctggcctcttcctccctccctgcagggtagggggcctgagttgaggggcttccctctctgctccacagaaaccctgttttattgagttctgaaggttggaactgctgccatgattttggccactttgcagacctgggactttagggctaaccagttctctttgtaaggacttgtgcctcttgggagacgtccacccgtttccaagcctgggccactggcatctctggagtgtgtgggggtctgggaggcaggtcccgagccccctgtccttcccacggccactgcagtcacccctgtctgcgccgctgtgctgttgtctgccgtgagagcccaatcactgcctatacccctcatcacacgtcacaatgtcccgaattcccagcctcaccaccccttctcagtaatgaccctggttggttgcaggaggtacctactccatactgagggtgaaattaagggaaggcaaagtccaggcacaagagtgggaccccagcctctcactctcagttccactcatccaactgggaccctcaccacgaatctcatgatctgattcggttccctgtctcctcctcccgtcacagatgtgagccagggcactgctcagctgtgaccctaggtgtttctgccttgttgacatggagagagccctttcccctgagaaggcctggccccttcctgtgctgagcccacagcagcaggctgggtgtcttggttgtcagtggtggcaccaggatggaagggcaaggcacccagggcaggcccacagtcccgctgtcccccacttgcaccctagcttgtagctgccaacctcccagacagcccagcccgctgctcagctccacatgcatagtatcagccctccacacccgacaaaggggaacacacccccttggaaatggttcttttcccccagtcccagctggaagccatgctgtctgttctgctggagcagctgaacatatacatagatgttgccctgccctccccatctgcaccctgttgagttgtagttggatttgtctgtttatgcttggattcaccagagtgactatgatagtgaaaagaaaaaaaaaaaaaaaaaaggacgcatgtatcttgaaatgcttgtaaagaggtttctaacccaccctcacgaggtgtctctcacccccacactgggactcgtgtggcctgtgtggtgccaccctgctggggcctcccaagttttgaaaggctttcctcagcacctgggacccaacagagaccagcttctagcagctaaggaggccgttcagctgtgacgaaggcctgaagcacaggattaggactgaagcgatgatgtccccttccctacttccccttggggctccctgtgtcagggcacagactaggtcttgtggctggtctggcttgcggcgcgaggatggttctctctggtcatagcccgaagtctcatggcagtcccaaaggaggcttacaactcctgcatcacaagaaaaaggaagccactgccagctggggggatctgcagctcccagaagctccgtgagcctcagccacccctcagactgggttcctctccaagctcgccctctggaggggcagcgcagctcccaccaagggccctgcgaccacagcagggattgggatgaattgcctgtcctggatctgctctagaggcccaagctgcctgcctgaggaaggatgacttgacaagtcaggagacactgttcccaaagccttgaccagagcacctcagcccgctgaccttgcacaaactccatctgctgccatgagaaaagggaagccgcctttgcaaaacattgctgcctaaagaaactcagcagcctcaggcccaattctgccacttctggtttgggtacagttaaaggcaaccctgagggacttggcagtagaaatccagggcctcccctggggctggcagcttcgtgtgcagctagagctttacctgaaaggaagtctctgggcccagaactctccaccaagagcctccctgccgttcgctgagtcccagcaattctcctaagttgaagggatctgagaaggagaaggaaatgtggggtagatttggtggtggttagagatatgcccccctcattactgccaacagtttcggctgcatttcttcacgcacctcggttcctcttcctgaagttcttgtgccctgctcttcagcaccatgggccttcttatacggaaggctctgggatctcccccttgtgggggcaggctcttggggccagcctaagatcatggtttagggtgatcagtgctggcagataaattgaaaaggcacgctggcttgtgatcttaaatgaggacaatccccccagggctgggcactcctcccctcccctcacttctcccacctgcagagccagtgtccttgggtgggctagataggatatactgtatgccggctccttcaagctgctgactcactttatcaatagttccatttaaattgacttcagtggtgagactgtatcctgtttgctattgcttgttgtgctatggggggaggggggaggaatgtgtaagatagttaacatgggcaaagggagatcttggggtgcagcacttaaactgcctcgtaacccttttcatgatttcaaccacatttgctagagggagggagcagccacggagttagaggcccttggggtttctcttttccactgacaggctttcccaggcagctggctagttcattccctccccagccaggtgcaggcgtaggaatatggacatctggttgctttggcctgctgccctctttcaggggtcctaagcccacaatcatgcctccctaagaccttggcatccttccctctaagccgttggcacctctgtgccacctctcacactggctccagacacacagcctgtgcttttggagctgagatcactcgcttcaccctcctcatctttgttctccaagtaaagccacgaggtcggggcgagggcagaggtgatcacctgcgtgtcccatctacagacctgcggcttcataaaacttctgatttctcttcagctttgaaaagggttaccctgggcactggcctagagcctcacctcctaatagacttagccccatgagtttgccatgttgagcaggactatttctggcacttgcaagtcccatgatttcttcggtaattctgagggtggggggagggacatgaaatcatcttagcttagctttctgtctgtgaatgtctatatagtgtattgtgtgttttaacaaatgatttacactgactgttgctgtaaaagtgaatttggaaataaagttattactctgattaaaa

SEQ ID NO: 360291 - DNA, 5393 bp, Homo sapiens
aagcagctggtacggtctgggaagttaggatccgtcctcgcctctgtcgactatcaggtgaactttgaaccaggatggctgagccccgccaggagttcgaagtgatggaagatcacgctgggacgtacgggttgggggacaggaaagatcaggggggctacaccatgcaccaagaccaagagggtgacacggacgctggcctgaaagctgaagaagcaggcattggagacacccccagcctggaagacgaagctgctggtcacgtgacccaagctcgcatggtcagtaaaagcaaagacgggactggaagcgatgacaaaaaagccaagggggctgatggtaaaacgaagatcgccacaccgcggggagcagcccctccaggccagaagggccaggccaacgccaccaggattccagcaaaaaccccgcccgctccaaagacaccacccagctctggtgaacctccaaaatcaggggatcgcagcggctacagcagccccggctccccaggcactcccggcagccgctcccgcaccccgtcccttccaaccccacccacccgggagcccaagaaggtggcagtggtccgtactccacccaagtcgccgtcttccgccaagagccgcctgcagacagcccccgtgcccatgccagacctgaagaatgtcaagtccaagatcggctccactgagaacctgaagcaccagccgggaggcgggaaggtgcagataattaataagaagctggatcttagcaacgtccagtccaagtgtggctcaaaggataatatcaaacacgtcccgggaggcggcagtgtgcaaatagtctacaaaccagttgacctgagcaaggtgacctccaagtgtggctcattaggcaacatccatcataaaccaggaggtggccaggtggaagtaaaatctgagaagcttgacttcaaggacagagtccagtcgaagattgggtccctggacaatatcacccacgtccctggcggaggaaataaaaagattgaaacccacaagctgaccttccgcgagaacgccaaagccaagacagaccacggggcggagatcgtgtacaagtcgccagtggtgtctggggacacgtctccacggcatctcagcaatgtctcctccaccggcagcatcgacatggtagactcgccccagctcgccacgctagctgacgaggtgtctgcctccctggccaagcagggtttgtgatcaggcccctggggcggtcaataattgtggagaggagagaatgagagagtgtggaaaaaaaaagaataatgacccggcccccgccctctgcccccagctgctcctcgcagttcggttaattggttaatcacttaacctgcttttgtcactcggctttggctcgggacttcaaaatcagtgatgggagtaagagcaaatttcatctttccaaattgatgggtgggctagtaataaaatatttaaaaaaaaacattcaaaaacatggccacatccaacatttcctcaggcaattccttttgattcttttttcttccccctccatgtagaagagggagaaggagaggctctgaaagctgcttctgggggatttcaagggactgggggtgccaaccacctctggccctgttgtgggggtgtcacagaggcagtggcagcaacaaaggatttgaaacttggtgtgttcgtggagccacaggcagacgatgtcaaccttgtgtgagtgtgacgggggttggggtggggcgggaggccacgggggaggccgaggcaggggctgggcagaggggagaggaagcacaagaagtgggagtgggagaggaagccacgtgctggagagtagacatccccctccttgccgctgggagagccaaggcctatgccacctgcagcgtctgagcggccgcctgtccttggtggccgggggtgggggcctgctgtgggtcagtgtgccaccctctgcagggcagcctgtgggagaagggacagcgggtaaaaagagaaggcaagctggcaggagggtggcacttcgtggatgacctccttagaaaagactgaccttgatgtcttgagagcgctggcctcttcctccctccctgcagggtagggggcctgagttgaggggcttccctctctgctccacagaaaccctgttttattgagttctgaaggttggaactgctgccatgattttggccactttgcagacctgggactttagggctaaccagttctctttgtaaggacttgtgcctcttgggagacgtccacccgtttccaagcctgggccactggcatctctggagtgtgtgggggtctgggaggcaggtcccgagccccctgtccttcccacggccactgcagtcacccctgtctgcgccgctgtgctgttgtctgccgtgagagcccaatcactgcctatacccctcatcacacgtcacaatgtcccgaattcccagcctcaccaccccttctcagtaatgaccctggttggttgcaggaggtacctactccatactgagggtgaaattaagggaaggcaaagtccaggcacaagagtgggaccccagcctctcactctcagttccactcatccaactgggaccctcaccacgaatctcatgatctgattcggttccctgtctcctcctcccgtcacagatgtgagccagggcactgctcagctgtgaccctaggtgtttctgccttgttgacatggagagagccctttcccctgagaaggcctggccccttcctgtgctgagcccacagcagcaggctgggtgtcttggttgtcagtggtggcaccaggatggaagggcaaggcacccagggcaggcccacagtcccgctgtcccccacttgcaccctagcttgtagctgccaacctcccagacagcccagcccgctgctcagctccacatgcatagtatcagccctccacacccgacaaaggggaacacacccccttggaaatggttcttttcccccagtcccagctggaagccatgctgtctgttctgctggagcagctgaacatatacatagatgttgccctgccctccccatctgcaccctgttgagttgtagttggatttgtctgtttatgcttggattcaccagagtgactatgatagtgaaaagaaaaaaaaaaaaaaaaaaggacgcatgtatcttgaaatgcttgtaaagaggtttctaacccaccctcacgaggtgtctctcacccccacactgggactcgtgtggcctgtgtggtgccaccctgctggggcctcccaagttttgaaaggctttcctcagcacctgggacccaacagagaccagcttctagcagctaaggaggccgttcagctgtgacgaaggcctgaagcacaggattaggactgaagcgatgatgtccccttccctacttccccttggggctccctgtgtcagggcacagactaggtcttgtggctggtctggcttgcggcgcgaggatggttctctctggtcatagcccgaagtctcatggcagtcccaaaggaggcttacaactcctgcatcacaagaaaaaggaagccactgccagctggggggatctgcagctcccagaagctccgtgagcctcagccacccctcagactgggttcctctccaagctcgccctctggaggggcagcgcagctcccaccaagggccctgcgaccacagcagggattgggatgaattgcctgtcctggatctgctctagaggcccaagctgcctgcctgaggaaggatgacttgacaagtcaggagacactgttcccaaagccttgaccagagcacctcagcccgctgaccttgcacaaactccatctgctgccatgagaaaagggaagccgcctttgcaaaacattgctgcctaaagaaactcagcagcctcaggcccaattctgccacttctggtttgggtacagttaaaggcaaccctgagggacttggcagtagaaatccagggcctcccctggggctggcagcttcgtgtgcagctagagctttacctgaaaggaagtctctgggcccagaactctccaccaagagcctccctgccgttcgctgagtcccagcaattctcctaagttgaagggatctgagaaggagaaggaaatgtggggtagatttggtggtggttagagatatgcccccctcattactgccaacagtttcggctgcatttcttcacgcacctcggttcctcttcctgaagttcttgtgccctgctcttcagcaccatgggccttcttatacggaaggctctgggatctcccccttgtgggggcaggctcttggggccagcctaagatcatggtttagggtgatcagtgctggcagataaattgaaaaggcacgctggcttgtgatcttaaatgaggacaatccccccagggctgggcactcctcccctcccctcacttctcccacctgcagagccagtgtccttgggtgggctagataggatatactgtatgccggctccttcaagctgctgactcactttatcaatagttccatttaaattgacttcagtggtgagactgtatcctgtttgctattgcttgttgtgctatggggggaggggggaggaatgtgtaagatagttaacatgggcaaagggagatcttggggtgcagcacttaaactgcctcgtaacccttttcatgatttcaaccacatttgctagagggagggagcagccacggagttagaggcccttggggtttctcttttccactgacaggctttcccaggcagctggctagttcattccctccccagccaggtgcaggcgtaggaatatggacatctggttgctttggcctgctgccctctttcaggggtcctaagcccacaatcatgcctccctaagaccttggcatccttccctctaagccgttggcacctctgtgccacctctcacactggctccagacacacagcctgtgcttttggagctgagatcactcgcttcaccctcctcatctttgttctccaagtaaagccacgaggtcggggcgagggcagaggtgatcacctgcgtgtcccatctacagacctgcggcttcataaaacttctgatttctcttcagctttgaaaagggttaccctgggcactggcctagagcctcacctcctaatagacttagccccatgagtttgccatgttgagcaggactatttctggcacttgcaagtcccatgatttcttcggtaattctgagggtggggggagggacatgaaatcatcttagcttagctttctgtctgtgaatgtctatatagtgtattgtgtgttttaacaaatgatttacactgactgttgctgtaaaagtgaatttggaaataaagttattactctgattaaaa

SEQ ID NO: 360292 - DNA, 6131 bp, Homo sapiens
atgagattagcgcccacgtccagcctggaccctgcggagaggcctctggggtctctgggccgtgcctcggggagaaagagccagaagctcccgtcccgctgaccgcgagccttcctcagcaccgtcccgtttgcccagcgcctcctccaacaggaggccctcaggagccctccctggagtggggacaaaaaggcggggactgggccgagaagggtccggcctttccgaagcccgccaccactgcgtatctccacacagagcctgaaagtggtaaggtggtccaggaaggcttcctccgagagccaggccccccaggtctgagccaccagctcatgtccggcatgcctggggctcccctcctgcctgagggccccagagaggccacacgccaaccttcggggacaggacctgaggacacagagggcggccgccacgcccctgagctgctcaagcaccagcttctaggagacctgcaccaggaggggccgccgctgaagggggcagggggcaaagagaggccggggagcaaggaggaggtggatgaagaccgcgacgtcgatgagtcctccccccaagactcccctccctccaaggcctccccagcccaagatgggcggcctccccagacagccgccagagaagccaccagcatcccaggcttcccagcggagggtgccatccccctccctgtggatttcctctccaaagtttccacagagatcccagcctcagagcccgacgggcccagtgtagggcgggccaaagggcaggatgcccccctggagttcacgtttcacgtggaaatcacacccaacgtgcagaaggagcaggcgcactcggaggagcatttgggaagggctgcatttccaggggcccctggagaggggccagaggcccggggcccctctttgggagaggacacaaaagaggctgaccttccagagccctctgaaaagcagcctgctgctgctccgcgggggaagcccgtcagccgggtccctcaactcaaagctcgcatggtcagtaaaagcaaagacgggactggaagcgatgacaaaaaagccaagggggctgatggtaaaacgaagatcgccacaccgcggggagcagcccctccaggccagaagggccaggccaacgccaccaggattccagcaaaaaccccgcccgctccaaagacaccacccagctctggtgaacctccaaaatcaggggatcgcagcggctacagcagccccggctccccaggcactcccggcagccgctcccgcaccccgtcccttccaaccccacccacccgggagcccaagaaggtggcagtggtccgtactccacccaagtcgccgtcttccgccaagagccgcctgcagacagcccccgtgcccatgccagacctgaagaatgtcaagtccaagatcggctccactgagaacctgaagcaccagccgggaggcgggaaggtgcagataattaataagaagctggatcttagcaacgtccagtccaagtgtggctcaaaggataatatcaaacacgtcccgggaggcggcagtgtgcaaatagtctacaaaccagttgacctgagcaaggtgacctccaagtgtggctcattaggcaacatccatcataaaccaggaggtggccaggtggaagtaaaatctgagaagcttgacttcaaggacagagtccagtcgaagattgggtccctggacaatatcacccacgtccctggcggaggaaataaaaagattgaaacccacaagctgaccttccgcgagaacgccaaagccaagacagaccacggggcggagatcgtgtacaagtcgccagtggtgtctggggacacgtctccacggcatctcagcaatgtctcctccaccggcagcatcgacatggtagactcgccccagctcgccacgctagctgacgaggtgtctgcctccctggccaagcagggtttgtgatcaggcccctggggcggtcaataattgtggagaggagagaatgagagagtgtggaaaaaaaaagaataatgacccggcccccgccctctgcccccagctgctcctcgcagttcggttaattggttaatcacttaacctgcttttgtcactcggctttggctcgggacttcaaaatcagtgatgggagtaagagcaaatttcatctttccaaattgatgggtgggctagtaataaaatatttaaaaaaaaacattcaaaaacatggccacatccaacatttcctcaggcaattccttttgattcttttttcttccccctccatgtagaagagggagaaggagaggctctgaaagctgcttctgggggatttcaagggactgggggtgccaaccacctctggccctgttgtgggggtgtcacagaggcagtggcagcaacaaaggatttgaaacttggtgtgttcgtggagccacaggcagacgatgtcaaccttgtgtgagtgtgacgggggttggggtggggcgggaggccacgggggaggccgaggcaggggctgggcagaggggagaggaagcacaagaagtgggagtgggagaggaagccacgtgctggagagtagacatccccctccttgccgctgggagagccaaggcctatgccacctgcagcgtctgagcggccgcctgtccttggtggccgggggtgggggcctgctgtgggtcagtgtgccaccctctgcagggcagcctgtgggagaagggacagcgggtaaaaagagaaggcaagctggcaggagggtggcacttcgtggatgacctccttagaaaagactgaccttgatgtcttgagagcgctggcctcttcctccctccctgcagggtagggggcctgagttgaggggcttccctctctgctccacagaaaccctgttttattgagttctgaaggttggaactgctgccatgattttggccactttgcagacctgggactttagggctaaccagttctctttgtaaggacttgtgcctcttgggagacgtccacccgtttccaagcctgggccactggcatctctggagtgtgtgggggtctgggaggcaggtcccgagccccctgtccttcccacggccactgcagtcacccctgtctgcgccgctgtgctgttgtctgccgtgagagcccaatcactgcctatacccctcatcacacgtcacaatgtcccgaattcccagcctcaccaccccttctcagtaatgaccctggttggttgcaggaggtacctactccatactgagggtgaaattaagggaaggcaaagtccaggcacaagagtgggaccccagcctctcactctcagttccactcatccaactgggaccctcaccacgaatctcatgatctgattcggttccctgtctcctcctcccgtcacagatgtgagccagggcactgctcagctgtgaccctaggtgtttctgccttgttgacatggagagagccctttcccctgagaaggcctggccccttcctgtgctgagcccacagcagcaggctgggtgtcttggttgtcagtggtggcaccaggatggaagggcaaggcacccagggcaggcccacagtcccgctgtcccccacttgcaccctagcttgtagctgccaacctcccagacagcccagcccgctgctcagctccacatgcatagtatcagccctccacacccgacaaaggggaacacacccccttggaaatggttcttttcccccagtcccagctggaagccatgctgtctgttctgctggagcagctgaacatatacatagatgttgccctgccctccccatctgcaccctgttgagttgtagttggatttgtctgtttatgcttggattcaccagagtgactatgatagtgaaaagaaaaaaaaaaaaaaaaaaggacgcatgtatcttgaaatgcttgtaaagaggtttctaacccaccctcacgaggtgtctctcacccccacactgggactcgtgtggcctgtgtggtgccaccctgctggggcctcccaagttttgaaaggctttcctcagcacctgggacccaacagagaccagcttctagcagctaaggaggccgttcagctgtgacgaaggcctgaagcacaggattaggactgaagcgatgatgtccccttccctacttccccttggggctccctgtgtcagggcacagactaggtcttgtggctggtctggcttgcggcgcgaggatggttctctctggtcatagcccgaagtctcatggcagtcccaaaggaggcttacaactcctgcatcacaagaaaaaggaagccactgccagctggggggatctgcagctcccagaagctccgtgagcctcagccacccctcagactgggttcctctccaagctcgccctctggaggggcagcgcagctcccaccaagggccctgcgaccacagcagggattgggatgaattgcctgtcctggatctgctctagaggcccaagctgcctgcctgaggaaggatgacttgacaagtcaggagacactgttcccaaagccttgaccagagcacctcagcccgctgaccttgcacaaactccatctgctgccatgagaaaagggaagccgcctttgcaaaacattgctgcctaaagaaactcagcagcctcaggcccaattctgccacttctggtttgggtacagttaaaggcaaccctgagggacttggcagtagaaatccagggcctcccctggggctggcagcttcgtgtgcagctagagctttacctgaaaggaagtctctgggcccagaactctccaccaagagcctccctgccgttcgctgagtcccagcaattctcctaagttgaagggatctgagaaggagaaggaaatgtggggtagatttggtggtggttagagatatgcccccctcattactgccaacagtttcggctgcatttcttcacgcacctcggttcctcttcctgaagttcttgtgccctgctcttcagcaccatgggccttcttatacggaaggctctgggatctcccccttgtgggggcaggctcttggggccagcctaagatcatggtttagggtgatcagtgctggcagataaattgaaaaggcacgctggcttgtgatcttaaatgaggacaatccccccagggctgggcactcctcccctcccctcacttctcccacctgcagagccagtgtccttgggtgggctagataggatatactgtatgccggctccttcaagctgctgactcactttatcaatagttccatttaaattgacttcagtggtgagactgtatcctgtttgctattgcttgttgtgctatggggggaggggggaggaatgtgtaagatagttaacatgggcaaagggagatcttggggtgcagcacttaaactgcctcgtaacccttttcatgatttcaaccacatttgctagagggagggagcagccacggagttagaggcccttggggtttctcttttccactgacaggctttcccaggcagctggctagttcattccctccccagccaggtgcaggcgtaggaatatggacatctggttgctttggcctgctgccctctttcaggggtcctaagcccacaatcatgcctccctaagaccttggcatccttccctctaagccgttggcacctctgtgccacctctcacactggctccagacacacagcctgtgcttttggagctgagatcactcgcttcaccctcctcatctttgttctccaagtaaagccacgaggtcggggcgagggcagaggtgatcacctgcgtgtcccatctacagacctgcggcttcataaaacttctgatttctcttcagctttgaaaagggttaccctgggcactggcctagagcctcacctcctaatagacttagccccatgagtttgccatgttgagcaggactatttctggcacttgcaagtcccatgatttcttcggtaattctgagggtggggggagggacatgaaatcatcttagcttagctttctgtctgtgaatgtctatatagtgtattgtgtgttttaacaaatgatttacactgactgttgctgtaaaagtgaatttggaaataaagttattactctgattaaaa

SEQ ID NO: 360293 - DNA, 4488 bp, Homo sapiens
cccgccccctcccctggggaggctcgcgttcccgctgctcgcgcctgccgcccgccggcctcaggaacgcgccctcttcgccggcgcgcgccctcgcagtcaccgccacccaccagctccggcaccaacagcagcgccgctgccaccgcccaccttctgccgccgccaccacagccaccttctcctcctccgctgtcctctcccgtcctcgcctctgtcgactatcaggtgaactttgaaccaggatggctgagccccgccaggagttcgaagtgatggaagatcacgctgggacgtacgggttgggggacaggaaagatcaggggggctacaccatgcaccaagaccaagagggtgacacggacgctggcctgaaagctgaagaagcaggcattggagacacccccagcctggaagacgaagctgctggtcacgtgacccaagctcgcatggtcagtaaaagcaaagacgggactggaagcgatgacaaaaaagccaagggggctgatggtaaaacgaagatcgccacaccgcggggagcagcccctccaggccagaagggccaggccaacgccaccaggattccagcaaaaaccccgcccgctccaaagacaccacccagctctggtgaacctccaaaatcaggggatcgcagcggctacagcagccccggctccccaggcactcccggcagccgctcccgcaccccgtcccttccaaccccacccacccgggagcccaagaaggtggcagtggtccgtactccacccaagtcgccgtcttccgccaagagccgcctgcagacagcccccgtgcccatgccagacctgaagaatgtcaagtccaagatcggctccactgagaacctgaagcaccagccgggaggcgggaaggtgcaaatagtctacaaaccagttgacctgagcaaggtgacctccaagtgtggctcattaggcaacatccatcataaaccaggaggtggccaggtggaagtaaaatctgagaagcttgacttcaaggacagagtccagtcgaagattgggtccctggacaatatcacccacgtccctggcggaggaaataaaaagattgaaacccacaagctgaccttccgcgagaacgccaaagccaagacagaccacggggcggagatcgtgtacaagtcgccagtggtgtctggggacacgtctccacggcatctcagcaatgtctcctccaccggcagcatcgacatggtagactcgccccagctcgccacgctagctgacgaggtgtctgcctccctggccaagcagggtttgtgatcaggcccctggggcggtcaataattgtggagaggagagaatgagagagtgtggaaaaaaaaagaataatgacccggcccccgccctctgcccccagctgctcctcgcagttcggttaattggttaatcacttaacctgcttttgtcactcggctttggctcgggacttcaaaatcagtgatgggagtaagagcaaatttcatctttccaaattgatgggtgggctagtaataaaatatttaaaaaaaaacattcaaaaacatggccacatccaacatttcctcaggcaattccttttgattcttttttcttccccctccatgtagaagagggagaaggagaggctctgaaagctgcttctgggggatttcaagggactgggggtgccaaccacctctggccctgttgtgggggtgtcacagaggcagtggcagcaacaaaggatttgaaacttggtgtgttcgtggagccacaggcagacgatgtcaaccttgtgtgagtgtgacgggggttggggtggggcgggaggccacgggggaggccccttcctgtgctgagcccacagcagcaggctgggtgtcttggttgtcagtggtggcaccaggatggaagggcaaggcacccagggcaggcccacagtcccgctgtcccccacttgcaccctagcttgtagctgccaacctcccagacagcccagcccgctgctcagctccacatgcatagtatcagccctccacacccgacaaaggggaacacacccccttggaaatggttcttttcccccagtcccagctggaagccatgctgtctgttctgctggagcagctgaacatatacatagatgttgccctgccctccccatctgcaccctgttgagttgtagttggatttgtctgtttatgcttggattcaccagagtgactatgatagtgaaaagaaaaaaaaaaaaaaaaaaggacgcatgtatcttgaaatgcttgtaaagaggtttctaacccaccctcacgaggtgtctctcacccccacactgggactcgtgtggcctgtgtggtgccaccctgctggggcctcccaagttttgaaaggctttcctcagcacctgggacccaacagagaccagcttctagcagctaaggaggccgttcagctgtgacgaaggcctgaagcacaggattaggactgaagcgatgatgtccccttccctacttccccttggggctccctgtgtcagggcacagactaggtcttgtggctggtctggcttgcggcgcgaggatggttctctctggtcatagcccgaagtctcatggcagtcccaaaggaggcttacaactcctgcatcacaagaaaaaggaagccactgccagctggggggatctgcagctcccagaagctccgtgagcctcagccacccctcagactgggttcctctccaagctcgccctctggaggggcagcgcagctcccaccaagggccctgcgaccacagcagggattgggatgaattgcctgtcctggatctgctctagaggcccaagctgcctgcctgaggaaggatgacttgacaagtcaggagacactgttcccaaagccttgaccagagcacctcagcccgctgaccttgcacaaactccatctgctgccatgagaaaagggaagccgcctttgcaaaacattgctgcctaaagaaactcagcagcctcaggcccaattctgccacttctggtttgggtacagttaaaggcaaccctgagggacttggcagtagaaatccagggcctcccctggggctggcagcttcgtgtgcagctagagctttacctgaaaggaagtctctgggcccagaactctccaccaagagcctccctgccgttcgctgagtcccagcaattctcctaagttgaagggatctgagaaggagaaggaaatgtggggtagatttggtggtggttagagatatgcccccctcattactgccaacagtttcggctgcatttcttcacgcacctcggttcctcttcctgaagttcttgtgccctgctcttcagcaccatgggccttcttatacggaaggctctgggatctcccccttgtgggggcaggctcttggggccagcctaagatcatggtttagggtgatcagtgctggcagataaattgaaaaggcacgctggcttgtgatcttaaatgaggacaatccccccagggctgggcactcctcccctcccctcacttctcccacctgcagagccagtgtccttgggtgggctagataggatatactgtatgccggctccttcaagctgctgactcactttatcaatagttccatttaaattgacttcagtggtgagactgtatcctgtttgctattgcttgttgtgctatggggggaggggggaggaatgtgtaagatagttaacatgggcaaagggagatcttggggtgcagcacttaaactgcctcgtaacccttttcatgatttcaaccacatttgctagagggagggagcagccacggagttagaggcccttggggtttctcttttccactgacaggctttcccaggcagctggctagttcattccctccccagccaggtgcaggcgtaggaatatggacatctggttgctttggcctgctgccctctttcaggggtcctaagcccacaatcatgcctccctaagaccttggcatccttccctctaagccgttggcacctctgtgccacctctcacactggctccagacacacagcctgtgcttttggagctgagatcactcgcttcaccctcctcatctttgttctccaagtaaagccacgaggtcggggcgagggcagaggtgatcacctgcgtgtcccatctacagacctgcggcttcataaaacttctgatttctcttcagctttgaaaagggttaccctgggcactggcctagagcctcacctcctaatagacttagccccatgagtttgccatgttgagcaggactatttctggcacttgcaagtcccatgatttcttcggtaattctgagggtggggggagggacatgaaatcatcttagcttagctttctgtctgtgaatgtctatatagtgtattgtgtgttttaacaaatgatttacactgactgttgctgtaaaagtgaatttggaaataaagttattactctgattaaaa

SEQ ID NO: 360294 - DNA, 646 bp, Homo sapiens
cccgccccctcccctggggaggctcgcgttcccgctgctcgcgcctgccgcccgccggcctcaggaacgcgccctcttcgccggcgcgcgccctcgcagtcaccgccacccaccagctccggcaccaacagcagcgccgctgccaccgcccaccttctgccgccgccaccacagccaccttctcctcctccgctgtcctctcccgtcctcgcctctgtcgactatcaggtgaactttgaaccaggatggctgagccccgccaggagttcgaagtgatggaagatcacgctgggacgtacgggttgggggacaggaaagatcaggggggctacaccatgcaccaagaccaagagggtgacacggacgctggcctgaaagaatctcccctgcagacccccactgaggacggatctgaggaaccgggctctgaaacctctgatgctaagagcactccaacagcggaagctgaagaagcaggcattggagacacccccagcctggaagacgaagctgctggtcacgtgacccaagctcgcatggtcagtaaaagcaaagacgggactggaagcgatgacaaaaaagccaagggggctgatggtaaaacgaagatcgccacaccgcggggccttgtacggggtaccgagct

SEQ ID NO: 360295 - DNA, 5017 bp, Homo sapiens
  misc_feature (1580)..(1580): n is a, c, g, or t
  misc_feature (1843)..(1843): n is a, c, g, or t
  misc_feature (2129)..(2129): n is a, c, g, or t
  misc_feature (2693)..(2693): n is a, c, g, or t
  misc_feature (3024)..(3024): n is a, c, g, or t
  misc_feature (3242)..(3242): n is a, c, g, or t
  misc_feature (3244)..(3244): n is a, c, g, or t
tggagagcctcatccttgaacgtgaaggacgtttgaagactgtggcatgatcacaggatgagatcacagggaacttgagtttctctcctcctctcccttcacagttatttcactgagggaaatccctcccctgcccagaatgaaaactctagccaactcttgacttttccatcactccaaagtagttgaaagtacattagtctccacagtggcaaaacagtgtgcaaaagctaaataattagaacagccagtcccatgtgacagtcaaagcttctaactccattcaaagttgcagccattcccctcaagggctggcagggaggggaggggtaagagaaacaggaaggttcttactgagtttggtcctggtgtgagctgcgtcacactccctgcagaggtttcaaggagactctctctctctctgtctccatggggaccttatttgaattcttctactcttaccccagcctgccatctccagctatcctcccctgaagagcccttctgctgcgctggattctggtggccatgtcatctcctcggccccgtgggagtctgaagatctggctgcagcctcacctctgaggtcctgctagttgccacctcttaaacatgatctgaggctcccatgcactctgacctgtgcccacatggggcccacgggaaacacgctggcaagcaaactgtgggtgtgcagacggttctcagggctgcagcacctgtcctttgctctgcccccaaagcaaggccagcccatcttccatcctctagtgttccttggtggggccctgaccacagtccaccaggtccctaaccagaggggacacacaccaggtgtcctcaatgtattgccttgaaacagttgtgctgggactgtgatggggggtggccatgtagccacccccaccacccccaagccactctctccaaggaaatcctcctaaagatccctttacatcctccatgtggtggggaggttctagagttgggtgcatgtgtcttcagctactgacaatgcagaccttagttggcacctcgctctggcctatcctgtttgctgttcttggcgctccagtgaaactccccatgggccatccagttggggtgcagtgtggccacccccttgcaggttcctgccttgctggagagcacagggccctcctggctcttgtaaaacactccccatggtacagagaggccagcagtgatgtgaggcccaacctccctccatggtgttcccaagcagctccctttctggggtcaaggggtggcaaagacagtgcagcgtccaatttctgactcaagccgggcctggctatcgcagctctgcactgtgtgtgacagcaaggcaactcacccagtgccgtggcagtgaccgtgtccgaggaagcctcctcacaccctctgtctcaaggactctggcatttagctggacttgctgtagctctgagcctttctgccattgccatcaccttgtcagaaactcaggccgaatctgcactcagagttgtgcccaggcagttgagccaacacttgctcagcgatattgtcacatgacaaggcactgtcaccactgggcntcgtgggtagcgcagtgtcggctggatggacccggagggtgtctgtgtcatgctagtgctagtgatgggagccccgtgagcccattgcccgccctcccatgccctcagcagctgcctggggacagccaatggcctgggtgtttctgaggctaccacatggcttccaggaaactcgagaacctttctctcccttgcctacactcttcacacaggcctgtgctggccagcggtggggatccggcattcctatcttaggtgcaganagtgactgactcattgcaggcctgggagataagactgatggcccagccagcaagatgtatggatttctcagaggcagtggcctctgtcattgtcctcaggaaatgctggtgattctggtggcctgaggtcaatgcatgtcaacgtggccaacttgccttataaactttttttctggacaattgcgtgcactgtcctgtaacagtgtcctgttgtttatgatgcagaaataggtgtttttaaagcctattgattttggtactattaatgtggtcaggaactttctcngtctttcttgtttggggtgagctgtggcttcctaaacaggaacccaagacacccccaaaagctgctcaccagcactgccagcctccctcttaccaagtagcacccgttcaggacattctgcgaaaggcatttgcccagaagttgggaggaaggaaatgtaacattttggggcacctaccatatgccaggcaccaggctaaacgtgttcacacaaattctcttactaaccctcaccatccttctacaagacaaactagtatcttcatcttggggttcaagatgaggaaatggaggctcagagaggttgaatgaatgccggtgcctggatatgaaccccatctgcctgactccgcaacccaggcaaagtctttccttgaacttcccagcagccactgcttagacacagcctccacaaccatggctcagcagcaaattgcttctctgacctcactcagcctgtgtgtccttgttgagtgaggcattcaggaccctggtcccaaagtggagaaagtctttcctactaggtcatagctacacctgcatgtgggtgctgtgccttttgtntagtgaacttttatcaccagcatcctcagcaatgacatttgcagagaagccagagctgaggcaccttggtattcttgggatgtgactttcctgaatgtttaagggaaaatgcccgaaggtacagagagcttggtttctagtaaacaataactgtcttgcttttaccccccttcatttgctgacacatacaccagctgaagaagcaggcattggagacacccccagcctggaagacgaagctgctggtcacgtgacccaaggtcagtgaactggaattgcctgccatgacttgggggttggggggagggacatggggtgggctctgccctgnaaagatcatttggacctgagctctaattcacaagtccaggagattttagggagttggttcttatcaaaggttggctactcagatatagaaagagccctagtggtttttttctaataccatttctgggtaattcctaaggcatttagtgttctgaaagatgctagccttgtccagcctgggagttgagaatgaatgtctaacagaaactctaggccggncntggtggctcacgcctctaatcccagcactatgggagacccaggtgggcagatcacctgaggtcaggagtttgagaccagcctggccaacatgtgaaatcctgtctcactacaaataaaaaaattagccgggtgtggtggtaggtgcctataatcccagctactcaggaggctgaggcaggacaatcgctcgaacccaggaggtggacgttgcagtgagccgagatcgcatcattgcactccagcctgggcaacaaaagcaaaactccgtctcaaaaaaaaaaagaaactcaaatatgtgtgacaggcgattctcactgcaggctgccctgtggctgatccaggagcaaggccttaaccatgtcatccccaagcgattgcttgtaaactttcttctgtgcagccttcaacccttattatgattttcttctcaggaaccaaactgctgtattcaagaaaggcagctttgtgtaatcatttatcataaatatcttaagaaaaatcctagagattcctaattttaggaaatgggagacctatggtactgatataatgtgggctgggcttgttttctgtcatttgctagataaatgaacttgagagcctactgtaaaatgtggaagcttctagattgcagaagggctggaaagacactgttcttttctcccgagtgatgggatctgtccagtatttagagctgcctctgaggccatctgattctaggagactctgcctcgttgaggatattttgaggcctaactacacattcctgcccccagagaggtcacagcctatagcaggctgatgtttctcatgtcacatggcacagaaaggcacattttcgttctcaggctaacaaagagcttcaaaaactattagaagggacagtggctataagagaagaacctcagtcaatgtgtgaaattaactaggaacctggctcctgtttcttttaggtcatgtttttcagcttaggtaaaactagaggctttgataaagcatgacctctagaaatcattgcttttcataaatggaagtgggtttgagttttttctactgattgtagtgcaggtgatgtctacatgcccccagaacatattccatgcaacaaaaaaagcccaggtcaccgtctttgctgggaacttgacttttgtgctcactgaattttaagctttctgacagcagcctggaatcatggagggataaagtacctattagtaagatggaaaaaggtgtttcaggttggagctgcagtctgttgagagtaagctatgggaaggcctgtatacgaggggtggacttttcttctgtaagtgtccagagaccaggcctcctgaagagggcatgggggcttaacttacctggactactgtgtttacaatactcatttatcttgaactcctcctaacccctgagaattgctacatttagtatttgctgagtacttcctagcatcctagggaatcaatagaacattctcccaaccaggctgggtgcggtggctcatgtctgtaatcccagcactttgggaggccaaggtaggcagatcccttgaggccaggagtgcaagactagcctggctgacatggtgaaaccccgtctttactaaaaatacaaaagttagccaggcatggtggtacacacctgtaatcccagctacatgggaggagtaggaggcaggagaattgcttgaacctgggaggtggaggttgctgtgagccgagatcatgccactgcactccagcctgggcgacagagtgagtgagactctgttt

SEQ ID NO: 360296 - DNA, 5511 bp, Homo sapiens
  misc_feature (3510)..(3510): n is a, c, g, or t
  misc_feature (3523)..(3523): n is a, c, g, or t
cccgccccctcccctggggaggctcgcgttcccgctgctcgcgcctgccgcccgccggcctcaggaacgcgccctcttcgccggcgcgcgccctcgcagtcaccgccacccaccagctccggcaccaacagcagcgccgctgccaccgcccaccttctgccgccgccaccacagccaccttctcctcctccgctgtcctctcccgtcctcgcctctgtcgactatcaggtgaactttgaaccaggatggctgagccccgccaggagttcgaagtgatggaagatcacgctgggacgtacgggttgggggacaggaaagatcaggggggctacaccatgcaccaagaccaagagggtgacacggacgctggcctgaaagctgaagaagcaggcattggagacacccccagcctggaagacgaagctgctggtcacgtgacccaagctcgcatggtcagtaaaagcaaagacgggactggaagcgatgacaaaaaagccaagggggctgatggtaaaacgaagatcgccacaccgcggggagcagcccctccaggccagaagggccaggccaacgccaccaggattccagcaaaaaccccgcccgctccaaagacaccacccagctctggtgaacctccaaaatcaggggatcgcagcggctacagcagccccggctccccaggcactcccggcagccgctcccgcaccccgtcccttccaaccccacccacccgggagcccaagaaggtggcagtggtccgtactccacccaagtcgccgtcttccgccaagagccgcctgcagacagcccccgtgcccatgccagacctgaagaatgtcaagtccaagatcggctccactgagaacctgaagcaccagccgggaggcgggaaggtgcaaatagtctacaaaccagttgacctgagcaaggtgacctccaagtgtggctcattaggcaacatccatcataaaccaggaggtggccaggtggaagtaaaatctgagaagcttgacttcaaggacagagtccagtcgaagattgggtccctggacaatatcacccacgtccctggcggaggaaataaaaagattgaaacccacaagctgaccttccgcgagaacgccaaagccaagacagaccacggggcggagatcgtgtacaagtcgccagtggtgtctggggacacgtctccacggcatctcagcaatgtctcctccaccggcagcatcgacatggtagactcgccccagctcgccacgctagctgacgaggtgtctgcctccctggccaagcagggtttgtgatcaggcccctggggcggtcaataattgtggagaggagagaatgagagagtgtggaaaaaaaaagaataatgacccggcccccgccctctgcccccagctgctcctcgcagttcggttaattggttaatcacttaacctgcttttgtcactcggctttggctcgggacttcaaaatcagtgatgggagtaagagcaaatttcatctttccaaattgatgggtgggctagtaataaaatatttaaaaaaaaacattcaaaaacatggccacatccaacatttcctcaggcaattccttttgattcttttttcttccccctccatgtagaagagggagaaggagaggctctgaaagctgcttctgggggatttcaagggactgggggtgccaaccacctctggccctgttgtgggggtgtcacagaggcagtggcagcaacaaaggatttgaaacttggtgtgttcgtggagccacaggcagacgatgtcaaccttgtgtgagtgtgacgggggttggggtggggcgggaggccacgggggaggccgaggcaggggctgggcagaggggagaggaagcacaagaagtgggagtgggagaggaagccacgtgctggagagtagacatccccctccttgccgctgggagagccaaggcctatgccacctgcagcgtctgagcggccgcctgtccttggtggccgggggtgggggcctgctgtgggtcagtgtgccaccctctgcagggcagcctgtgggagaagggacagcgggtaaaaagagaaggcaagctggcaggagggtggcacttcgtggatgacctccttagaaaagactgaccttgatgtcttgagagcgctggcctcttcctccctccctgcagggtagggggcctgagttgaggggcttccctctctgctccacagaaaccctgttttattgagttctgaaggttggaactgctgccatgattttggccactttgcagacctgggactttagggctaaccagttctctttgtaaggacttgtgcctcttgggagacgtccacccgtttccaagcctgggccactggcatctctggagtgtgtgggggtctgggaggcaggtcccgagccccctgtccttcccacggccactgcagtcacccctgtctgcgccgctgtgctgttgtctgccgtgagagcccaatcactgcctatacccctcatcacacgtcacaatgtcccgaattcccagcctcaccaccccttctcagtaatgaccctggttggttgcaggaggtacctactccatactgagggtgaaattaagggaaggcaaagtccaggcacaagagtgggaccccagcctctcactctcagttccactcatccaactgggaccctcaccacgaatctcatgatctgattcggttccctgtctcctcctcccgtcacagatgtgagccagggcactgctcagctgtgaccctaggtgtttctgccttgttgacatggagagagccctttcccctgagaaggcctggccccttcctgtgctgagcccacagcagcaggctgggtgtcttggttgtcagtggtggcaccaggatggaagggcaaggcacccagggcaggcccacagtcccgctgtcccccacttgcaccctagcttgtagctgccaacctcccagacagcccagcccgctgctcagctccacatgcatagtatcagccctccacacccgacaaaggggaacacacccccttggaaatggttcttttcccccagtcccagctggaagccatgctgtctgttctgctggagcagctgaacatatacatagatgttgccctgccctccccatctgcaccctgttgagttgtagttggatttgtctgtttatgcttggattcaccagagtgactatgatagtgaaaagaaaaaaaaaaaaaaaaaaggacgcatgtatcttgaaatgcttgtaaagaggtttctaacccaccctcacgaggtgtctctcacccccacactgggactcgtgtggcctgtgtggtgccaccctgctggggcctcccaagttttgaaaggctttcctcagcacctgggacccaacagagaccagcttctagcagctaaggagagggccggtctcacgcttggtagacgagaagggcgctgaaggcactagggaattaggagaacctggaaacgcgagatttagattntgtcccccctttntccctatactttccccttggggctccctgtgtcagggcacagactaggtcttgtggctggtctggcttgcggcgcgaggatggttctctctggtcatagcccgaagtctcatggcagtcccaaaggaggcttacaactcctgcatcacaagaaaaaggaagccactgccagctggggggatctgcagctcccagaagctccgtgagcctcagccacccctcagactgggttcctctccaagctcgccctctggaggggcagcgcagctcccaccaagggccctgcgaccacagcagggattgggatgaattgcctgtcctggatctgctctagaggcccaagctgcctgcctgaggaaggatgacttgacaagtcaggagacactgttcccaaagccttgaccagagcacctcagcccgctgaccttgcacaaactccatctgctgccatgagaaaagggaagccgcctttgcaaaacattgctgcctaaagaaactcagcagcctcaggcccaattctgccacttctggtttgggtacagttaaaggcaaccctgagggacttggcagtagaaatccagggcctcccctggggctggcagcttcgtgtgcagctagagctttacctgaaaggaagtctctgggcccagaactctccaccaagagcctccctgccgttcgctgagtcccagcaattctcctaagttgaagggatctgagaaggagaaggaaatgtggggtagatttggtggtggttagagatatgcccccctcattactgccaacagtttcggctgcatttcttcacgcacctcggttcctcttcctgaagttcttgtgccctgctcttcagcaccatgggccttcttatacggaaggctctgggatctcccccttgtgggggcaggctcttggggccagcctaagatcatggtttagggtgatcagtgctggcagataaattgaaaaggcacgctggcttgtgatcttaaatgaggacaatccccccagggctgggcactcctcccctcccctcacttctcccacctgcagagccagtgtccttgggtgggctagataggatatactgtatgccggctccttcaagctgctgactcactttatcaatagttccatttaaattgacttcagtggtgagactgtatcctgtttgctattgcttgttgtgctatggggggaggggggaggaatgtgtaagatagttaacatgggcaaagggagatcttggggtgcagcacttaaactgcctcgtaacccttttcatgatttcaaccacatttgctagagggagggagcagccacggagttagaggcccttggggtttctcttttccactgacaggctttcccaggcagctggctagttcattccctccccagccaggtgcaggcgtaggaatatggacatctggttgctttggcctgctgccctctttcaggggtcctaagcccacaatcatgcctccctaagaccttggcatccttccctctaagccgttggcacctctgtgccacctctcacactggctccagacacacagcctgtgcttttggagctgagatcactcgcttcaccctcctcatctttgttctccaagtaaagccacgaggtcggggcgagggcagaggtgatcacctgcgtgtcccatctacagacctgcggcttcataaaacttctgatttctcttcagctttgaaaagggttaccctgggcactggcctagagcctcacctcctaatagacttagccccatgagtttgccatgttgagcaggactatttctggcacttgcaagtcccatgatttcttcggtaattctgagggtggggggagggacatgaaatcatcttagcttagctttctgtctgtgaatgtctatatagtgtattgtgtgttttaacaaatgatttacactgactgttgctgtaaaagtgaatttggaaataaagttattactctgattaaaa

SEQ ID NO: 360297 - DNA, 5930 bp, Homo sapiens
cccgccccctcccctggggaggctcgcgttcccgctgctcgcgcctgccgcccgccggcctcaggaacgcgccctcttcgccggcgcgcgccctcgcagtcaccgccacccaccagctccggcaccaacagcagcgccgctgccaccgcccaccttctgccgccgccaccacagccaccttctcctcctccgctgtcctctcccgtcctcgcctctgtcgactatcaggtgaactttgaaccaggatggctgagccccgccaggagttcgaagtgatggaagatcacgctgggacgtacgggttgggggacaggaaagatcaggggggctacaccatgcaccaagaccaagagggtgacacggacgctggcctgaaagctgaagaagcaggcattggagacacccccagcctggaagacgaagctgctggtcacgtgacccaagctcgcatggtcagtaaaagcaaagacgggactggaagcgatgacaaaaaagccaagggggctgatggtaaaacgaagatcgccacaccgcggggagcagcccctccaggccagaagggccaggccaacgccaccaggattccagcaaaaaccccgcccgctccaaagacaccacccagctctggtgaacctccaaaatcaggggatcgcagcggctacagcagccccggctccccaggcactcccggcagccgctcccgcaccccgtcccttccaaccccacccacccgggagcccaagaaggtggcagtggtccgtactccacccaagtcgccgtcttccgccaagagccgcctgcagacagcccccgtgcccatgccagacctgaagaatgtcaagtccaagatcggctccactgagaacctgaagcaccagccgggaggcgggaaggtgcaaatagtctacaaaccagttgacctgagcaaggtgacctccaagtgtggctcattaggcaacatccatcataaaccaggaggtggccaggtggaagtaaaatctgagaagcttgacttcaaggacagagtccagtcgaagattgggtccctggacaatatcacccacgtccctggcggaggaaataaaaagattgaaacccacaagctgaccttccgcgagaacgccaaagccaagacagaccacggggcggagatcgtgtacaagtcgccagtggtgtctggggacacgtctccacggcatctcagcaatgtctcctccaccggcagcatcgacatggtagactcgccccagctcgccacgctagctgacgaggtgtctgcctccctggccaagcagggtttgtgatcaggcccctggggcggtcaataattgtggagaggagagaatgagagagtgtggaaaaaaaaagaataatgacccggcccccgccctctgcccccagctgctcctcgcagttcggttaattggttaatcacttaacctgcttttgtcactcggctttggctcgggacttcaaaatcagtgatgggagtaagagcaaatttcatctttccaaattgatgggtgggctagtaataaaatatttaaaaaaaaacattcaaaaacatggccacatccaacatttcctcaggcaattccttttgattcttttttcttccccctccatgtagaagagggagaaggagaggctctgaaagctgcttctgggggatttcaagggactgggggtgccaaccacctctggccctgttgtgggggtgtcacagaggcagtggcagcaacaaaggatttgaaacttggtgtgttcgtggagccacaggcagacgatgtcaaccttgtgtgagtgtgacgggggttggggtggggcgggaggccacgggggaggccgaggcaggggctgggcagaggggagaggaagcacaagaagtgggagtgggagaggaagccacgtgctggagagtagacatccccctccttgccgctgggagagccaaggcctatgccacctgcagcgtctgagcggccgcctgtccttggtggccgggggtgggggcctgctgtgggtcagtgtgccaccctctgcagggcagcctgtgggagaagggacagcgggtaaaaagagaaggcaagctggcaggagggtggcacttcgtggatgacctccttagaaaagactgaccttgatgtcttgagagcgctggcctcttcctccctccctgcagggtagggggcctgagttgaggggcttccctctctgctccacagaaaccctgttttattgagttctgaaggttggaactgctgccatgattttggccactttgcagacctgggactttagggctaaccagttctctttgtaaggacttgtgcctcttgggagacgtccacccgtttccaagcctgggccactggcatctctggagtgtgtgggggtctgggaggcaggtcccgagccccctgtccttcccacggccactgcagtcacccctgtctgcgccgctgtgctgttgtctgccgtgagagcccaatcactgcctatacccctcatcacacgtcacaatgtcccgaattcccagcctcaccaccccttctcagtaatgaccctggttggttgcaggaggtacctactccatactgagggtgaaattaagggaaggcaaagtccaggcacaagagtgggaccccagcctctcactctcagttccactcatccaactgggaccctcaccacgaatctcatgatctgattcggttccctgtctcctcctcccgtcacagatgtgagccagggcactgctcagctgtgaccctaggtgtttctgccttgttgacatggagagagccctttcccctgagaaggcctggccccttcctgtgctgagcccacagcagcaggctgggtgtcttggttgtcagtggtggcaccaggatggaagggcaaggcacccagggcaggcccacagtcccgctgtcccccacttgcaccctagcttgtagctgccaacctcccagacagcccagcccgctgctcagctccacatgcatagtatcagccctccacacccgacaaaggggaacacacccccttggaaatggttcttttcccccagtcccagctggaagccatgctgtctgttctgctggagcagctgaacatatacatagatgttgccctgccctccccatctgcaccctgttgagttgtagttggatttgtctgtttatgcttggattcaccagagtgactatgatagtgaaaagaaaaaaaaaaaaaaaaaaggacgcatgtatcttgaaatgcttgtaaagaggtttctaacccaccctcacgaggtgtctctcacccccacactgggactcgtgtggcctgtgtggtgccaccctgctggggcctcccaagttttgaaaggctttcctcagcacctgggacccaacagagaccagcttctagcagctaaggaggccgttcagctgtgacgaaggcctgaagcacaggattaggactgaagcgatgatgtccccttccctacttccccttggggctccctgtgtcagggcacagactaggtcttgtggctggtctggcttgcggcgcgaggatggttctctctggtcatagcccgaagtctcatggcagtcccaaaggaggcttacaactcctgcatcacaagaaaaaggaagccactgccagctggggggatctgcagctcccagaagctccgtgagcctcagccacccctcagactgggttcctctccaagctcgccctctggaggggcagcgcagctcccaccaagggccctgcgaccacagcagggattgggatgaattgcctgtcctggatctgctctagaggcccaagctgcctgcctgaggaaggatgacttgacaagtcaggagacactgttcccaaagccttgaccagagcacctcagcccgctgaccttgcacaaactccatctgctgccatgagaaaagggaagccgcctttgcaaaacattgctgcctaaagaaactcagcagcctcaggcccaattctgccacttctggtttgggtacagttaaaggcaaccctgagggacttggcagtagaaatccagggcctcccctggggctggcagcttcgtgtgcagctagagctttacctgaaaggaagtctctgggcccagaactctccaccaagagcctccctgccgttcgctgagtcccagcaattctcctaagttgaagggatctgagaaggagaaggaaatgtggggtagatttggtggtggttagagatatgcccccctcattactgccaacagtttcggctgcatttcttcacgcacctcggttcctcttcctgaagttcttgtgccctgctcttcagcaccatgggccttcttatacggaaggctctgggatctcccccttgtgggggcaggctcttggggccagcctaagatcatggtttagggtgatcagtgctggcagataaattgaaaaggcacgctggcttgtgatcttaaatgaggacaatccccccagggctgggcactcctcccctcccctcacttctcccacctgcagagccagtgtccttgggtgggctagataggatatactgtatgccggctccttcaagctgctgactcactttatcaatagttccatttaaattgacttcagtggtgagactgtatcctgtttgctattgcttgttgtgctatggggggaggggggaggaatgtgtaagatagttaacatgggcaaagggagatcttggggtgcagcacttaaactgcctcgtaacccttttcatgatttcaaccacatttgctagagggagggagcagccacggagttagaggcccttggggtttctcttttccactgacaggctttcccaggcagctggctagttcattccctccccagccaggtgcaggcgtaggaatatggacatctggttgctttggcctgctgccctctttcaggggtcctaagcccacaatcatgcctccctaagaccttggcatccttccctctaagccgttggcacctctgtgccacctctcacactggctccagacacacagcctgtgcttttggagctgagatcactcgcttcaccctcctcatctttgttctccaagtaaagccacgaggtcggggcgagggcagaggtgatcacctgcgtgtcccatctacagacctgcggcttcataaaacttctgatttctcttcagctttgaaaagggttaccctgggcactggcctagagcctcacctcctaatagacttagccccatgagtttgccatgttgagcaggactatttctggcacttgcaagtcccatgatttcttcggtaattctgagggtggggggagggacatgaaatcatcttagcttagctttctgtctgtgaatgtctatatagtgtattgtgtgttttaacaaatgatttacactgactgttgctgtaaaagtgaatttggaaataaagttattactctgattaaaaaaaaaaaaaaaaaaaaaaaaaaaaaaaaaaaaaaaaaagggggggggcaaagatacccgggggggccatagctccgttcttgtcacaagggggccccaataggcaactccgtttaataaacgcaaggccactgggccccgccgtataaacaagcctttcgcgactaggcggaaaacttcgtccgcctgggcgactcttgggaaggcgcaccccttacatctcgcggggggaggaacaccactaaatgtttccgaccacaacatcacccctatcgaaacattttcaagcactccccagcggggtcaactaataaccactctcccaacgcgcctctataacgctggcgcacaaccccacacgccggcccattatcgcactcgcgcggcttacaagaagtcctggccataccgagagattcacatcttagcgaaaacttatcatcacccggatccattgata

SEQ ID NO: 360298 - DNA, 4837 bp, Homo sapiens
cccgccccctcccctggggaggctcgcgttcccgctgctcgcgcctgccgcccgccggcctcaggaacgcgccctcttcgccggcgcgcgccctcgcagtcaccgccacccaccagctccggcaccaacagcagcgccgctgccaccgcccaccttctgccgccgccaccacagccaccttctcctcctccgctgtcctctcccgtcctcgcctctgtcgactatcaggtgaactttgaaccaggatggctgagccccgccaggagttcgaagtgatggaagatcacgctgggacgtacgggttgggggacaggaaagatcaggggggctacaccatgcaccaagaccaagagggtgacacggacgctggcctgaaagctgaagaagcaggcattggagacacccccagcctggaagacgaagctgctggtcacgtgacccaagctcgcatggtcagtaaaagcaaagacgggactggaagcgatgacaaaaaagccaagggggctgatggtaaaacgaagatcgccacaccgcggggagcagcccctccaggccagaagggccaggccaacgccaccaggattccagcaaaaaccccgcccgctccaaagacaccacccagctctggtgaacctccaaaatcaggggatcgcagcggctacagcagccccggctccccaggcactcccggcagccgctcccgcaccccgtcccttccaaccccacccacccgggagcccaagaaggtggcagtggtccgtactccacccaagtcgccgtcttccgccaagagccgcctgcagacagcccccgtgcccatgccagacctgaagaatgtcaagtccaagatcggctccactgagaacctgaagcaccagccgggaggcgggaaggtgcaaatagtctacaaaccagttgacctgagcaaggtgacctccaagtgtggctcattaggcaacatccatcataaaccaggaggtggccaggtggaagtaaaatctgagaagcttgacttcaaggacagagtccagtcgaagattgggtccctggacaatatcacccacgtccctggcggaggaaataaaaagattgaaacccacaagctgaccttccgcgagaacgccaaagccaagacagaccacggggcggagatcgtgtacaagtcgccagtggtgtctggggacacgtctccacggcatctcagcaatgtctcctccaccggcagcatcgacatggtagactcgccccagctcgccacgctagctgacgaggtgtctgcctccctggccaagcagggtttgtgatcaggcccctggggcggtcaataattgtggagaggagagaatgagagagtgtggaaaaaaaaagaataatgacccggcccccgccctctgcccccagctgctcctcgcagttcggttaattggttaatcacttaacctgcttttgtcactcggctttggctcgggacttcaaaatcagtgatgggagtaagagcaaatttcatctttccaaattgatgggtgggctagtaataaaatatttaaaaaaaaacattcaaaaacatggccacatccaacatttcctcaggcaattccttttgattcttttttcttccccctccatgtagaagagggagaaggagaggctctgaaagctgcttctgggggatttcaagggactgggggtgccaaccacctctggccctgttgtgggggtgtcacagaggcagtggcagcaacaaaggatttgaaacttggtgtgttcgtggagccacaggcagaccctgtccttcccacggccactgcagtcacccctgtctgcgccgctgtgctgttgtctgccgtgagagcccaatcactgcctatacccctcatcacacgtcacaatgtcccgaattcccagcctcaccaccccttctcagtaatgaccctggttggttgcaggaggtacctactccatactgagggtgaaattaagggaaggcaaagtccaggcacaagagtgggaccccagcctctcactctcagttccactcatccaactgggaccctcaccacgaatctcatgatctgattcggttccctgtctcctcctcccgtcacagatgtgagccagggcactgctcagctgtgaccctaggtgtttctgccttgttgacatggagagagccctttcccctgagaaggcctggccccttcctgtgctgagcccacagcagcaggctgggtgtcttggttgtcagtggtggcaccaggatggaagggcaaggcacccagggcaggcccacagtcccgctgtcccccacttgcaccctagcttgtagctgccaacctcccagacagcccagcccgctgctcagctccacatgcatagtatcagccctccacacccgacaaaggggaacacacccccttggaaatggttcttttcccccagtcccagctggaagccatgctgtctgttctgctggagcagctgaacatatacatagatgttgccctgccctccccatctgcaccctgttgagttgtagttggatttgtctgtttatgcttggattcaccagagtgactatgatagtgaaaagaaaaaaaaaaaaaaaaaaggacgcatgtatcttgaaatgcttgtaaagaggtttctaacccaccctcacgaggtgtctctcacccccacactgggactcgtgtggcctgtgtggtgccaccctgctggggcctcccaagttttgaaaggctttcctcagcacctgggacccaacagagaccagcttctagcagctaaggaggccgttcagctgtgacgaaggcctgaagcacaggattaggactgaagcgatgatgtccccttccctacttccccttggggctccctgtgtcagggcacagactaggtcttgtggctggtctggcttgcggcgcgaggatggttctctctggtcatagcccgaagtctcatggcagtcccaaaggaggcttacaactcctgcatcacaagaaaaaggaagccactgccagctggggggatctgcagctcccagaagctccgtgagcctcagccacccctcagactgggttcctctccaagctcgccctctggaggggcagcgcagctcccaccaagggccctgcgaccacagcagggattgggatgaattgcctgtcctggatctgctctagaggcccaagctgcctgcctgaggaaggatgacttgacaagtcaggagacactgttcccaaagccttgaccagagcacctcagcccgctgaccttgcacaaactccatctgctgccatgagaaaagggaagccgcctttgcaaaacattgctgcctaaagaaactcagcagcctcaggcccaattctgccacttctggtttgggtacagttaaaggcaaccctgagggacttggcagtagaaatccagggcctcccctggggctggcagcttcgtgtgcagctagagctttacctgaaaggaagtctctgggcccagaactctccaccaagagcctccctgccgttcgctgagtcccagcaattctcctaagttgaagggatctgagaaggagaaggaaatgtggggtagatttggtggtggttagagatatgcccccctcattactgccaacagtttcggctgcatttcttcacgcacctcggttcctcttcctgaagttcttgtgccctgctcttcagcaccatgggccttcttatacggaaggctctgggatctcccccttgtgggggcaggctcttggggccagcctaagatcatggtttagggtgatcagtgctggcagataaattgaaaaggcacgctggcttgtgatcttaaatgaggacaatccccccagggctgggcactcctcccctcccctcacttctcccacctgcagagccagtgtccttgggtgggctagataggatatactgtatgccggctccttcaagctgctgactcactttatcaatagttccatttaaattgacttcagtggtgagactgtatcctgtttgctattgcttgttgtgctatggggggaggggggaggaatgtgtaagatagttaacatgggcaaagggagatcttggggtgcagcacttaaactgcctcgtaacccttttcatgatttcaaccacatttgctagagggagggagcagccacggagttagaggcccttggggtttctcttttccactgacaggctttcccaggcagctggctagttcattccctccccagccaggtgcaggcgtaggaatatggacatctggttgctttggcctgctgccctctttcaggggtcctaagcccacaatcatgcctccctaagaccttggcatccttccctctaagccgttggcacctctgtgccacctctcacactggctccagacacacagcctgtgcttttggagctgagatcactcgcttcaccctcctcatctttgttctccaagtaaagccacgaggtcggggcgagggcagaggtgatcacctgcgtgtcccatctacagacctgcggcttcataaaacttctgatttctcttcagctttgaaaagggttaccctgggcactggcctagagcctcacctcctaatagacttagccccatgagtttgccatgttgagcaggactatttctggcacttgcaagtcccatgatttcttcggtaattctgagggtggggggagggacatgaaatcatcttagcttagctttctgtctgtgaatgtctatatagtgtattgtgtgttttaacaaatgatttacactgactgttgctgtaaaagtgaatttggaaataaagttattactctgattaaaa

SEQ ID NO: 360299 - DNA, 8826 bp, Homo sapiens
  misc_feature (1580)..(1580): n is a, c, g, or t
  misc_feature (1843)..(1843): n is a, c, g, or t
  misc_feature (2129)..(2129): n is a, c, g, or t
  misc_feature (2693)..(2693): n is a, c, g, or t
tggagagcctcatccttgaacgtgaaggacgtttgaagactgtggcatgatcacaggatgagatcacagggaacttgagtttctctcctcctctcccttcacagttatttcactgagggaaatccctcccctgcccagaatgaaaactctagccaactcttgacttttccatcactccaaagtagttgaaagtacattagtctccacagtggcaaaacagtgtgcaaaagctaaataattagaacagccagtcccatgtgacagtcaaagcttctaactccattcaaagttgcagccattcccctcaagggctggcagggaggggaggggtaagagaaacaggaaggttcttactgagtttggtcctggtgtgagctgcgtcacactccctgcagaggtttcaaggagactctctctctctctgtctccatggggaccttatttgaattcttctactcttaccccagcctgccatctccagctatcctcccctgaagagcccttctgctgcgctggattctggtggccatgtcatctcctcggccccgtgggagtctgaagatctggctgcagcctcacctctgaggtcctgctagttgccacctcttaaacatgatctgaggctcccatgcactctgacctgtgcccacatggggcccacgggaaacacgctggcaagcaaactgtgggtgtgcagacggttctcagggctgcagcacctgtcctttgctctgcccccaaagcaaggccagcccatcttccatcctctagtgttccttggtggggccctgaccacagtccaccaggtccctaaccagaggggacacacaccaggtgtcctcaatgtattgccttgaaacagttgtgctgggactgtgatggggggtggccatgtagccacccccaccacccccaagccactctctccaaggaaatcctcctaaagatccctttacatcctccatgtggtggggaggttctagagttgggtgcatgtgtcttcagctactgacaatgcagaccttagttggcacctcgctctggcctatcctgtttgctgttcttggcgctccagtgaaactccccatgggccatccagttggggtgcagtgtggccacccccttgcaggttcctgccttgctggagagcacagggccctcctggctcttgtaaaacactccccatggtacagagaggccagcagtgatgtgaggcccaacctccctccatggtgttcccaagcagctccctttctggggtcaaggggtggcaaagacagtgcagcgtccaatttctgactcaagccgggcctggctatcgcagctctgcactgtgtgtgacagcaaggcaactcacccagtgccgtggcagtgaccgtgtccgaggaagcctcctcacaccctctgtctcaaggactctggcatttagctggacttgctgtagctctgagcctttctgccattgccatcaccttgtcagaaactcaggccgaatctgcactcagagttgtgcccaggcagttgagccaacacttgctcagcgatattgtcacatgacaaggcactgtcaccactgggcntcgtgggtagcgcagtgtcggctggatggacccggagggtgtctgtgtcatgctagtgctagtgatgggagccccgtgagcccattgcccgccctcccatgccctcagcagctgcctggggacagccaatggcctgggtgtttctgaggctaccacatggcttccaggaaactcgagaacctttctctcccttgcctacactcttcacacaggcctgtgctggccagcggtggggatccggcattcctatcttaggtgcaganagtgactgactcattgcaggcctgggagataagactgatggcccagccagcaagatgtatggatttctcagaggcagtggcctctgtcattgtcctcaggaaatgctggtgattctggtggcctgaggtcaatgcatgtcaacgtggccaacttgccttataaactttttttctggacaattgcgtgcactgtcctgtaacagtgtcctgttgtttatgatgcagaaataggtgtttttaaagcctattgattttggtactattaatgtggtcaggaactttctcngtctttcttgtttggggtgagctgtggcttcctaaacaggaacccaagacacccccaaaagctgctcaccagcactgccagcctccctcttaccaagtagcacccgttcaggacattctgcgaaaggcatttgcccagaagttgggaggaaggaaatgtaacattttggggcacctaccatatgccaggcaccaggctaaacgtgttcacacaaattctcttactaaccctcaccatccttctacaagacaaactagtatcttcatcttggggttcaagatgaggaaatggaggctcagagaggttgaatgaatgccggtgcctggatatgaaccccatctgcctgactccgcaacccaggcaaagtctttccttgaacttcccagcagccactgcttagacacagcctccacaaccatggctcagcagcaaattgcttctctgacctcactcagcctgtgtgtccttgttgagtgaggcattcaggaccctggtcccaaagtggagaaagtctttcctactaggtcatagctacacctgcatgtgggtgctgtgccttttgtntagtgaacttttatcaccagcatcctcagcaatgacatttgcagagaagccagagctgaggcaccttggtattcttgggatgtgactttcctgaatgtttaagggaaaatgcccgaaggtacagagagcttggtttctagtaaacaataactgtcttgcttttaccccccttcatttgctgacacatacaccagctgaagaagcaggcattggagacacccccagcctggaagacgaagctgctggtcacgtgacccaagagcctgaaagtggtaaggtggtccaggaaggcttcctccgagagccaggccccccaggtctgagccaccagctcatgtccggcatgcctggggctcccctcctgcctgagggccccagagaggccacacgccaaccttcggggacaggacctgaggacacagagggcggccgccacgcccctgagctgctcaagcaccagcttctaggagacctgcaccaggaggggccgccgctgaagggggcagggggcaaagagaggccggggagcaaggaggaggtggatgaagaccgcgacgtcgatgagtcctccccccaagactcccctccctccaaggcctccccagcccaagatgggcggcctccccagacagccgccagagaagccaccagcatcccaggcttcccagcggagggtgccatccccctccctgtggatttcctctccaaagtttccacagagatcccagcctcagagcccgacgggcccagtgtagggcgggccaaagggcaggatgcccccctggagttcacgtttcacgtggaaatcacacccaacgtgcagaaggagcaggcgcactcggaggagcatttgggaagggctgcatttccaggggcccctggagaggggccagaggcccggggcccctctttgggagaggacacaaaagaggctgaccttccagagccctctgaaaagcagcctgctgctgctccgcgggggaagcccgtcagccgggtccctcaactcaaagctcgcatggtcagtaaaagcaaagacgggactggaagcgatgacaaaaaagccaagggggctgatggtaaaacgaagatcgccacaccgcggggagcagcccctccaggccagaagggccaggccaacgccaccaggattccagcaaaaaccccgcccgctccaaagacaccacccagctctggtgaacctccaaaatcaggggatcgcagcggctacagcagccccggctccccaggcactcccggcagccgctcccgcaccccgtcccttccaaccccacccacccgggagcccaagaaggtggcagtggtccgtactccacccaagtcgccgtcttccgccaagagccgcctgcagacagcccccgtgcccatgccagacctgaagaatgtcaagtccaagatcggctccactgagaacctgaagcaccagccgggaggcgggaaggtgcagataattaataagaagctggatcttagcaacgtccagtccaagtgtggctcaaaggataatatcaaacacgtcccgggaggcggcagtgtgcaaatagtctacaaaccagttgacctgagcaaggtgacctccaagtgtggctcattaggcaacatccatcataaaccaggaggtggccaggtggaagtaaaatctgagaagcttgacttcaaggacagagtccagtcgaagattgggtccctggacaatatcacccacgtccctggcggaggaaataaaaagattgaaacccacaagctgaccttccgcgagaacgccaaagccaagacagaccacggggcggagatcgtgtacaagtcgccagtggtgtctggggacacgtctccacggcatctcagcaatgtctcctccaccggcagcatcgacatggtagactcgccccagctcgccacgctagctgacgaggtgtctgcctccctggccaagcagggtttgtgatcaggcccctggggcggtcaataattgtggagaggagagaatgagagagtgtggaaaaaaaaagaataatgacccggcccccgccctctgcccccagctgctcctcgcagttcggttaattggttaatcacttaacctgcttttgtcactcggctttggctcgggacttcaaaatcagtgatgggagtaagagcaaatttcatctttccaaattgatgggtgggctagtaataaaatatttaaaaaaaaacattcaaaaacatggccacatccaacatttcctcaggcaattccttttgattcttttttcttccccctccatgtagaagagggagaaggagaggctctgaaagctgcttctgggggatttcaagggactgggggtgccaaccacctctggccctgttgtgggggtgtcacagaggcagtggcagcaacaaaggatttgaaacttggtgtgttcgtggagccacaggcagacgatgtcaaccttgtgtgagtgtgacgggggttggggtggggcgggaggccacgggggaggccgaggcaggggctgggcagaggggagaggaagcacaagaagtgggagtgggagaggaagccacgtgctggagagtagacatccccctccttgccgctgggagagccaaggcctatgccacctgcagcgtctgagcggccgcctgtccttggtggccgggggtgggggcctgctgtgggtcagtgtgccaccctctgcagggcagcctgtgggagaagggacagcgggtaaaaagagaaggcaagctggcaggagggtggcacttcgtggatgacctccttagaaaagactgaccttgatgtcttgagagcgctggcctcttcctccctccctgcagggtagggggcctgagttgaggggcttccctctctgctccacagaaaccctgttttattgagttctgaaggttggaactgctgccatgattttggccactttgcagacctgggactttagggctaaccagttctctttgtaaggacttgtgcctcttgggagacgtccacccgtttccaagcctgggccactggcatctctggagtgtgtgggggtctgggaggcaggtcccgagccccctgtccttcccacggccactgcagtcacccctgtctgcgccgctgtgctgttgtctgccgtgagagcccaatcactgcctatacccctcatcacacgtcacaatgtcccgaattcccagcctcaccaccccttctcagtaatgaccctggttggttgcaggaggtacctactccatactgagggtgaaattaagggaaggcaaagtccaggcacaagagtgggaccccagcctctcactctcagttccactcatccaactgggaccctcaccacgaatctcatgatctgattcggttccctgtctcctcctcccgtcacagatgtgagccagggcactgctcagctgtgaccctaggtgtttctgccttgttgacatggagagagccctttcccctgagaaggcctggccccttcctgtgctgagcccacagcagcaggctgggtgtcttggttgtcagtggtggcaccaggatggaagggcaaggcacccagggcaggcccacagtcccgctgtcccccacttgcaccctagcttgtagctgccaacctcccagacagcccagcccgctgctcagctccacatgcatagtatcagccctccacacccgacaaaggggaacacacccccttggaaatggttcttttcccccagtcccagctggaagccatgctgtctgttctgctggagcagctgaacatatacatagatgttgccctgccctccccatctgcaccctgttgagttgtagttggatttgtctgtttatgcttggattcaccagagtgactatgatagtgaaaagaaaaaaaaaaaaaaaaaaggacgcatgtatcttgaaatgcttgtaaagaggtttctaacccaccctcacgaggtgtctctcacccccacactgggactcgtgtggcctgtgtggtgccaccctgctggggcctcccaagttttgaaaggctttcctcagcacctgggacccaacagagaccagcttctagcagctaaggaggccgttcagctgtgacgaaggcctgaagcacaggattaggactgaagcgatgatgtccccttccctacttccccttggggctccctgtgtcagggcacagactaggtcttgtggctggtctggcttgcggcgcgaggatggttctctctggtcatagcccgaagtctcatggcagtcccaaaggaggcttacaactcctgcatcacaagaaaaaggaagccactgccagctggggggatctgcagctcccagaagctccgtgagcctcagccacccctcagactgggttcctctccaagctcgccctctggaggggcagcgcagctcccaccaagggccctgcgaccacagcagggattgggatgaattgcctgtcctggatctgctctagaggcccaagctgcctgcctgaggaaggatgacttgacaagtcaggagacactgttcccaaagccttgaccagagcacctcagcccgctgaccttgcacaaactccatctgctgccatgagaaaagggaagccgcctttgcaaaacattgctgcctaaagaaactcagcagcctcaggcccaattctgccacttctggtttgggtacagttaaaggcaaccctgagggacttggcagtagaaatccagggcctcccctggggctggcagcttcgtgtgcagctagagctttacctgaaaggaagtctctgggcccagaactctccaccaagagcctccctgccgttcgctgagtcccagcaattctcctaagttgaagggatctgagaaggagaaggaaatgtggggtagatttggtggtggttagagatatgcccccctcattactgccaacagtttcggctgcatttcttcacgcacctcggttcctcttcctgaagttcttgtgccctgctcttcagcaccatgggccttcttatacggaaggctctgggatctcccccttgtgggggcaggctcttggggccagcctaagatcatggtttagggtgatcagtgctggcagataaattgaaaaggcacgctggcttgtgatcttaaatgaggacaatccccccagggctgggcactcctcccctcccctcacttctcccacctgcagagccagtgtccttgggtgggctagataggatatactgtatgccggctccttcaagctgctgactcactttatcaatagttccatttaaattgacttcagtggtgagactgtatcctgtttgctattgcttgttgtgctatggggggaggggggaggaatgtgtaagatagttaacatgggcaaagggagatcttggggtgcagcacttaaactgcctcgtaacccttttcatgatttcaaccacatttgctagagggagggagcagccacggagttagaggcccttggggtttctcttttccactgacaggctttcccaggcagctggctagttcattccctccccagccaggtgcaggcgtaggaatatggacatctggttgctttggcctgctgccctctttcaggggtcctaagcccacaatcatgcctccctaagaccttggcatccttccctctaagccgttggcacctctgtgccacctctcacactggctccagacacacagcctgtgcttttggagctgagatcactcgcttcaccctcctcatctttgttctccaagtaaagccacgaggtcggggcgagggcagaggtgatcacctgcgtgtcccatctacagacctgcggcttcataaaacttctgatttctcttcagctttgaaaagggttaccctgggcactggcctagagcctcacctcctaatagacttagccccatgagtttgccatgttgagcaggactatttctggcacttgcaagtcccatgatttcttcggtaattctgagggtggggggagggacatgaaatcatcttagcttagctttctgtctgtgaatgtctatatagtgtattgtgtgttttaacaaatgatttacactgactgttgctgtaaaagtgaatttggaaataaagttattactctgattaaaa

SEQ ID NO: 360300 - DNA, 2037 bp, Homo sapiens
cccgccccctcccctggggaggctcgcgttcccgctgctcgcgcctgccgcccgccggcctcaggaacgcgccctcttcgccggcgcgcgccctcgcagtcaccgccacccaccagctccggcaccaacagcagcgccgctgccaccgcccaccttctgccgccgccaccacagccaccttctcctcctccgctgtcctctcccgtcctcgcctctgtcgactatcaggtgaactttgaaccaggatggctgagccccgccaggagttcgaagtgatggaagatcacgctgggacgtacgggttgggggacaggaaagatcaggggggctacaccatgcaccaagaccaagagggtgacacggacgctggcctgaaagctgaagaagcaggcattggagacacccccagcctggaagacgaagctgctggtcacgtgacccaagctcgcatggtcagtaaaagcaaagacgggactggaagcgatgacaaaaaagccaagggggctgatggtaaaacgaagatcgccacaccgcggggagcagcccctccaggccagaagggccaggccaacgccaccaggattccagcaaaaaccccgcccgctccaaagacaccacccagctctggtgaacctccaaaatcaggggatcgcagcggctacagcagccccggctccccaggcactcccggcagccgctcccgcaccccgtcccttccaaccccacccacccgggagcccaagaaggtggcagtggtccgtactccacccaagtcgccgtcttccgccaagagccgcctgcagacagcccccgtgcccatgccagacctgaagaatgtcaagtccaagatcggctccactgagaacctgaagcaccagccgggaggcgggaaggtgcaaatagtctacaaaccagttgacctgagcaaggtgacctccaagtgtggctcattaggcaacatccatcataaaccaggaggtggccaggtggaagtaaaatctgagaagcttgacttcaaggacagagtccagtcgaagattgggtccctggacaatatcacccacgtccctggcggaggaaataaaaagattgaaacccacaagctgaccttccgcgagaacgccaaagccaagacagaccacggggcggagatcgtgtacaagtcgccagtggtgtctggggacacgtctccacggcatctcagcaatgtctcctccaccggcagcatcgacatggtagactcgccccagctcgccacgctagctgacgaggtgtctgcctccctggccaagcagggtttgtgatcaggcccctggggcggtcaataattgtggagaggagagaatgagagagtgtggaaaaaaaaagaataatgacccggcccccgccctctgcccccagctgctcctcgcagttcggttaattggttaatcacttaacctgcttttgtcactcggctttggctcgggacttcaaaatcagtgatgggagtaagagcaaatttcatctttccaaattgatgggtgggctagtaataaaatatttaaaaaaaaacattcaaaaacatggccacatccaacatttcctcaggcaattccttttgattcttttttcttccccctccatgtagaagagggagaaggagaggctctgaaagctgcttctgggggatttcaagggactgggggtgccaaccacctctggccctgttgtgggggtgtcacagaggcagtggcagcaacaaaggatttgaaacttggtgtgttcgtggagccacaggcagactggcctagagcctcacctcctaatagacttagccccatgagtttgccatgttgagcaggactatttctggcacttgcaagtcccatgatttcttcggtaattctgagggtggggggagggacatgaaatcatcttagcttagctttctgtctgtgaatgtctatatagtgtattgtgtgttttaacaaatgatttacactgactgttgctgtaaaagtgaatttggaaataaagttattactctgattaaaa

SEQ ID NO: 360301 - DNA, 9080 bp, Homo sapiens
gcggagtttcgcgagggccgaagcggggcagtgtgacggcagcggtcctgggaggcgcccgcgcgcgtcggagcagctccccgtcctccgcagccgtcaccgccggccgtcgccgcgccctggcctcccgcactcgcgcactcctgtccgccgcccaccgcccacctcccacctcgatgcggtgccgggctgctgcgtgatggggctgcggagcggcgccctgcggctcgcggcggccgctgctcgcgctgaggtgcgtcggtgcccggccccccgcgcccccgcgcgccgcggctcctgttgacccggtccgcccgtcggtctgcagcgcggctgaggaaacttggctgtaacttcaaaagaagatttgattctttatttctggactgcatatatatatataacaaggccattaaaatgtcgggagcctcagtgaaggtggctgtccgggtaaggcccttcaattctcgagagaccagcaaggaatccaaatgcatcattcagatgcaaggcaactcgaccagtattattaacccaaagaatccaaaggaagctccaaagtccttcagcttcgactattcctactggtctcatacctcacccgaagatccctgttttgcatctcaaaaccgtgtgtacaatgacattggcaaggaaatgctcttacacgcctttgagggatataatgtctgtatttttgcctatgggcagactggtgctggaaaatcttatacaatgatgggtaaacaagaagaaagccaggctggcatcattccacagttatgtgaagaactttttgagaaaatcaatgacaactgtaatgaagaaatgtcttactctgtagaggtgagctacatggaaatttactgtgaaagagtacgagatttgctgaatccaaaaaacaagggtaatttgcgtgtgcgtgaacacccacttcttggaccctatgtggaggatctgtccaagttggcagttacttcctacacagacattgctgacctcatggatgctgggaacaaagccaggacagtggcagctacaaacatgaatgaaacaagtagccgttcccacgctgtgtttacgattgttttcacccagaagaaacacgataatgagaccaacctttccactgagaaggtcagtaaaatcagcttggtggatctagcaggaagtgaacgagctgattcaactggtgccaaagggactcgattaaaggaaggagcaaatattaataagtctcttacaactttgggcaaagtcatttcagccttggccgaggtgagtaaaaagaagaagaaaacagattttattccctacagggattctgtacttacttggctccttcgagaaaatttaggtggcaattctcggactgcaatggttgctgctctgagccccgcggatatcaactacgatgagactttgagcactctgagatatgcagatcgtgcaaaacaaattaaatgcaatgctgttatcaatgaggaccccaatgccaaactggttcgtgaattaaaggaggaggtgacacggctgaaggaccttcttcgtgctcagggcctgggagatattattgatattgatccattgatcgatgattactctggaagtggaagcaaatatctgaaagattttcagaacaataagcatagatacttgctagcctctgagaatcaacgccctggccatttttccacagcatccatggggtccctcacttcatccccatcttcctgctcactcagtagtcaggtgggcttgacgtctgtgaccagtattcaagagaggatcatgtctacacctggaggagaggaagctattgaacgtttaaaggaatcagagaagatcattgctgagttgaatgaaacttgggaagagaagcttcgtaaaacagaggccatcagaatggagagagaggctttgttggctgagatgggagttgccattcgggaagatggaggaaccctaggggttttctcacctaaaaagaccccacatcttgttaacctcaatgaagacccactaatgtctgagtgcctactttattacatcaaagatggaattacaagggttggccaagcagatgctgagcggcgccaggacatagtgctgagcggggctcacattaaagaagagcattgtatcttccggagtgagagaagcaacagcggggaagttatcgtgaccttagagccctgtgagcgctcagaaacctacgtaaatggcaagagggtgtcccagcctgttcagctgcgctcaggaaaccgtatcatcatgggtaaaaaccatgttttccgctttaaccacccggaacaagcacgagctgagcgagagaagactccttctgctgagaccccctctgagcctgtggactggacatttgcccagagggagcttctggaaaaacaaggaattgatatgaaacaagagatggagaaaaggctacaggaaatggagatcttatacaaaaaggagaaggaagaagcagatcttcttttggagcagcagagactggactatgagagtaaattgcaggccttgcagaagcaggttgaaacccgatctctggctgcagaaacaactgaagaggaggaagaagaggaagaagttccttggacacagcatgaatttgagttggcccaatgggccttccggaaatggaagtctcatcagtttacttcattacgggacttactctggggcaatgccgtgtacctaaaggaggccaatgccatcagtgtggaactgaaaaagaaggtgcagtttcagtttgttctgctgactgacacactgtactcccctttgcctcctgaattacttcccactgagatggaaaaaactcatgaggacaggcctttccctcgcacagtggtagcagtagaagtccaggatttgaagaatggagcaacacactattggtctttggagaaactcaagcagaggctggatttgatgcgagagatgtatgatagggcaggggagatggcctccagtgcccaagacgaaagcgaaaccactgtgactggcagcgatcccttctatgatcggttccactggttcaaacttgtggggagctcccccattttccacggctgtgtgaacgagcgccttgccgaccgcacaccctcccccactttttccacggccgattccgacatcactgagctggctgacgagcagcaagatgagatggaggattttgatgatgaggcattcgtggatgacgccggctctgacgcagggacggaggagggatcagatctcttcagtgacgggcatgacccgttttacgaccgatccccttggttcattttagtgggaagggcatttgtttacctgagcaatctgctgtatcccgtgcccctgatccacagggtggccatcgtcagtgagaaaggtgaagtgcggggatttctgcgtgtggctgtacaggccatcgcagcggatgaagaagctcctgattatggctctggaattcgacagtcaggaacagctaaaatatcttttgataatgaatactttaatcagagtgacttttcgtctgttgcaatgactcgttctggtctgtccttggaggagttgaggattgtggaaggacagggtcagagttctgaggtcatcactcctccagaagaaatcagtcgaattaatgacttggatttgaagtcaagcactttgctggatggtaagatggtaatggaagggttttctgaagagattggcaaccacctgaaactgggcagtgccttcactttccgagtaacagtgttgcaggccagtggaatcctcccagagtatgcagatatcttctgtcagttcaactttttgcatcgccatgatgaagcattctccacggagcccctcaaaaacaatggcagaggaagtcccctggccttttatcatgtgcagaatattgcagtggagatcactgaatcatttgtggattacatcaaaaccaagcctattgtatttgaagtctttgggcattatcagcagcacccacttcatctgcaaggacaggagcttaacagtccgcctcagccgtgccgccgattcttccctccacccatgccactgtccaagccagttccagccaccaagttaaacacgatgagcaaaaccagccttggccagagcatgagcaagtatgacctcctggtttggtttgagatcagtgaactggagcctacaggagagtatatcccagctgtggttgaccacacagcaggcttgccttgccaggggacatttttgcttcatcagggcatccagcgaaggatcacagtgaccattatccatgagaaggggagcgagctccattggaaagatgttcgtgaactggtggtaggtcgtattcggaataagcctgaggtggatgaagctgcagttgatgccatcctctccctaaatattatttctgccaagtacctgaagtcttcccacaactctagcaggaccttctaccgctttgaggctgtgtgggatagctctctgcataactcccttcttctgaaccgagtgacaccctatggagaaaagatctacatgaccttgtcggcctacctagagctggatcattgcatccagccggctgtcatcaccaaggatgtgtgcatggtcttctactcccgagatgccaagatctcaccaccacgctctctgcgtagcctctttggcagcggctactcaaagtcaccagattcgaatcgagtcactggcatttacgaactcagcttatgcaaaatgtcagacacaggtagtccaggtatgcagagaaggagaagaaaaatcttagatacgtcagtggcatatgtgcggggagaagagaacttagcaggctggcggccccgtggagacagcctcatccttgagcaccagtgggagctggagaagctggagctcctacatgaggtggaaaaaacccgccactttttgctgctgcgtgagagacttggtgacagcatccccaaatccctgagcgactcgttatcccccagcctcagcagtgggaccctcagcacctccaccagtatctcctctcagatctcaaccactacctttgaaagcgccatcacacctagcgagagcagtggctatgattcaggagacatcgaaagcctggtggaccgagagaaagagctggctaccaagtgcctgcaacttctcacccacactttcaacagagaattcagccaggtgcacggcagcgtcagtgactgtaagttgtctgatatctctccaattggacgggatccctctgagtccagtttcagcagtgccaccctcactccctcctccacctgtccctctctggtagactctaggagcaactctctggatcagaagaccccagaagccaattcccgggcctctagtccctgcccagaatttgaacagtttcagattgtcccagctgtggaaacaccatatttggcccgagcaggaaaaaacgaatttctcaatcttgttccagatattgaagaaattagaccaagctcagtggtctctaagaaaggataccttcatttcaaggagcctctttacagtaactgggctaaacattttgttgtcgtccgtcggccttatgtcttcatctataacagtgacaaagaccctgtggagcgtggaatcattaacctgtccacagcacaggtggagtacagtgaggaccagcaggccatggtgaagacaccaaacacctttgctgtctgcacaaagcaccgtggggtccttttgcaggccctcaatgacaaagacatgaacgactggttgtatgccttcaacccacttctagctggcacaatacgaccaggtcatctggcttccgagatcatcagagaagataagtctgtctctttcagctgccagtaagttttccaggatgagaggggaaaaagaaagcctccagtgacttcagttgctttgccagttgtcttgggattgttttacaccatcctttacttcccttgctcagacctctctgtttcaccattgctcaggcattcaggaaagtatctgctcactcccacttggtgagtcctcggccttgaggttgctgactctcaggcgttaggcagctggatgacttcccgcttcacgcagcaaaggccaggggcttgcgcgcctctgcagagttgttgctagggagacttgtgtcatcatccacaaccttgtttctcacttcctggttgggctcatctctgaagaacaggtctcccagcttcgctccttatcactgcattgtgaagaggaggaaaagtgaatcacggagagagaaaggaaaggatagaatcacaggctgcgtctgcacctgaaaagtgacccgcggaaactctatggcggattttttttttaactttcttcttcctgttaaaacataggtcactaactgtgatgttatttgttttctaagtggtatgtgagattttctaatgtagttagaagtttcattgtctgatggacacaatatgcccttccggttctattcaaaccagcaggatctgtcggtgcttagagatggctgcctggactggaatcaaatctaatttcagggaaatgaagatggaatttgaaggtcacttttaaaattaagtcattgatgctgctgttacagagtgtgacagaggatccatgtctgtgacacaggacggtgggaagcctgagagagagtgaaattatgtgatacactgaaatgacttttgtttttcttctaactcatacaaaactggtttggaaagtctttgctttggaagcgtcagacattagaacaggccaaactggactgtctgttcatagcgtgcctgaataagaaggcctcttagggagccagagggagcagagtggtcgtgtcctgcgtgctcttcaccctctggggcgcccctgctgcggctggcaggtgcagacagcctttgctggtccccagcacgtccagggtgggtgctcccttgcccgacagaaccatccccactgtgaggctgtgagagatttgtggcaggaactgtttatgaggctctagttgttgctgttgtggcgggaaagttaagaaacatagcccttaaggaaaccacctttatgtattttcttaaagcacgcctttaaataagcaaaaactttaaaaggcaggaaagagaattcttaggcaaattcagagaaataagtgctagttaatactaatcacctcctcctctgtctctcatcctcctttctcccatcaaagcaaaatatggcctcaccaccagccccaaatcagtgctcagaccctctctgtgtctgtgtgccctcctgggagtcagtcagcgctcaggccaggactgtgcagggccagccagcccatgcgctagtcaggagcacaggcaaggggtgcttgtggcagtggccgggcacctgagccccagctcgttgttaaacgtgctgacggcaaggggcaatggagtgagtttcccaactaagaaaccactattatatattttttcccttcagtcacatagacttcagacaactctcctattttttatggatttttcagctcatttcagatgaaggaactaagtcattgtgaactgtctcttgagatctaaaaacaagatgacttttcctggcacatattccaaagcaaagactttgttgcctgctgcttattgtctaatttacagggatatttaattttgtcaggtctatgtatatttatccagctatacttacttgcacagtggattggagagaaaggattctccagtgtgcacactcatcggtactctttctgcatttccctcgtgctgtgtcccgctcgggttccaatggacagtatcagggcttgtttgacttaggtctttcagttttcctttcggttcccttttaaaaatgtgattgttaacctgcctcttgaaagattcaaccgggtgtggtggctcacgcctgtaatcccagcacattgggaggccaaggcaggtggatcacctgaggtcagaagtttgagaccagcctggccaacatggtgaaaccccgtctctactaaaaatacaaaaagtagccaggcgtggtggcgtgtgcctgtagtcccagctacttgggaggctgaggcaggagaatagcttgaacctgggaggtggaggctgcagtgagttgagactgcaccattgcactccagcctgggtgacaaagcaggactccgtctcaaaaaaaaagaaaagattcatgatgctgctgctcccagaaggtttgctggatgtgtttacataggactctaacttgtgtgcactacagttgttcaccagggccagtgattcaccccagtgtgtggccagaccatgactgtgtagcaggaatgttttaatttgtgcttccttagtaaattgaaatatcagctgagagattatttgctgctgttattcaaaaggccatttatgaagttagtatttgagccccataagatctttaaaaagcctccaatcatttaaaggaagaaatcagagttgctataaaattcagtaaaaagctcatagccaaacggctgtgctcagatggaaagtctgagctgaggttggtctcttgccaaaccgtggctgttgtgtgttgttcttcatgtcttcgagttcattttttttcattctgcctattctggcatcagctcacttgaggagtccctcagccttcttgtatttaaggcatcgtcttagactttgtggctctaaagtacctgtctgttgagatttcaagtctcttgtcaccatcctcacacatgacaacaaaacccataatgcataagtggcctttttgaaccaagactttgcaaactgatctctcccccgtgaaggagttgagcacattagcaacaatgtacattaattttggattttcattttcatgttttattttgtaaatattatctgatgtttggagcttgagtatacagactgtaaatatagttcttgtatttgtactaattctgattcttttgctgtatagccttagatgtgcaatgcagacactatctaactgtgtgtggtaaccttgcgtcacggagctgttagtgaacgaggtaaaaataataaaggtacagccagtgcatcagaaaaaaacga

SEQ ID NO: 360302 - DNA, 1017 bp, Homo sapiens
tatcttctgtgtgtcgagacctgtgggaaaacgcttgctgtctgggggagagaggcatataaatacattattacagtgaaatcattgctattaaggaaaaaaacattactagtaatgtgggaacacaaagctgccagggtaagtcaggaaagactgcctggaagaggtgacatttgaatccacaacagactcttatgtaactatgccatccacaggctctcgcactaactgtggaagcttgagtctgctaaattttgtctgtacaaaatgacattgtttttatttttagtaaaaagcttttacaaaggaagaggagttaattgaatgtacttcttcactctctctaaagcattcttgcatatacctccatatagctaagtgatcagggtcagttaatttttcagtcatttttgaaataaaatctaaaatgccctctgtgcaatatggaaaaggttcttgacaaggaaagtaaataacttaaagaatctgcttaagtggaatgcttctttctgtaggatccacattgggctcttgaaagagattctgataaaaccgtttaatgcattgttcacgagtctttttattttttttatgaagctttttgcatcgccatgatgaagcattctccacggagcccctcaaaaacaatggcagaggaagtcccctggccttttatcatgtgcagaattaagtgacatggacctttttgccaaacatatgtttttctggtaccttggctttctcagcccgggaagggtgataagaagaggtacaagtcactggctgtgcagggggagagtagacaatagagggcgtggctagagtggtgaggtcatccacagcggcctgagcagcaagccttcttgtctgtgttacagtgggcctagtgaatgtgggttcgtcttgccaataaaatcttccatcagtttgaatgccaatgagttgttttagtgtttctgtcctagaaaaataagcatgcttaataagagttttattaaagtgaatgcattgtccttt

SEQ ID NO: 360303 - DNA, 941 bp, Homo sapiens
tatcttctgtgtgtcgagacctgtgggaaaacgcttgctgtctgggggagagaggcatataaatacattattacagtgaaatcattgctattaaggaaaaaaacattactagtaatgtgggaacacaaagctgccagggtaagtcaggaaagactgcctggaagaggtgacatttgaatccacaacagactcttatgtaactatgccatccacaggctctcgcactaactgtggaagcttgagtctgctaaattttgtctgtacaaaatgacattgtttttatttttagtaaaaagcttttacaaaggaagaggagttaattgaatgtacttcttcactctctctaaagcattcttgcatatacctccatatagctaagtgatcagggtcagttaatttttcagtcatttttgaaataaaatctaaaatgccctctgtgcaatatggaaaaggttcttgacaaggaaagtaaataacttaaagaatctgcttaagtggaatgcttctttctgtaggatccacattgggctcttgaaagagattctgataaaaccgtttaatgcattgttcacgagtctttttattttttttatgaagctttttgcatcgccatgatgaagcattctccacggagcccctcaaataagtgacatggacctttttgccaaacatatgtttttctggtaccttggctttctcagcccgggaagggtgataagaagaggtacaagtcactggctgtgcagggggagagtagacaatagagggcgtggctagagtggtgaggtcatccacagcggcctgagcagcaagccttcttgtctgtgttacagtgggcccattcgactgggctctcgctggccacaaccacctccatcacctcgaacgccccccatcgttcacgcgtcctccctctactccctatctccccctacaccccg

SEQ ID NO: 360304 - DNA, 887 bp, Homo sapiens
tatcttctgtgtgtcgagacctgtgggaaaacgcttgctgtctgggggagagaggcatataaatacattattacagtgaaatcattgctattaaggaaaaaaacattactagtaatgtgggaacacaaagctgccagggtaagtcaggaaagactgcctggaagaggtgacatttgaatccacaacagactcttatgtaactatgccatccacaggctctcgcactaactgtggaagcttgagtctgctaaattttgtctgtacaaaatgacattgtttttatttttagtaaaaagcttttacaaaggaagaggagttaattgaatgtacttcttcactctctctaaagcattcttgcatatacctccatatagctaagtgatcagggtcagttaatttttcagtcatttttgaaataaaatctaaaatgccctctgtgcaatatggaaaaggttcttgacaaggaaagtaaataacttaaagaatctgcttaagtggaatgcttctttctgtaggatccacattgggctcttgaaagagattctgataaaaccgtttaatgcattgttcacgagtctttttattttttttatgaagctttttgcatcgccatgatgaagcattctccacggagcccctcaaaaacaatggcagaggaagtcccctggccttttatcatgtgcagaattaagtgacatggacctttttgccaaacatatgtttttctggtaccttggctttctcagcccgggaagggtgataagaagaggtacaagtcactggctgtgcagggggagagtagacaatagagggcgtggctagagtggtgaggtcatccacagcggctcggccttcataatttgatgcatgagtggtaagggttcgcc

SEQ ID NO: 360305 - DNA, 10269 bp, Homo sapiens
gcggagtttcgcgagggccgaagcggggcagtgtgacggcagcggtcctgggaggcgcccgcgcgcgtcggagcagctccccgtcctccgcagccgtcaccgccggccgtcgccgcgccctggcctcccgcactcgcgcactcctgtccgccgcccaccgcccacctcccacctcgatgcggtgccgggctgctgcgtgatggggctgcggagcggcgccctgcggctcgcggcggccgctgctcgcgctgaggtgcgtcggtgcccggccccccgcgcccccgcgcgccgcggctcctgttgacccggtccgcccgtcggtctgcagcgcggctgaggaaacttggctgtaacttcaaaagaagatttgattctttatttctggactgcatatatatatataacaaggccattaaaatgtcgggagcctcagtgaaggtggctgtccgggtaaggcccttcaattctcgagagaccagcaaggaatccaaatgcatcattcagatgcaaggcaactcgaccagtattattaacccaaagaatccaaaggaagctccaaagtccttcagcttcgactattcctactggtctcatacctcacccgaagatccctgttttgcatctcaaaaccgtgtgtacaatgacattggcaaggaaatgctcttacacgcctttgagggatataatgtctgtatttttgcctatgggcagactggtgctggaaaatcttatacaatgatgggtaaacaagaagaaagccaggctggcatcattccacagttatgtgaagaactttttgagaaaatcaatgacaactgtaatgaagaaatgtcttactctgtagaggtgagctacatggaaatttactgtgaaagagtacgagatttgctgaatccaaaaaacaagggtaatttgcgtgtgcgtgaacacccacttcttggaccctatgtggaggatctgtccaagttggcagttacttcctacacagacattgctgacctcatggatgctgggaacaaagccaggacagtggcagctacaaacatgaatgaaacaagtagccgttcccacgctgtgtttacgattgttttcacccagaagaaacacgataatgagaccaacctttccactgagaaggtcagtaaaatcagcttggtggatctagcaggaagtgaacgagctgattcaactggtgccaaagggactcgattaaaggaaggagcaaatattaataagtctcttacaactttgggcaaagtcatttcagccttggccgaggtgagtaaaaagaagaagaaaacagattttattccctacagggattctgtacttacttggctccttcgagaaaatttaggtggcaattctcggactgcaatggttgctgctctgagccccgcggatatcaactacgatgagactttgagcactctgagatatgcagatcgtgcaaaacaaattaaatgcaatgctgttatcaatgaggaccccaatgccaaactggttcgtgaattaaaggaggaggtgacacggctgaaggaccttcttcgtgctcagggcctgggagatattattgatacatccatggggtccctcacttcatccccatcttcctgctcactcagtagtcaggtgggcttgacgtctgtgaccagtattcaagagaggatcatgtctacacctggaggagaggaagctattgaacgtttaaaggaatcagagaagatcattgctgagttgaatgaaacttgggaagagaagcttcgtaaaacagaggccatcagaatggagagagaggctttgttggctgagatgggagttgccattcgggaagatggaggaaccctaggggttttctcacctaaaaagaccccacatcttgttaacctcaatgaagacccactaatgtctgagtgcctactttattacatcaaagatggaattacaagggttggccaagcagatgctgagcggcgccaggacatagtgctgagcggggctcacattaaagaagagcattgtatcttccggagtgagagaagcaacagcggggaagttatcgtgaccttagagccctgtgagcgctcagaaacctacgtaaatggcaagagggtgtcccagcctgttcagctgcgctcaggaaaccgtatcatcatgggtaaaaaccatgttttccgctttaaccacccggaacaagcacgagctgagcgagagaagactccttctgctgagaccccctctgagcctgtggactggacatttgcccagagggagcttctggaaaaacaaggaattgatatgaaacaagagatggagaaaaggctacaggaaatggagatcttatacaaaaaggagaaggaagaagcagatcttcttttggagcagcagagactggactatgagagtaaattgcaggccttgcagaagcaggttgaaacccgatctctggctgcagaaacaactgaagaggaggaagaagaggaagaagttccttggacacagcatgaatttgagttggcccaatgggccttccggaaatggaagtctcatcagtttacttcattacgggacttactctggggcaatgccgtgtacctaaaggaggccaatgccatcagtgtggaactgaaaaagaaggtgcagtttcagtttgttctgctgactgacacactgtactcccctttgcctcctgaattacttcccactgagatggaaaaaactcatgaggacaggcctttccctcgcacagtggtagcagtagaagtccaggatttgaagaatggagcaacacactattggtctttggagaaactcaagcagaggctggatttgatgcgagagatgtatgatagggcaggggagatggcctccagtgcccaagacgaaagcgaaaccactgtgactggcagcgatcccttctatgatcggttccactggttcaaacttgtggggagctcccccattttccacggctgtgtgaacgagcgccttgccgaccgcacaccctcccccactttttccacggccgattccgacatcactgagctggctgacgagcagcaagatgagatggaggattttgatgatgaggcattcgtggatgacgccggctctgacgcagggacggaggagggatcagatctcttcagtgacgggcatgacccgttttacgaccgatccccttggttcattttagtgggaagggcatttgtttacctgagcaatctgctgtatcccgtgcccctgatccacagggtggccatcgtcagtgagaaaggtgaagtgcggggatttctgcgtgtggctgtacaggccatcgcagcggatgaagaagctcctgattatggctctggaattcgacagtcaggaacagctaaaatatcttttgataatgaatactttaatcagagtgacttttcgtctgttgcaatgactcgttctggtctgtccttggaggagttgaggattgtggaaggacagggtcagagttctgaggtcatcactcctccagaagaaatcagtcgaattaatgacttggatttgaagtcaagcactttgctggatggtaagatggtaatggaagggttttctgaagagattggcaaccacctgaaactgggcagtgccttcactttccgagtaacagtgttgcaggccagtggaatcctcccagagtatgcagatatcttctgtcagttcaactttttgcatcgccatgatgaagcattctccacggagcccctcaaaaacaatggcagaggaagtcccctggccttttatcatgtgcagaatattgcagtggagatcactgaatcatttgtggattacatcaaaaccaagcctattgtatttgaagtctttgggcattatcagcagcacccacttcatctgcaaggacaggagcttaacagtccgcctcagccgtgccgccgattcttccctccacccatgccactgtccaagccagttccagccaccaagttaaacacgatgagcaaaaccagccttggccagagcatgagcaagtatgacctcctggtttggtttgagatcagtgaactggagcctacaggagagtatatcccagctgtggttgaccacacagcaggcttgccttgccaggggacatttttgcttcatcagggcatccagcgaaggatcacagtgaccattatccatgagaaggggagcgagctccattggaaagatgttcgtgaactggtggtaggtcgtattcggaataagcctgaggtggatgaagctgcagttgatgccatcctctccctaaatattatttctgccaagtacctgaagtcttcccacaactctagcaggaccttctaccgctttgaggctgtgtgggatagctctctgcataactcccttcttctgaaccgagtgacaccctatggagaaaagatctacatgaccttgtcggcctacctagagctggatcattgcatccagccggctgtcatcaccaaggatgtgtgcatggtcttctactcccgagatgccaagatctcaccaccacgctctctgcgtagcctctttggcagcggctactcaaagtcaccagattcgaatcgagtcactggcatttacgaactcagcttatgcaaaatgtcagacacaggtagtccaggtatgcagagaaggagaagaaaaatcttagatacgtcagtggcatatgtgcggggagaagagaacttagcaggctggcggccccgtggagacagcctcatccttgagcaccagtgggagctggagaagctggagctcctacatgaggtggaaaaaacccgccactttttgctgctgcgtgagagacttggtgacagcatccccaaatccctgagcgactcgttatcccccagcctcagcagtgggaccctcagcacctccaccagtatctcctctcagatctcaaccactacctttgaaagcgccatcacacctagcgagagcagtggctatgattcaggagacatcgaaagcctggtggaccgagagaaagagctggctaccaagtgcctgcaacttctcacccacactttcaacagagaattcagccaggtgcacggcagcgtcagtgactgtaagttgtctgatatctctccaattggacgggatccctctgagtccagtttcagcagtgccaccctcactccctcctccacctgtccctctctggtagactctaggagcaactctctggatcagaagaccccagaagccaattcccgggcctctagtccctgcccagaatttgaacagtttcagattgtcccagctgtggaaacaccatatttggcccgagcaggaaaaaacgaatttctcaatcttgttccagatattgaagaaattagaccaagctcagtggtctctaagaaaggataccttcatttcaaggagcctctttacagtaactgggctaaacattttgttgtcgtccgtcggccttatgtcttcatctataacagtgacaaagaccctgtggagcgtggaatcattaacctgtccacagcacaggtggagtacagtgaggaccagcaggccatggtgaagacaccaaacacctttgctgtctgcacaaagcaccgtggggtccttttgcaggccctcaatgacaaagacatgaacgactggttgtatgccttcaacccacttctagctggcacaatacggtcaaagctttcccgcagatgcccgagccagtcgaaatactaagtgactctgccgagtgccctcactcgccttcgagagataaagaaagcgttacctctcatttctctttgtgattcttgacggtgactcttgtatgtaatcctgtggcttaactacttctccctccttgtccagcacttttctagctctcccgttccccatctccattgctctgtactcttttcttttttcttgtgctgagaatctcgttagtagcatgtggcctaacaaaaggaaaaaatgtttttaaacacacacacacacacacacacacacacacacatacacagacaaaaacacaaaaactctgaggggatctggtgaatctccaaattattgtgggtgtactttggcttccttttgtatgataggtccccatcatgaccacctctgatgtctgtgctgctgtcaccaggcacctttgtttttcaagacaacatactttttttttcttttctctgtttgtgatatcactttaatttttcttgggtggcttagagactaagggaggagacatctggcctttttagaacctgagaggaaaaaaagagtctttttttcccctctgtctctttttgccatggctaatccctgcatttccattcagggaaaaggtggtagtgagcatagaactgcaacagttatattctgagtcaaagttggggctttttacggcataattatggaatttttatttactggtagagaggagacgagaggctttttcagtgggcctgggacagtggctgctcttgactttgtgtgaagggaaatgccaaggatgcttctggtggacttcaggggaccccagggtttggccgtgggccgtgatggcagcaggcggtgggatgcttgtagctcctcacagcaggattcctgcccactgttttttctctgttgggagggaagctcttttctaggagtgtctcagttctgcttttggcattagtgatggtggtggtacagttggaattagtgccatgtcatacacaaatgttccacaaggcgggagtgtttcactttctggtgataaacttgatggtcattgttatgattaagataatgccgggcaggccgggcacagtggctcacgcctgtaatccaagcacttggggaggccgaggcgggcagatcacgagatcaggagttcaagaccagcctggccaatatgatgaaaccccgtctctactaaaaatacaaaattagtcgggtatggtggcacatgcctgtaattccagctgcttgggagcctgaggcaggagaactgcttgaacccaggaggcagaggttgcagtgagccaagatcgcgctattgcactccagcctgggtgacagagcaagactctgcctcagaaaaaaaaaaaaaaataataatgctgggtagtgaccttgtgattgttacagctccctttgatcaaagaaatatagctttcaggcataaacctggaagtctccctctgaatccagcagttgttttcattgatgcttgtcaggttgaagatgctttcagtgatgctctctatactcataaataagcaaatgtggcaggctttgctttctggatcccaggattaaaactaaccgtgaccactactccaaacaaaacacaatatgcctaggggcacggatgaacgtccagggagcccgggccccaggctttgttgcgtgttccctgctcctctccatctggtgtggaaacactgcccagggagaaaggaggaagctcactgtggacagtcttctttccttctgacagaccaggtcatctggcttccgagatcatcagagaagataagtctgtctctttcagctgccagtaagttttccaggatgagaggggaaaaagaaagcctccagtgacttcagttgctttgccagttgtcttgggattgttttacaccatcctttacttcccttgctcagacctctctgtttcaccattgctcaggcattcaggaaagtatctgctcactcccacttggtgagtcctcggccttgaggttgctgactctcaggcgttaggcagctggatgacttcccgcttcacgcagcaaaggccaggggcttgcgcgcctctgcagagttgttgctagggagacttgtgtcatcatccacaaccttgtttctcacttcctggttgggctcatctctgaagaacaggtctcccagcttcgctccttatcactgcattgtgaagaggaggaaaagtgaatcacggagagagaaaggaaaggatagaatcacaggctgcgtctgcacctgaaaagtgacccgcggaaactctatggcggattttttttttaactttcttcttcctgttaaaacataggtcactaactgtgatgttatttgttttctaagtggtatgtgagattttctaatgtagttagaagtttcattgtctgatggacacaatatgcccttccggttctattcaaaccagcaggatctgtcggtgcttagagatggctgcctggactggaatcaaatctaatttcagggaaatgaagatggaatttgaaggtcacttttaaaattaagtcattgatgctgctgttacagagtgtgacagaggatccatgtctgtgacacaggacggtgggaagcctgagagagagtgaaattatgtgatacactgaaatgacttttgtttttcttctaactcatacaaaactggtttggaaagtctttgctttggaagcgtcagacattagaacaggccaaactggactgtctgttcatagcgtgcctgaataagaaggcctcttagggagccagagggagcagagtggtcgtgtcctgcgtgctcttcaccctctggggcgcccctgctgcggctggcaggtgcagacagcctttgctggtccccagcacgtccagggtgggtgctcccttgcccgacagaaccatccccactgtgaggctgtgagagatttgtggcaggaactgtttatgaggctctagttgttgctgttgtggcgggaaagttaagaaacatagcccttaaggaaaccacctttatgtattttcttaaagcacgcctttaaataagcaaaaactttaaaaggcaggaaagagaattcttaggcaaattcagagaaataagtgctagttaatactaatcacctcctcctctgtctctcatcctcctttctcccatcaaagcaaaatatggcctcaccaccagccccaaatcagtgctcagaccctctctgtgtctgtgtgccctcctgggagtcagtcagcgctcaggccaggactgtgcagggccagccagcccatgcgctagtcaggagcacaggcaaggggtgcttgtggcagtggccgggcacctgagccccagctcgttgttaaacgtgctgacggcaaggggcaatggagtgagtttcccaactaagaaaccactattatatattttttcccttcagtcacatagacttcagacaactctcctattttttatggatttttcagctcatttcagatgaaggaactaagtcattgtgaactgtctcttgagatctaaaaacaagatgacttttcctggcacatattccaaagcaaagactttgttgcctgctgcttattgtctaatttacagggatatttaattttgtcaggtctatgtatatttatccagctatacttacttgcacagtggattggagagaaaggattctccagtgtgcacactcatcggtactctttctgcatttccctcgtgctgtgtcccgctcgggttccaatggacagtatcagggcttgtttgacttaggtctttcagttttcctttcggttcccttttaaaaatgtgattgttaacctgcctcttgaaagattcaaccgggtgtggtggctcacgcctgtaatcccagcacattgggaggccaaggcaggtggatcacctgaggtcagaagtttgagaccagcctggccaacatggtgaaaccccgtctctactaaaaatacaaaaagtagccaggcgtggtggcgtgtgcctgtagtcccagctacttgggaggctgaggcaggagaatagcttgaacctgggaggtggaggctgcagtgagttgagactgcaccattgcactccagcctgggtgacagagtgtaaccttgtccccaccgtgcctcccctcaagaagattttcgtatgtgcaaaaacactgccaggctaggaaaacaaagtccttaaatagcttaatttgaagttagggttattccctatgactgctaacaggtggccatatttttcagtagaaagttagtcacaagatatttgttgagcacattcgacctctttcccattgggtatgattgtatcgtctcatctctgaagcttgcttgctgaaaaccatttgtcaatggtttattctttctattcaggtgcagtttcagtttgttctgctgactgacacactgtactcccctttgcctcctgaattacttcccactgagatggaaaaaactcatgaggacaggcctttccctcgcacagtggtagcagtagaagtccaggatttgaagaatggagcaacacac

SEQ ID NO: 360306 - DNA, 6957 bp, Homo sapiens
ttatgtacattatgttagtggatcttcatgattgcttttcaagatagtaggctaaatattagggtctacagtttataaatgaggagacagactcccagaggttaagcagcttaactaaagtcacatagcatcagtacagttaagaatatggagtttaaatctggccggttccagccaccaagttaaacacgatgagcaaaaccagccttggccagagcatgagcaagtatgacctcctggtttggtttgagatcagtgaactggagcctacaggagagtatatcccagctgtggttgaccacacagcaggcttgccttgccaggggacatttttgcttcatcagggcatccagcgaaggatcacagtgaccattatccatgagaaggggagcgagctccattggaaagatgttcgtgaactggtggtaggtcgtattcggaataagcctgaggtggatgaagctgcagttgatgccatcctctccctaaatattatttctgccaagtacctgaagtcttcccacaactctagcaggaccttctaccgctttgaggctgtgtgggatagctctctgcataactcccttcttctgaaccgagtgacaccctatggagaaaagatctacatgaccttgtcggcctacctagagctggatcattgcatccagccggctgtcatcaccaaggatgtgtgcatggtcttctactcccgagatgccaagatctcaccaccacgctctctgcgtagcctctttggcagcggctactcaaagtcaccagattcgaatcgagtcactggcatttacgaactcagcttatgcaaaatgtcagacacaggtagtccaggtatgcagagaaggagaagaaaaatcttagatacgtcagtggcatatgtgcggggagaagagaacttagcaggctggcggccccgtggagacagcctcatccttgagcaccagtgggagctggagaagctggagctcctacatgaggtggaaaaaacccgccactttttgctgctgcgtgagagacttggtgacagcatccccaaatccctgagcgactcgttatcccccagcctcagcagtgggaccctcagcacctccaccagtatctcctctcagatctcaaccactacctttgaaagcgccatcacacctagcgagagcagtggctatgattcaggagacatcgaaagcctggtggaccgagagaaagagctggctaccaagtgcctgcaacttctcacccacactttcaacagagaattcagccaggtgcacggcagcgtcagtgactgtaagttgtctgatatctctccaattggacgggatccctctgagtccagtttcagcagtgccaccctcactccctcctccacctgtccctctctggtagactctaggagcaactctctggatcagaagaccccagaagccaattcccgggcctctagtccctgcccagaatttgaacagtttcagattgtcccagctgtggaaacaccatatttggcccgagcaggaaaaaacgaatttctcaatcttgttccagatattgaagaaattagaccaagctcagtggtctctaagaaaggataccttcatttcaaggagcctctttacagtaactgggctaaacattttgttgtcgtccgtcggccttatgtcttcatctataacagtgacaaagaccctgtggagcgtggaatcattaacctgtccacagcacaggtggagtacagtgaggaccagcaggccatggtgaagacaccaaacacctttgctgtctgcacaaagcaccgtggggtccttttgcaggccctcaatgacaaagacatgaacgactggttgtatgccttcaacccacttctagctggcacaatacggtcaaagctttcccgcagatgcccgagccagtcgaaatactaagtgactctgccgagtgccctcactcgccttcgagagataaagaaagcgttacctctcatttctctttgtgattcttgacggtgactcttgtatgtaatcctgtggcttaactacttctccctccttgtccagcacttttctagctctcccgttccccatctccattgctctgtactcttttcttttttcttgtgctgagaatctcgttagtagcatgtggcctaacaaaaggaaaaaatgtttttaaacacacacacacacacacacacacacacacacatacacagacaaaaacacaaaaactctgaggggatctggtgaatctccaaattattgtgggtgtactttggcttccttttgtatgataggtccccatcatgaccacctctgatgtctgtgctgctgtcaccaggcacctttgtttttcaagacaacatactttttttttcttttctctgtttgtgatatcactttaatttttcttgggtggcttagagactaagggaggagacatctggcctttttagaacctgagaggaaaaaaagagtctttttttcccctctgtctctttttgccatggctaatccctgcatttccattcagggaaaaggtggtagtgagcatagaactgcaacagttatattctgagtcaaagttggggctttttacggcataattatggaatttttatttactggtagagaggagacgagaggctttttcagtgggcctgggacagtggctgctcttgactttgtgtgaagggaaatgccaaggatgcttctggtggacttcaggggaccccagggtttggccgtgggccgtgatggcagcaggcggtgggatgcttgtagctcctcacagcaggattcctgcccactgttttttctctgttgggagggaagctcttttctaggagtgtctcagttctgcttttggcattagtgatggtggtggtacagttggaattagtgccatgtcatacacaaatgttccacaaggcgggagtgtttcactttctggtgataaacttgatggtcattgttatgattaagataatgccgggcaggccgggcacagtggctcacgcctgtaatccaagcacttggggaggccgaggcgggcagatcacgagatcaggagttcaagaccagcctggccaatatgatgaaaccccgtctctactaaaaatacaaaattagtcgggtatggtggcacatgcctgtaattccagctgcttgggagcctgaggcaggagaactgcttgaacccaggaggcagaggttgcagtgagccaagatcgcgctattgcactccagcctgggtgacagagcaagactctgcctcagaaaaaaaaaaaaaaataataatgctgggtagtgaccttgtgattgttacagctccctttgatcaaagaaatatagctttcaggcataaacctggaagtctccctctgaatccagcagttgttttcattgatgcttgtcaggttgaagatgctttcagtgatgctctctatactcataaataagcaaatgtggcaggctttgctttctggatcccaggattaaaactaaccgtgaccactactccaaacaaaacacaatatgcctaggggcacggatgaacgtccagggagcccgggccccaggctttgttgcgtgttccctgctcctctccatctggtgtggaaacactgcccagggagaaaggaggaagctcactgtggacagtcttctttccttctgacagaccaggtcatctggcttccgagatcatcagagaagataagtctgtctctttcagctgccagtaagttttccaggatgagaggggaaaaagaaagcctccagtgacttcagttgctttgccagttgtcttgggattgttttacaccatcctttacttcccttgctcagacctctctgtttcaccattgctcaggcattcaggaaagtatctgctcactcccacttggtgagtcctcggccttgaggttgctgactctcaggcgttaggcagctggatgacttcccgcttcacgcagcaaaggccaggggcttgcgcgcctctgcagagttgttgctagggagacttgtgtcatcatccacaaccttgtttctcacttcctggttgggctcatctctgaagaacaggtctcccagcttcgctccttatcactgcattgtgaagaggaggaaaagtgaatcacggagagagaaaggaaaggatagaatcacaggctgcgtctgcacctgaaaagtgacccgcggaaactctatggcggattttttttttaactttcttcttcctgttaaaacataggtcactaactgtgatgttatttgttttctaagtggtatgtgagattttctaatgtagttagaagtttcattgtctgatggacacaatatgcccttccggttctattcaaaccagcaggatctgtcggtgcttagagatggctgcctggactggaatcaaatctaatttcagggaaatgaagatggaatttgaaggtcacttttaaaattaagtcattgatgctgctgttacagagtgtgacagaggatccatgtctgtgacacaggacggtgggaagcctgagagagagtgaaattatgtgatacactgaaatgacttttgtttttcttctaactcatacaaaactggtttggaaagtctttgctttggaagcgtcagacattagaacaggccaaactggactgtctgttcatagcgtgcctgaataagaaggcctcttagggagccagagggagcagagtggtcgtgtcctgcgtgctcttcaccctctggggcgcccctgctgcggctggcaggtgcagacagcctttgctggtccccagcacgtccagggtgggtgctcccttgcccgacagaaccatccccactgtgaggctgtgagagatttgtggcaggaactgtttatgaggctctagttgttgctgttgtggcgggaaagttaagaaacatagcccttaaggaaaccacctttatgtattttcttaaagcacgcctttaaataagcaaaaactttaaaaggcaggaaagagaattcttaggcaaattcagagaaataagtgctagttaatactaatcacctcctcctctgtctctcatcctcctttctcccatcaaagcaaaatatggcctcaccaccagccccaaatcagtgctcagaccctctctgtgtctgtgtgccctcctgggagtcagtcagcgctcaggccaggactgtgcagggccagccagcccatgcgctagtcaggagcacaggcaaggggtgcttgtggcagtggccgggcacctgagccccagctcgttgttaaacgtgctgacggcaaggggcaatggagtgagtttcccaactaagaaaccactattatatattttttcccttcagtcacatagacttcagacaactctcctattttttatggatttttcagctcatttcagatgaaggaactaagtcattgtgaactgtctcttgagatctaaaaacaagatgacttttcctggcacatattccaaagcaaagactttgttgcctgctgcttattgtctaatttacagggatatttaattttgtcaggtctatgtatatttatccagctatacttacttgcacagtggattggagagaaaggattctccagtgtgcacactcatcggtactctttctgcatttccctcgtgctgtgtcccgctcgggttccaatggacagtatcagggcttgtttgacttaggtctttcagttttcctttcggttcccttttaaaaatgtgattgttaacctgcctcttgaaagattcaaccgggtgtggtggctcacgcctgtaatcccagcacattgggaggccaaggcaggtggatcacctgaggtcagaagtttgagaccagcctggccaacatggtgaaaccccgtctctactaaaaatacaaaaagtagccaggcgtggtggcgtgtgcctgtagtcccagctacttgggaggctgaggcaggagaatagcttgaacctgggaggtggaggctgcagtgagttgagactgcaccattgcactccagcctgggtgacaaagcaggactccgtctcaaaaaaaaagaaaagattcatgatgctgctgctcccagaaggtttgctggatgtgtttacataggactctaacttgtgtgcactacagttgttcaccagggccagtgattcaccccagtgtgtggccagaccatgactgtgtagcaggaatgttttaatttgtgcttccttagtaaattgaaatatcagctgagagattatttgctgctgttattcaaaaggccatttatgaagttagtatttgagccccataagatctttaaaaagcctccaatcatttaaaggaagaaatcagagttgctataaaattcagtaaaaagctcatagccaaacggctgtgctcagatggaaagtctgagctgaggttggtctcttgccaaaccgtggctgttgtgtgttgttcttcatgtcttcgagttcattttttttcattctgcctattctggcatcagctcacttgaggagtccctcagccttcttgtatttaaggcatcgtcttagactttgtggctctaaagtacctgtctgttgagatttcaagtctcttgtcaccatcctcacacatgacaacaaaacccataatgcataagtggcctttttgaaccaagactttgcaaactgatctctcccccgtgaaggagttgagcacattagcaacaatgtacattaattttggattttcattttcatgttttattttgtaaatattatctgatgtttggagcttgagtatacagactgtaaatatagttcttgtatttgtactaattctgattcttttgctgtatagccttagatgtgcaatgcagacactatctaactgtgtgtggtaaccttgcgtcacggagctgttagtgaacgaggtaaaaataataaaggtacagccagtgcatcagaaaaaaacga

SEQ ID NO: 360307 - DNA, 7256 bp, Homo sapiens
agactctagagtaccccacgggtgaggtagagctaaaatatctttgataatgaagtactgttacagtcatgagtgacttttcgtctgttgcaatgactcgttctggtctgtccttggaggagttgaggattgtggaaggacagggtcagagttctgaggtcatcactcctccagaagaaatcagtcgaattaatgacttggctttttgcatcgccatgatgaagcattctccacggagcccctcaaaaacaatggcagaggaagtcccctggccttttatcatgtgcagaatattgcagtggagatcactgaatcatttgtggattacatcaaaaccaagcctattgtatttgaagtctttgggcattatcagcagcacccacttcatctgcaaggacaggagcttaacagtccgcctcagccgtgccgccgattcttccctccacccatgccactgtccaagccagttccagccaccaagttaaacacgatgagcaaaaccagccttggccagagcatgagcaagtatgacctcctggtttggtttgagatcagtgaactggagcctacaggagagtatatcccagctgtggttgaccacacagcaggcttgccttgccaggggacatttttgcttcatcagggcatccagcgaaggatcacagtgaccattatccatgagaaggggagcgagctccattggaaagatgttcgtgaactggtggtaggtcgtattcggaataagcctgaggtggatgaagctgcagttgatgccatcctctccctaaatattatttctgccaagtacctgaagtcttcccacaactctagcaggaccttctaccgctttgaggctgtgtgggatagctctctgcataactcccttcttctgaaccgagtgacaccctatggagaaaagatctacatgaccttgtcggcctacctagagctggatcattgcatccagccggctgtcatcaccaaggatgtgtgcatggtcttctactcccgagatgccaagatctcaccaccacgctctctgcgtagcctctttggcagcggctactcaaagtcaccagattcgaatcgagtcactggcatttacgaactcagcttatgcaaaatgtcagacacaggtagtccaggtatgcagagaaggagaagaaaaatcttagatacgtcagtggcatatgtgcggggagaagagaacttagcaggctggcggccccgtggagacagcctcatccttgagcaccagtgggagctggagaagctggagctcctacatgaggtggaaaaaacccgccactttttgctgctgcgtgagagacttggtgacagcatccccaaatccctgagcgactcgttatcccccagcctcagcagtgggaccctcagcacctccaccagtatctcctctcagatctcaaccactacctttgaaagcgccatcacacctagcgagagcagtggctatgattcaggagacatcgaaagcctggtggaccgagagaaagagctggctaccaagtgcctgcaacttctcacccacactttcaacagagaattcagccaggtgcacggcagcgtcagtgactgtaagttgtctgatatctctccaattggacgggatccctctgagtccagtttcagcagtgccaccctcactccctcctccacctgtccctctctggtagactctaggagcaactctctggatcagaagaccccagaagccaattcccgggcctctagtccctgcccagaatttgaacagtttcagattgtcccagctgtggaaacaccatatttggcccgagcaggaaaaaacgaatttctcaatcttgttccagatattgaagaaattagaccaagctcagtggtctctaagaaaggataccttcatttcaaggagcctctttacagtaactgggctaaacattttgttgtcgtccgtcggccttatgtcttcatctataacagtgacaaagaccctgtggagcgtggaatcattaacctgtccacagcacaggtggagtacagtgaggaccagcaggccatggtgaagacaccaaacacctttgctgtctgcacaaagcaccgtggggtccttttgcaggccctcaatgacaaagacatgaacgactggttgtatgccttcaacccacttctagctggcacaatacggtcaaagctttcccgcagatgcccgagccagtcgaaatactaagtgactctgccgagtgccctcactcgccttcgagagataaagaaagcgttacctctcatttctctttgtgattcttgacggtgactcttgtatgtaatcctgtggcttaactacttctccctccttgtccagcacttttctagctctcccgttccccatctccattgctctgtactcttttcttttttcttgtgctgagaatctcgttagtagcatgtggcctaacaaaaggaaaaaatgtttttaaacacacacacacacacacacacacacacacacatacacagacaaaaacacaaaaactctgaggggatctggtgaatctccaaattattgtgggtgtactttggcttccttttgtatgataggtccccatcatgaccacctctgatgtctgtgctgctgtcaccaggcacctttgtttttcaagacaacatactttttttttcttttctctgtttgtgatatcactttaatttttcttgggtggcttagagactaagggaggagacatctggcctttttagaacctgagaggaaaaaaagagtctttttttcccctctgtctctttttgccatggctaatccctgcatttccattcagggaaaaggtggtagtgagcatagaactgcaacagttatattctgagtcaaagttggggctttttacggcataattatggaatttttatttactggtagagaggagacgagaggctttttcagtgggcctgggacagtggctgctcttgactttgtgtgaagggaaatgccaaggatgcttctggtggacttcaggggaccccagggtttggccgtgggccgtgatggcagcaggcggtgggatgcttgtagctcctcacagcaggattcctgcccactgttttttctctgttgggagggaagctcttttctaggagtgtctcagttctgcttttggcattagtgatggtggtggtacagttggaattagtgccatgtcatacacaaatgttccacaaggcgggagtgtttcactttctggtgataaacttgatggtcattgttatgattaagataatgccgggcaggccgggcacagtggctcacgcctgtaatccaagcacttggggaggccgaggcgggcagatcacgagatcaggagttcaagaccagcctggccaatatgatgaaaccccgtctctactaaaaatacaaaattagtcgggtatggtggcacatgcctgtaattccagctgcttgggagcctgaggcaggagaactgcttgaacccaggaggcagaggttgcagtgagccaagatcgcgctattgcactccagcctgggtgacagagcaagactctgcctcagaaaaaaaaaaaaaaataataatgctgggtagtgaccttgtgattgttacagctccctttgatcaaagaaatatagctttcaggcataaacctggaagtctccctctgaatccagcagttgttttcattgatgcttgtcaggttgaagatgctttcagtgatgctctctatactcataaataagcaaatgtggcaggctttgctttctggatcccaggattaaaactaaccgtgaccactactccaaacaaaacacaatatgcctaggggcacggatgaacgtccagggagcccgggccccaggctttgttgcgtgttccctgctcctctccatctggtgtggaaacactgcccagggagaaaggaggaagctcactgtggacagtcttctttccttctgacagaccaggtcatctggcttccgagatcatcagagaagataagtctgtctctttcagctgccagtaagttttccaggatgagaggggaaaaagaaagcctccagtgacttcagttgctttgccagttgtcttgggattgttttacaccatcctttacttcccttgctcagacctctctgtttcaccattgctcaggcattcaggaaagtatctgctcactcccacttggtgagtcctcggccttgaggttgctgactctcaggcgttaggcagctggatgacttcccgcttcacgcagcaaaggccaggggcttgcgcgcctctgcagagttgttgctagggagacttgtgtcatcatccacaaccttgtttctcacttcctggttgggctcatctctgaagaacaggtctcccagcttcgctccttatcactgcattgtgaagaggaggaaaagtgaatcacggagagagaaaggaaaggatagaatcacaggctgcgtctgcacctgaaaagtgacccgcggaaactctatggcggattttttttttaactttcttcttcctgttaaaacataggtcactaactgtgatgttatttgttttctaagtggtatgtgagattttctaatgtagttagaagtttcattgtctgatggacacaatatgcccttccggttctattcaaaccagcaggatctgtcggtgcttagagatggctgcctggactggaatcaaatctaatttcagggaaatgaagatggaatttgaaggtcacttttaaaattaagtcattgatgctgctgttacagagtgtgacagaggatccatgtctgtgacacaggacggtgggaagcctgagagagagtgaaattatgtgatacactgaaatgacttttgtttttcttctaactcatacaaaactggtttggaaagtctttgctttggaagcgtcagacattagaacaggccaaactggactgtctgttcatagcgtgcctgaataagaaggcctcttagggagccagagggagcagagtggtcgtgtcctgcgtgctcttcaccctctggggcgcccctgctgcggctggcaggtgcagacagcctttgctggtccccagcacgtccagggtgggtgctcccttgcccgacagaaccatccccactgtgaggctgtgagagatttgtggcaggaactgtttatgaggctctagttgttgctgttgtggcgggaaagttaagaaacatagcccttaaggaaaccacctttatgtattttcttaaagcacgcctttaaataagcaaaaactttaaaaggcaggaaagagaattcttaggcaaattcagagaaataagtgctagttaatactaatcacctcctcctctgtctctcatcctcctttctcccatcaaagcaaaatatggcctcaccaccagccccaaatcagtgctcagaccctctctgtgtctgtgtgccctcctgggagtcagtcagcgctcaggccaggactgtgcagggccagccagcccatgcgctagtcaggagcacaggcaaggggtgcttgtggcagtggccgggcacctgagccccagctcgttgttaaacgtgctgacggcaaggggcaatggagtgagtttcccaactaagaaaccactattatatattttttcccttcagtcacatagacttcagacaactctcctattttttatggatttttcagctcatttcagatgaaggaactaagtcattgtgaactgtctcttgagatctaaaaacaagatgacttttcctggcacatattccaaagcaaagactttgttgcctgctgcttattgtctaatttacagggatatttaattttgtcaggtctatgtatatttatccagctatacttacttgcacagtggattggagagaaaggattctccagtgtgcacactcatcggtactctttctgcatttccctcgtgctgtgtcccgctcgggttccaatggacagtatcagggcttgtttgacttaggtctttcagttttcctttcggttcccttttaaaaatgtgattgttaacctgcctcttgaaagattcaaccgggtgtggtggctcacgcctgtaatcccagcacattgggaggccaaggcaggtggatcacctgaggtcagaagtttgagaccagcctggccaacatggtgaaaccccgtctctactaaaaatacaaaaagtagccaggcgtggtggcgtgtgcctgtagtcccagctacttgggaggctgaggcaggagaatagcttgaacctgggaggtggaggctgcagtgagttgagactgcaccattgcactccagcctgggtgacaaagcaggactccgtctcaaaaaaaaagaaaagattcatgatgctgctgctcccagaaggtttgctggatgtgtttacataggactctaacttgtgtgcactacagttgttcaccagggccagtgattcaccccagtgtgtggccagaccatgactgtgtagcaggaatgttttaatttgtgcttccttagtaaattgaaatatcagctgagagattatttgctgctgttattcaaaaggccatttatgaagttagtatttgagccccataagatctttaaaaagcctccaatcatttaaaggaagaaatcagagttgctataaaattcagtaaaaagctcatagccaaacggctgtgctcagatggaaagtctgagctgaggttggtctcttgccaaaccgtggctgttgtgtgttgttcttcatgtcttcgagttcattttttttcattctgcctattctggcatcagctcacttgaggagtccctcagccttcttgtatttaaggcatcgtcttagactttgtggctctaaagtacctgtctgttgagatttcaagtctcttgtcaccatcctcacacatgacaacaaaacccataatgcataagtggcctttttgaaccaagactttgcaaactgatctctcccccgtgaaggagttgagcacattagcaacaatgtacattaattttggattttcattttcatgttttattttgtaaatattatctgatgtttggagcttgagtatacagactgtaaatatagttcttgtatttgtactaattctgattcttttgctgtatagccttagatgtgcaatgcagacactatctaactgtgtgtggtaaccttgcgtcacggagctgttagtgaacgaggtaaaaataataaaggtacagccagtgcatcagaaaaaaacga

SEQ ID NO: 360308 - DNA, 11039 bp, Homo sapiens
gcggagtttcgcgagggccgaagcggggcagtgtgacggcagcggtcctgggaggcgcccgcgcgcgtcggagcagctccccgtcctccgcagccgtcaccgccggccgtcgccgcgccctggcctcccgcactcgcgcactcctgtccgccgcccaccgcccacctcccacctcgatgcggtgccgggctgctgcgtgatggggctgcggagcggcgccctgcggctcgcggcggccgctgctcgcgctgaggtgcgtcggtgcccggccccccgcgcccccgcgcgccgcggctcctgttgacccggtccgcccgtcggtctgcagcgcggctgaggaaacttggctgtaacttcaaaagaagatttgattctttatttctggactgcatatatatatataacaaggccattaaaatgtcgggagcctcagtgaaggtggctgtccgggtaaggcccttcaattctcgagagaccagcaaggaatccaaatgcatcattcagatgcaaggcaactcgaccagtattattaacccaaagaatccaaaggaagctccaaagtccttcagcttcgactattcctactggtctcatacctcacccgaagatccctgttttgcatctcaaaaccgtgtgtacaatgacattggcaaggaaatgctcttacacgcctttgagggatataatgtctgtatttttgcctatgggcagactggtgctggaaaatcttatacaatgatgggtaaacaagaagaaagccaggctggcatcattccacagttatgtgaagaactttttgagaaaatcaatgacaactgtaatgaagaaatgtcttactctgtagaggtgagctacatggaaatttactgtgaaagagtacgagatttgctgaatccaaaaaacaagggtaatttgcgtgtgcgtgaacacccacttcttggaccctatgtggaggatctgtccaagttggcagttacttcctacacagacattgctgacctcatggatgctgggaacaaagccaggacagtggcagctacaaacatgaatgaaacaagtagccgttcccacgctgtgtttacgattgttttcacccagaagaaacacgataatgagaccaacctttccactgagaaggtcagtaaaatcagcttggtggatctagcaggaagtgaacgagctgattcaactggtgccaaagggactcgattaaaggaaggagcaaatattaataagtctcttacaactttgggcaaagtcatttcagccttggccgaggtgagtaaaaagaagaagaaaacagattttattccctacagggattctgtacttacttggctccttcgagaaaatttaggtggcaattctcggactgcaatggttgctgctctgagccccgcggatatcaactacgatgagactttgagcactctgagatatgcagatcgtgcaaaacaaattaaatgcaatgctgttatcaatgaggaccccaatgccaaactggttcgtgaattaaaggaggaggtgacacggctgaaggaccttcttcgtgctcagggcctgggagatattattgatattgatccattgatcgatgattactctggaagtggaagcaaatatctgaaagattttcagaacaataagcatagatacttgctagcctctgagaatcaacgccctggccatttttccacagcatccatggggtccctcacttcatccccatcttcctgctcactcagtagtcaggtgggcttgacgtctgtgaccagtattcaagagaggatcatgtctacacctggaggagaggaagctattgaacgtttaaaggaatcagagaagatcattgctgagttgaatgaaacttgggaagagaagcttcgtaaaacagaggccatcagaatggagagagaggctttgttggctgagatgggagttgccattcgggaagatggaggaaccctaggggttttctcacctaaaaagaccccacatcttgttaacctcaatgaagacccactaatgtctgagtgcctactttattacatcaaagatggaattacaagggttggccaagcagatgctgagcggcgccaggacatagtgctgagcggggctcacattaaagaagagcattgtatcttccggagtgagagaagcaacagcggggaagttatcgtgaccttagagccctgtgagcgctcagaaacctacgtaaatggcaagagggtgtcccagcctgttcagctgcgctcaggaaaccgtatcatcatgggtaaaaaccatgttttccgctttaaccacccggaacaagcacgagctgagcgagagaagactccttctgctgagaccccctctgagcctgtggactggacatttgcccagagggagcttctggaaaaacaaggaattgatatgaaacaagagatggagaaaaggctacaggaaatggagatcttatacaaaaaggagaaggaagaagcagatcttcttttggagcagcagagactggactatgagagtaaattgcaggccttgcagaagcaggttgaaacccgatctctggctgcagaaacaactgaagaggaggaagaagaggaagaagttccttggacacagcatgaatttgagttggcccaatgggccttccggaaatggaagtctcatcagtttacttcattacgggacttactctggggcaatgccgtgtacctaaaggaggccaatgccatcagtgtggaactgaaaaagaaggtgcagtttcagtttgttctgctgactgacacactgtactcccctttgcctcctgaattacttcccactgagatggaaaaaactcatgaggacaggcctttccctcgcacagtggtagcagtagaagtccaggatttgaagaatggagcaacacactattggtctttggagaaactcaagcagaggctggatttgatgcgagagatgtatgatagggcaggggagatggcctccagtgcccaagacgaaagcgaaaccactgtgactggcagcgatcccttctatgatcggttccactggttcaaacttgtggggagctcccccattttccacggctgtgtgaacgagcgccttgccgaccgcacaccctcccccactttttccacggccgattccgacatcactgagctggctgacgagcagcaagatgagatggaggattttgatgatgaggcattcgtggatgacgccggctctgacgcagggacggaggagggatcagatctcttcagtgacgggcatgacccgttttacgaccgatccccttggttcattttagtgggaagggcatttgtttacctgagcaatctgctgtatcccgtgcccctgatccacagggtggccatcgtcagtgagaaaggtgaagtgcggggatttctgcgtgtggctgtacaggccatcgcagcggatgaagaagctcctgattatggctctggaattcgacagtcaggaacagctaaaatatcttttgataatgaatactttaatcagagtgacttttcgtctgttgcaatgactcgttctggtctgtccttggaggagttgaggattgtggaaggacagggtcagagttctgaggtcatcactcctccagaagaaatcagtcgaattaatgacttggatttgaagtcaagcactttgctggatggtaagatggtaatggaagggttttctgaagagattggcaaccacctgaaactgggcagtgccttcactttccgagtaacagtgttgcaggccagtggaatcctcccagagtatgcagatatcttctgtcagttcaactttttgcatcgccatgatgaagcattctccacggagcccctcaaaaacaatggcagaggaagtcccctggccttttatcatgtgcagaatattgcagtggagatcactgaatcatttgtggattacatcaaaaccaagcctattgtatttgaagtctttgggcattatcagcagcacccacttcatctgcaaggacaggagcttaacagtccgcctcagccgtgccgccgattcttccctccacccatgccactgtccaagccagttccagccaccaagttaaacacgatgagcaaaaccagccttggccagagcatgagcaagtatgacctcctggtttggtttgagatcagtgaactggagcctacaggagagtatatcccagctgtggttgaccacacagcaggcttgccttgccaggggacatttttgcttcatcagggcatccagcgaaggatcacagtgaccattatccatgagaaggggagcgagctccattggaaagatgttcgtgaactggtggtaggtcgtattcggaataagcctgaggtggatgaagctgcagttgatgccatcctctccctaaatattatttctgccaagtacctgaagtcttcccacaactctagcaggaccttctaccgctttgaggctgtgtgggatagctctctgcataactcccttcttctgaaccgagtgacaccctatggagaaaagatctacatgaccttgtcggcctacctagagctggatcattgcatccagccggctgtcatcaccaaggatgtgtgcatggtcttctactcccgagatgccaagatctcaccaccacgctctctgcgtagcctctttggcagcggctactcaaagtcaccagattcgaatcgagtcactggcatttacgaactcagcttatgcaaaatgtcagacacaggtagtccaggtatgcagagaaggagaagaaaaatcttagatacgtcagtggcatatgtgcggggagaagagaacttagcaggctggcggccccgtggagacagcctcatccttgagcaccagtgggagctggagaagctggagctcctacatgaggtatccaggggcagggttgttcagatgcaagaactctcggacaagattgccaaagtatcagtcttcctccccgctgctgcatgtgatcatagcttttcacttttctctcctgaggtcttaacgagctttgtgtttgctatagcagtagtattgatcttctcaggtggaaaaaacccgccactttttgctgctgcgtgagagacttggtgacagcatccccaaatccctgagcgactcgttatcccccagcctcagcagtgggaccctcagcacctccaccagtatctcctctcagatctcaaccactacctttgaaagcgccatcacacctagcgagagcagtggctatgattcaggagacatcgaaagcctggtggaccgagagaaagagctggctaccaagtgcctgcaacttctcacccacactttcaacagagaattcagccaggtgcacggcagcgtcagtgactgtaagttgtctgatatctctccaattggacgggatccctctgagtccagtttcagcagtgccaccctcactccctcctccacctgtccctctctggtagactctaggagcaactctctggatcagaagaccccagaagccaattcccgggcctctagtccctgcccagaatttgaacagtttcagattgtcccagctgtggaaacaccatatttggcccgagcaggaaaaaacgaatttctcaatcttgttccagatattgaagaaattagaccaagctcagtggtctctaagaaaggataccttcatttcaaggagcctctttacagtaactgggctaaacattttgttgtcgtccgtcggccttatgtcttcatctataacagtgacaaagaccctgtggagcgtggaatcattaacctgtccacagcacaggtggagtacagtgaggaccagcaggccatggtgaagacaccaaacacctttgctgtctgcacaaagcaccgtggggtccttttgcaggccctcaatgacaaagacatgaacgactggttgtatgccttcaacccacttctagctggcacaatacggtcaaagctttcccgcagatgcccgagccagtcgaaatactaagtgactctgccgagtgccctcactcgccttcgagagataaagaaagcgttacctctcatttctctttgtgattcttgacggtgactcttgtatgtaatcctgtggcttaactacttctccctccttgtccagcacttttctagctctcccgttccccatctccattgctctgtactcttttcttttttcttgtgctgagaatctcgttagtagcatgtggcctaacaaaaggaaaaaatgtttttaaacacacacacacacacacacacacacacacacatacacagacaaaaacacaaaaactctgaggggatctggtgaatctccaaattattgtgggtgtactttggcttccttttgtatgataggtccccatcatgaccacctctgatgtctgtgctgctgtcaccaggcacctttgtttttcaagacaacatactttttttttcttttctctgtttgtgatatcactttaatttttcttgggtggcttagagactaagggaggagacatctggcctttttagaacctgagaggaaaaaaagagtctttttttcccctctgtctctttttgccatggctaatccctgcatttccattcagggaaaaggtggtagtgagcatagaactgcaacagttatattctgagtcaaagttggggctttttacggcataattatggaatttttatttactggtagagaggagacgagaggctttttcagtgggcctgggacagtggctgctcttgactttgtgtgaagggaaatgccaaggatgcttctggtggacttcaggggaccccagggtttggccgtgggccgtgatggcagcaggcggtgggatgcttgtagctcctcacagcaggattcctgcccactgttttttctctgttgggagggaagctcttttctaggagtgtctcagttctgcttttggcattagtgatggtggtggtacagttggaattagtgccatgtcatacacaaatgttccacaaggcgggagtgtttcactttctggtgataaacttgatggtcattgttatgattaagataatgccgggcaggccgggcacagtggctcacgcctgtaatccaagcacttggggaggccgaggcgggcagatcacgagatcaggagttcaagaccagcctggccaatatgatgaaaccccgtctctactaaaaatacaaaattagtcgggtatggtggcacatgcctgtaattccagctgcttgggagcctgaggcaggagaactgcttgaacccaggaggcagaggttgcagtgagccaagatcgcgctattgcactccagcctgggtgacagagcaagactctgcctcagaaaaaaaaaaaaaaataataatgctgggtagtgaccttgtgattgttacagctccctttgatcaaagaaatatagctttcaggcataaacctggaagtctccctctgaatccagcagttgttttcattgatgcttgtcaggttgaagatgctttcagtgatgctctctatactcataaataagcaaatgtggcaggctttgctttctggatcccaggattaaaactaaccgtgaccactactccaaacaaaacacaatatgcctaggggcacggatgaacgtccagggagcccgggccccaggctttgttgcgtgttccctgctcctctccatctggtgtggaaacactgcccagggagaaaggaggaagctcactgtggacagtcttctttccttctgacagaccaggtcatctggcttccgagatcatcagagaagataagtctgtctctttcagctgccagtaagttttccaggatgagaggggaaaaagaaagcctccagtgacttcagttgctttgccagttgtcttgggattgttttacaccatcctttacttcccttgctcagacctctctgtttcaccattgctcaggcattcaggaaagtatctgctcactcccacttggtgagtcctcggccttgaggttgctgactctcaggcgttaggcagctggatgacttcccgcttcacgcagcaaaggccaggggcttgcgcgcctctgcagagttgttgctagggagacttgtgtcatcatccacaaccttgtttctcacttcctggttgggctcatctctgaagaacaggtctcccagcttcgctccttatcactgcattgtgaagaggaggaaaagtgaatcacggagagagaaaggaaaggatagaatcacaggctgcgtctgcacctgaaaagtgacccgcggaaactctatggcggattttttttttaactttcttcttcctgttaaaacataggtcactaactgtgatgttatttgttttctaagtggtatgtgagattttctaatgtagttagaagtttcattgtctgatggacacaatatgcccttccggttctattcaaaccagcaggatctgtcggtgcttagagatggctgcctggactggaatcaaatctaatttcagggaaatgaagatggaatttgaaggtcacttttaaaattaagtcattgatgctgctgttacagagtgtgacagaggatccatgtctgtgacacaggacggtgggaagcctgagagagagtgaaattatgtgatacactgaaatgacttttgtttttcttctaactcatacaaaactggtttggaaagtctttgctttggaagcgtcagacattagaacaggccaaactggactgtctgttcatagcgtgcctgaataagaaggcctcttagggagccagagggagcagagtggtcgtgtcctgcgtgctcttcaccctctggggcgcccctgctgcggctggcaggtgcagacagcctttgctggtccccagcacgtccagggtgggtgctcccttgcccgacagaaccatccccactgtgaggctgtgagagatttgtggcaggaactgtttatgaggctctagttgttgctgttgtggcgggaaagttaagaaacatagcccttaaggaaaccacctttatgtattttcttaaagcacgcctttaaataagcaaaaactttaaaaggcaggaaagagaattcttaggcaaattcagagaaataagtgctagttaatactaatcacctcctcctctgtctctcatcctcctttctcccatcaaagcaaaatatggcctcaccaccagccccaaatcagtgctcagaccctctctgtgtctgtgtgccctcctgggagtcagtcagcgctcaggccaggactgtgcagggccagccagcccatgcgctagtcaggagcacaggcaaggggtgcttgtggcagtggccgggcacctgagccccagctcgttgttaaacgtgctgacggcaaggggcaatggagtgagtttcccaactaagaaaccactattatatattttttcccttcagtcacatagacttcagacaactctcctattttttatggatttttcagctcatttcagatgaaggaactaagtcattgtgaactgtctcttgagatctaaaaacaagatgacttttcctggcacatattccaaagcaaagactttgttgcctgctgcttattgtctaatttacagggatatttaattttgtcaggtctatgtatatttatccagctatacttacttgcacagtggattggagagaaaggattctccagtgtgcacactcatcggtactctttctgcatttccctcgtgctgtgtcccgctcgggttccaatggacagtatcagggcttgtttgacttaggtctttcagttttcctttcggttcccttttaaaaatgtgattgttaacctgcctcttgaaagattcaaccgggtgtggtggctcacgcctgtaatcccagcacattgggaggccaaggcaggtggatcacctgaggtcagaagtttgagaccagcctggccaacatggtgaaaccccgtctctactaaaaatacaaaaagtagccaggcgtggtggcgtgtgcctgtagtcccagctacttgggaggctgaggcaggagaatagcttgaacctgggaggtggaggctgcagtgagttgagactgcaccattgcactccagcctgggtgacaaagcaggactccgtctcaaaaaaaaagaaaagattcatgatgctgctgctcccagaaggtttgctggatgtgtttacataggactctaacttgtgtgcactacagttgttcaccagggccagtgattcaccccagtgtgtggccagaccatgactgtgtagcaggaatgttttaatttgtgcttccttagtaaattgaaatatcagctgagagattatttgctgctgttattcaaaaggccatttatgaagttagtatttgagccccataagatctttaaaaagcctccaatcatttaaaggaagaaatcagagttgctataaaattcagtaaaaagctcatagccaaacggctgtgctcagatggaaagtctgagctgaggttggtctcttgccaaaccgtggctgttgtgtgttgttcttcatgtcttcgagttcattttttttcattctgcctattctggcatcagctcacttgaggagtccctcagccttcttgtatttaaggcatcgtcttagactttgtggctctaaagtacctgtctgttgagatttcaagtctcttgtcaccatcctcacacatgacaacaaaacccataatgcataagtggcctttttgaaccaagactttgcaaactgatctctcccccgtgaaggagttgagcacattagcaacaatgtacattaattttggattttcattttcatgttttattttgtaaatattatctgatgtttggagcttgagtatacagactgtaaatatagttcttgtatttgtactaattctgattcttttgctgtatagccttagatgtgcaatgcagacactatctaactgtgtgtggtaaccttgcgtcacggagctgttagtgaacgaggtaaaaataataaaggtacagccagtgcatcagaaaaaaacga

SEQ ID NO: 360309 - DNA, 4872 bp, Homo sapiens
gtgggaaccgcacccaccacacatgcatgaaataaatcgcagtccaaatgggaagctcacacacacacatgcacaagataatcacagtccaaatgggaagcgtgtgcatacacacacacacacacatacacagacaaaaacacaaaaactctgaggggatctggtgaatctccaaattattgtgggtgtactttggcttccttttgtatgataggtccccatcatgaccacctctgatgtctgtgctgctgtcaccaggcacctttgtttttcaagacaacatactttttttttcttttctctgtttgtgatatcactttaatttttcttgggtggcttagagactaagggaggagacatctggcctttttagaacctgagaggaaaaaaagagtctttttttcccctctgtctctttttgccatggctaatccctgcatttccattcagggaaaaggtggtagtgagcatagaactgcaacagttatattctgagtcaaagttggggctttttacggcataattatggaatttttatttactggtagagaggagacgagaggctttttcagtgggcctgggacagtggctgctcttgactttgtgtgaagggaaatgccaaggatgcttctggtggacttcaggggaccccagggtttggccgtgggccgtgatggcagcaggcggtgggatgcttgtagctcctcacagcaggattcctgcccactgttttttctctgttgggagggaagctcttttctaggagtgtctcagttctgcttttggcattagtgatggtggtggtacagttggaattagtgccatgtcatacacaaatgttccacaaggcgggagtgtttcactttctggtgataaacttgatggtcattgttatgattaagataatgccgggcaggccgggcacagtggctcacgcctgtaatccaagcacttggggaggccgaggcgggcagatcacgagatcaggagttcaagaccagcctggccaatatgatgaaaccccgtctctactaaaaatacaaaattagtcgggtatggtggcacatgcctgtaattccagctgcttgggagcctgaggcaggagaactgcttgaacccaggaggcagaggttgcagtgagccaagatcgcgctattgcactccagcctgggtgacagagcaagactctgcctcagaaaaaaaaaaaaaaataataatgctgggtagtgaccttgtgattgttacagctccctttgatcaaagaaatatagctttcaggcataaacctggaagtctccctctgaatccagcagttgttttcattgatgcttgtcaggttgaagatgctttcagtgatgctctctatactcataaataagcaaatgtggcaggctttgctttctggatcccaggattaaaactaaccgtgaccactactccaaacaaaacacaatatgcctaggggcacggatgaacgtccagggagcccgggccccaggctttgttgcgtgttccctgctcctctccatctggtgtggaaacactgcccagggagaaaggaggaagctcactgtggacagtcttctttccttctgacagaccaggtcatctggcttccgagatcatcagagaagataagtctgtctctttcagctgccagtaagttttccaggatgagaggggaaaaagaaagcctccagtgacttcagttgctttgccagttgtcttgggattgttttacaccatcctttacttcccttgctcagacctctctgtttcaccattgctcaggcattcaggaaagtatctgctcactcccacttggtgagtcctcggccttgaggttgctgactctcaggcgttaggcagctggatgacttcccgcttcacgcagcaaaggccaggggcttgcgcgcctctgcagagttgttgctagggagacttgtgtcatcatccacaaccttgtttctcacttcctggttgggctcatctctgaagaacaggtctcccagcttcgctccttatcactgcattgtgaagaggaggaaaagtgaatcacggagagagaaaggaaaggatagaatcacaggctgcgtctgcacctgaaaagtgacccgcggaaactctatggcggattttttttttaactttcttcttcctgttaaaacataggtcactaactgtgatgttatttgttttctaagtggtatgtgagattttctaatgtagttagaagtttcattgtctgatggacacaatatgcccttccggttctattcaaaccagcaggatctgtcggtgcttagagatggctgcctggactggaatcaaatctaatttcagggaaatgaagatggaatttgaaggtcacttttaaaattaagtcattgatgctgctgttacagagtgtgacagaggatccatgtctgtgacacaggacggtgggaagcctgagagagagtgaaattatgtgatacactgaaatgacttttgtttttcttctaactcatacaaaactggtttggaaagtctttgctttggaagcgtcagacattagaacaggccaaactggactgtctgttcatagcgtgcctgaataagaaggcctcttagggagccagagggagcagagtggtcgtgtcctgcgtgctcttcaccctctggggcgcccctgctgcggctggcaggtgcagacagcctttgctggtccccagcacgtccagggtgggtgctcccttgcccgacagaaccatccccactgtgaggctgtgagagatttgtggcaggaactgtttatgaggctctagttgttgctgttgtggcgggaaagttaagaaacatagcccttaaggaaaccacctttatgtattttcttaaagcacgcctttaaataagcaaaaactttaaaaggcaggaaagagaattcttaggcaaattcagagaaataagtgctagttaatactaatcacctcctcctctgtctctcatcctcctttctcccatcaaagcaaaatatggcctcaccaccagccccaaatcagtgctcagaccctctctgtgtctgtgtgccctcctgggagtcagtcagcgctcaggccaggactgtgcagggccagccagcccatgcgctagtcaggagcacaggcaaggggtgcttgtggcagtggccgggcacctgagccccagctcgttgttaaacgtgctgacggcaaggggcaatggagtgagtttcccaactaagaaaccactattatatattttttcccttcagtcacatagacttcagacaactctcctattttttatggatttttcagctcatttcagatgaaggaactaagtcattgtgaactgtctcttgagatctaaaaacaagatgacttttcctggcacatattccaaagcaaagactttgttgcctgctgcttattgtctaatttacagggatatttaattttgtcaggtctatgtatatttatccagctatacttacttgcacagtggattggagagaaaggattctccagtgtgcacactcatcggtactctttctgcatttccctcgtgctgtgtcccgctcgggttccaatggacagtatcagggcttgtttgacttaggtctttcagttttcctttcggttcccttttaaaaatgtgattgttaacctgcctcttgaaagattcaaccgggtgtggtggctcacgcctgtaatcccagcacattgggaggccaaggcaggtggatcacctgaggtcagaagtttgagaccagcctggccaacatggtgaaaccccgtctctactaaaaatacaaaaagtagccaggcgtggtggcgtgtgcctgtagtcccagctacttgggaggctgaggcaggagaatagcttgaacctgggaggtggaggctgcagtgagttgagactgcaccattgcactccagcctgggtgacaaagcaggactccgtctcaaaaaaaaagaaaagattcatgatgctgctgctcccagaaggtttgctggatgtgtttacataggactctaacttgtgtgcactacagttgttcaccagggccagtgattcaccccagtgtgtggccagaccatgactgtgtagcaggaatgttttaatttgtgcttccttagtaaattgaaatatcagctgagagattatttgctgctgttattcaaaaggccatttatgaagttagtatttgagccccataagatctttaaaaagcctccaatcatttaaaggaagaaatcagagttgctataaaattcagtaaaaagctcatagccaaacggctgtgctcagatggaaagtctgagctgaggttggtctcttgccaaaccgtggctgttgtgtgttgttcttcatgtcttcgagttcattttttttcattctgcctattctggcatcagctcacttgaggagtccctcagccttcttgtatttaaggcatcgtcttagactttgtggctctaaagtacctgtctgttgagatttcaagtctcttgtcaccatcctcacacatgacaacaaaacccataatgcataagtggcctttttgaaccaagactttgcaaactgatctctcccccgtgaaggagttgagcacattagcaacaatgtacattaattttggattttcattttcatgttttattttgtaaatattatctgatgtttggagcttgagtatacagactgtaaatatagttcttgtatttgtactaattctgattcttttgctgtatagccttagatgtgcaatgcagacactatctaactgtgtgtggtaaccttgcgtcacggagctgttagtgaacgaggtaaaaataataaaggtacagccagtgcatcagaaaaaaacga

SEQ ID NO: 360310 - DNA, 4122 bp, Homo sapiens
ttatgtacattatgttagtggatcttcatgattgcttttcaagatagtaggctaaatattagggtctacagtttataaatgaggagacagactcccagaggttaagcagcttaactaaagtcacatagcatcagtacagttaagaatatggagtttaaatctggccgggtatggtggctcgcacctgtaatcccagcatttgggaggctgagtcggacagattgcttgagctcaggagttagagaccagcctgggcaacatggcgaaaccctgtctctacaaaaaaatgcaaaaattagccgggcgcggtggtgcacgcctttggtctcagctactcaggaagctgaggcaggagaactgcttgaacccaggaggcagaggttgcagtgagccaagatcgcgctattgcactccagcctgggtgacagagcaagactctgcctcagaaaaaaaaaaaaaaataataatgctgggtagtgaccttgtgattgttacagctccctttgatcaaagaaatatagctttcaggcataaacctggaagtctccctctgaatccagcagttgttttcattgatgcttgtcaggttgaagatgctttcagtgatgctctctatactcataaataagcaaatgtggcaggctttgctttctggatcccaggattaaaactaaccgtgaccactactccaaacaaaacacaatatgcctaggggcacggatgaacgtccagggagcccgggccccaggctttgttgcgtgttccctgctcctctccatctggtgtggaaacactgcccagggagaaaggaggaagctcactgtggacagtcttctttccttctgacagaccaggtcatctggcttccgagatcatcagagaagataagtctgtctctttcagctgccagtaagttttccaggatgagaggggaaaaagaaagcctccagtgacttcagttgctttgccagttgtcttgggattgttttacaccatcctttacttcccttgctcagacctctctgtttcaccattgctcaggcattcaggaaagtatctgctcactcccacttggtgagtcctcggccttgaggttgctgactctcaggcgttaggcagctggatgacttcccgcttcacgcagcaaaggccaggggcttgcgcgcctctgcagagttgttgctagggagacttgtgtcatcatccacaaccttgtttctcacttcctggttgggctcatctctgaagaacaggtctcccagcttcgctccttatcactgcattgtgaagaggaggaaaagtgaatcacggagagagaaaggaaaggatagaatcacaggctgcgtctgcacctgaaaagtgacccgcggaaactctatggcggattttttttttaactttcttcttcctgttaaaacataggtcactaactgtgatgttatttgttttctaagtggtatgtgagattttctaatgtagttagaagtttcattgtctgatggacacaatatgcccttccggttctattcaaaccagcaggatctgtcggtgcttagagatggctgcctggactggaatcaaatctaatttcagggaaatgaagatggaatttgaaggtcacttttaaaattaagtcattgatgctgctgttacagagtgtgacagaggatccatgtctgtgacacaggacggtgggaagcctgagagagagtgaaattatgtgatacactgaaatgacttttgtttttcttctaactcatacaaaactggtttggaaagtctttgctttggaagcgtcagacattagaacaggccaaactggactgtctgttcatagcgtgcctgaataagaaggcctcttagggagccagagggagcagagtggtcgtgtcctgcgtgctcttcaccctctggggcgcccctgctgcggctggcaggtgcagacagcctttgctggtccccagcacgtccagggtgggtgctcccttgcccgacagaaccatccccactgtgaggctgtgagagatttgtggcaggaactgtttatgaggctctagttgttgctgttgtggcgggaaagttaagaaacatagcccttaaggaaaccacctttatgtattttcttaaagcacgcctttaaataagcaaaaactttaaaaggcaggaaagagaattcttaggcaaattcagagaaataagtgctagttaatactaatcacctcctcctctgtctctcatcctcctttctcccatcaaagcaaaatatggcctcaccaccagccccaaatcagtgctcagaccctctctgtgtctgtgtgccctcctgggagtcagtcagcgctcaggccaggactgtgcagggccagccagcccatgcgctagtcaggagcacaggcaaggggtgcttgtggcagtggccgggcacctgagccccagctcgttgttaaacgtgctgacggcaaggggcaatggagtgagtttcccaactaagaaaccactattatatattttttcccttcagtcacatagacttcagacaactctcctattttttatggatttttcagctcatttcagatgaaggaactaagtcattgtgaactgtctcttgagatctaaaaacaagatgacttttcctggcacatattccaaagcaaagactttgttgcctgctgcttattgtctaatttacagggatatttaattttgtcaggtctatgtatatttatccagctatacttacttgcacagtggattggagagaaaggattctccagtgtgcacactcatcggtactctttctgcatttccctcgtgctgtgtcccgctcgggttccaatggacagtatcagggcttgtttgacttaggtctttcagttttcctttcggttcccttttaaaaatgtgattgttaacctgcctcttgaaagattcaaccgggtgtggtggctcacgcctgtaatcccagcacattgggaggccaaggcaggtggatcacctgaggtcagaagtttgagaccagcctggccaacatggtgaaaccccgtctctactaaaaatacaaaaagtagccaggcgtggtggcgtgtgcctgtagtcccagctacttgggaggctgaggcaggagaatagcttgaacctgggaggtggaggctgcagtgagttgagactgcaccattgcactccagcctgggtgacaaagcaggactccgtctcaaaaaaaaagaaaagattcatgatgctgctgctcccagaaggtttgctggatgtgtttacataggactctaacttgtgtgcactacagttgttcaccagggccagtgattcaccccagtgtgtggccagaccatgactgtgtagcaggaatgttttaatttgtgcttccttagtaaattgaaatatcagctgagagattatttgctgctgttattcaaaaggccatttatgaagttagtatttgagccccataagatctttaaaaagcctccaatcatttaaaggaagaaatcagagttgctataaaattcagtaaaaagctcatagccaaacggctgtgctcagatggaaagtctgagctgaggttggtctcttgccaaaccgtggctgttgtgtgttgttcttcatgtcttcgagttcattttttttcattctgcctattctggcatcagctcacttgaggagtccctcagccttcttgtatttaaggcatcgtcttagactttgtggctctaaagtacctgtctgttgagatttcaagtctcttgtcaccatcctcacacatgacaacaaaacccataatgcataagtggcctttttgaaccaagactttgcaaactgatctctcccccgtgaaggagttgagcacattagcaacaatgtacattaattttggattttcattttcatgttttattttgtaaatattatctgatgtttggagcttgagtatacagactgtaaatatagttcttgtatttgtactaattctgattcttttgctgtatagccttagatgtgcaatgcagacactatctaactgtgtgtggtaaccttgcgtcacggagctgttagtgaacgaggtaaaaataataaaggtacagccagtgcatcagaaaaaaacga

SEQ ID NO: 360311 - DNA, 6075 bp, Homo sapiens
gcggagtttcgcgagggccgaagcggggcagtgtgacggcagcggtcctgggaggcgcccgcgcgcgtcggagcagctccccgtcctccgcagccgtcaccgccggccgtcgccgcgccctggcctcccgcactcgcgcactcctgtccgccgcccaccgcccacctcccacctcgatgcggtgccgggctgctgcgtgatggggctgcggagcggcgccctgcggctcgcggcggccgctgctcgcgctgaggtgcgtcggtgcccggccccccgcgcccccgcgcgccgcggctcctgttgacccggtccgcccgtcggtctgcagcgcggctgaggaaacttggctgtaacttcaaaagaagatttgattctttatttctggactgcatatatatatataacaaggccattaaaatgtcgggagcctcagtgaaggtggctgtccgggtaaggcccttcaattctcgagagaccagcaaggaatccaaatgcatcattcagatgcaaggcaactcgaccagtattattaacccaaagaatccaaaggaagctccaaagtccttcagcttcgactattcctactggtctcatacctcacccgaagatccctgttttgcatctcaaaaccgtgtgtacaatgacattggcaaggaaatgctcttacacgcctttgagggatataatgtctgtatttttgcctatgggcagactggtgctggaaaatcttatacaatgatgggtaaacaagaagaaagccaggctggcatcattccacagttatgtgaagaactttttgagaaaatcaatgacaactgtaatgaagaaatgtcttactctgtagaggtgagctacatggaaatttactgtgaaagagtacgagatttgctgaatccaaaaaacaagggtaatttgcgtgtgcgtgaacacccacttcttggaccctatgtggaggatctgtccaagttggcagttacttcctacacagacattgctgacctcatggatgctgggaacaaagccaggacagtggcagctacaaacatgaatgaaacaagtagccgttcccacgctgtgtttacgattgttttcacccagaagaaacacgataatgagaccaacctttccactgagaaggtcagtaaaatcagcttggtggatctagcaggaagtgaacgagctgattcaactggtgccaaagggactcgattaaaggaaggagcaaatattaataagtctcttacaactttgggcaaagtcatttcagccttggccgaggtgagtaaaaagaagaagaaaacagattttattccctacagggattctgtacttacttggctccttcgagaaaatttaggtggcaattctcggactgcaatggttgctgctctgagccccgcggatatcaactacgatgagactttgagcactctgagatatgcagatcgtgcaaaacaaattaaatgcaatgctgttatcaatgaggaccccaatgccaaactggttcgtgaattaaaggaggaggtgacacggctgaaggaccttcttcgtgctcagggcctgggagatattattgatattgatccattgatcgatgattactctggaagtggaagcaaatatctgaaagattttcagaacaataagcatagatacttgctagcctctgagaatcaacgccctggccatttttccacagcatccatggggtccctcacttcatccccatcttcctgctcactcagtagtcaggtgggcttgacgtctgtgaccagtattcaagagaggatcatgtctacacctggaggagaggaagctattgaacgtttaaaggaatcagagaagatcattgctgagttgaatgaaacttgggaagagaagcttcgtaaaacagaggccatcagaatggagagagaggctttgttggctgagatgggagttgccattcgggaagatggaggaaccctaggggttttctcacctaaaaagaccccacatcttgttaacctcaatgaagacccactaatgtctgagtgcctactttattacatcaaagatggaattacaagggttggccaagcagatgctgagcggcgccaggacatagtgctgagcggggctcacattaaagaagagcattgtatcttccggagtgagagaagcaacagcggggaagttatcgtgaccttagagccctgtgagcgctcagaaacctacgtaaatggcaagagggtgtcccagcctgttcagctgcgctcaggaaaccgtatcatcatgggtaaaaaccatgttttccgctttaaccacccggaacaagcacgagctgagcgagagaagactccttctgctgagaccccctctgagcctgtggactggacatttgcccagagggagcttctggaaaaacaaggaattgatatgaaacaagagatggagaaaaggctacaggaaatggagatcttatacaaaaaggagaaggaagaagcagatcttcttttggagcagcagagactggacgcggattctgatagcggggacgattctgacaagaggtcgtgtgaagagagctggaaactgattacttctctgagagaaaagctacctcccagcaagttgcaaaccattgttaaaaaatgtggcctcccaagcagtgggaagaaacgtgaaccaattaaaatgtatcagataccccaaagaaggcgcttgagtaaagattccaagtgggtcacaatctcagatcttaaaattcaggctgtcaaagagatttgctatgaggttgctctcaatgacttcaggcacagtcggcaggagattgaagccctggccattgtcaagatgaaggagctttgtgccatgtatggcaagaaagaccccaatgagcgggactcctggagggcagtggccagggacgtctgggataccgtcggtgttggggatgagaagatcgaagacgtcatggccactgggaaaggcagcactgatgtagatgacctcaaggttcatatagacaagctggaagatattttgcaagaagtcaaaaagcaaaataacatgaaagacgaggagataaaagtcttaagaaataaaatgctcaaaatggaaaaagtcttgccactgatcggatctcaggaacagaaaagcccaggaagccacaaagcaaaggagcctgttggtgctggtgttagtagcacctctgagaataatgtaagtaaaggagacaatggagaacttgcaaaagaagaacgtgtttcccagctgatgaatggggatccagcttttagacgtggacgtctgcgctggatgaggcaagagcaaattcggtttaagaacttgcaacagcaggagataacaaagcagcttcgtcggcagaatgtacctcataggttcatccctcctgagaaccggaagccccgcttcccctttaagagcaaccctaaacacagaaactcttggagtcctgggacacatatcatcataacagaagatgaggttatagagcttaggattccaaaagacgatgaagcaaggaaagggaataaagaagagagccaagaaaaagggggtaaaggagcttttaaggatccccagtttccatggggctctcaaggaatgagaagtcaagatcacatccaagttagcaagcagcacattaataatcagcaacagccacctcaactacgttggagaagcaattctctcaataatggccagccgaaaagtacgcgctgccaggcatctgcctccgcggagtcattaaactcccacagtggtcaccccactgctgatgtacagactttccaggcaaagcgccatattcatcaacaccgtcagtcttactgtaattataacactggaggtcagttagagggcaatgcagccacttcctatcagaagcagactgacaaacccagccactgtagccagtttgtgacacctccgcggatgaggagacagttctcagcacccaatctcaaagctggtcgagaaaccacagtataaatcagttactggacaaacttgaaatcatggtggaagaaacagacagtgttagctcatgatttgatttggttctacctttggccttgagttcttattatttacattataaatattaactggttttatattgttaagacaaaacactggtaaaagtttcaacacctcccttttgcttgtataccataaatgggcagtttctgaaattttggataaagcatcaagaactcctttttctgaaacgttcctccttttttagtgcctaattaatatacttacttacacagacttgtcccatcttgatgtaagtttgttatgtttttataatgcctataaattaatctgacatccagaaagacctgcctcttagtttatgcagacattcaaaaggagaatttgataagcagaattaaatgtctgttattcataaatgttagaaattggtttaaaaataataacatgcaactgggtgggcacagctttggatttctcatccacgtctgttcccttctttaaatatgattagaattttcgtaagccaaaactaaaggtcttcaaacatatcttgcaatacatagctttgcatcttccacacaacttccacgtcttcttttattctgtattttacaaaaaactcatataatggttttttcttttgaatgtatcagaatatgtatgaaatttgtcatatcagaatctataaattggcactgtgtctgggattctgtttgtggtttgcattttgaagttcaatgtatcatttgacacacatgcacacaaagtgaactattcaccaaaatcatgccaacagaaataccaacaaaaaacttgtgtagcttgtaaggaggttatttggcttgagagggaagaggtgggacagacatgggggacaaagctacagcatatggctctgtggtgctgcttttttccaatagttgatgaaatagtgaaataaaagttaactttggttgggcttggaataaaggagatgatacataataaactattctttggttagcattagtaatgcttgtagacactcaaacaaggaaggcgaagtcctgatgatgatttattgtatcaatacctcattttatttggttgtggtctcagtttgcctcactggagaatccactaagaaagatggattttaatgggaagaaaagaattattttctacatcgttcctcatctcttgagtttgtcaaaaagttttctaagaggcagtgtgaagagccagagatgtccgaaattgcctgacttcatgttttggaagattcctaagtcacatgaaatcatctatcaaacacttgtcttccaaacggttaaagattgtgattatgtttttttttcctttgcgtgtgggcactatgctttattagaacacattatttttaatcatagtattttttctttgcctctaagaaaatactttcttaatgctcagaaagttgcttccaattaatgtttttttccccttaaaaagagaagctttgagagatatttttgctttcatagctagaacagttgaagtcttcaactgaggttttatagcagattagacatgggtaaatgatgtctgtaatgggttgagttactgagatgacaatctcctgtgccatttggtttgaatgtacttgataggctgcttcaaatcagtcacttcaatgcattttgtgtaaacccagttgtccttttttattcctctttagacataaatgtgctaactattcctttctatacacaatttattttctaagattaaaaataataattgctaggtttggtggcacatgcgtacagccccagctacttaggaggctgaagcaggaggatccctagagcccaggagttctgggctgtggtacactatgccagttgggtgtaagtttggcatcaatatggtgatgtccctgaagcaggaaaccacaaacttgcatcaggacgggtgaacccagcccaggttggaaatggagcaggccaaaactcccaggctgatcagtaatgggatcttgcctatgaatagccagtgcactgcagccaggacaacagagtgagaacctgtctttaaaaaaaaaaa

SEQ ID NO: 360312 - DNA, 1962 bp, Homo sapiens
agcagagaggcgggtgaatcggacgaggcgagaaataagtgctagttaatactaatcacctcctcctctgtctctcatcctcctttctcccatcaaagcaaaatatggcctcaccaccagccccaaatcagtgctcagaccctctctgtgtctgtgtgccctcctgggagtcagtcagcgctcaggccaggactgtgcagggccagccagcccatgcgctagtcaggagcacaggcaaggggtgcttgtggcagtggccgggcacctgagccccagctcgttgttaaacgtgctgacggcaaggggcaatggagtgagtttcccaactaagaaaccactattatatattttttcccttcagtcacatagacttcagacaactctcctattttttatggatttttcagctcatttcagatgaaggaactaagtcattgtgaactgtctcttgagatctaaaaacaagatgacttttcctggcacatattccaaagcaaagactttgttgcctgctgcttattgtctaatttacagggatatttaattttgtcaggtctatgtatatttatccagctatacttacttgcacagtggattggagagaaaggattctccagtgtgcacactcatcggtactctttctgcatttccctcgtgctgtgtcccgctcgggttccaatggacagtatcagggcttgtttgacttaggtctttcagttttcctttcggttcccttttaaaaatgtgattgttaacctgcctcttgaaagattcaaccgggtgtggtggctcacgcctgtaatcccagcacattgggaggccaaggcaggtggatcacctgaggtcagaagtttgagaccagcctggccaacatggtgaaaccccgtctctactaaaaatacaaaaagtagccaggcgtggtggcgtgtgcctgtagtcccagctacttgggaggctgaggcaggagaatagcttgaacctgggaggtggaggctgcagtgagttgagactgcaccattgcactccagcctgggtgacaaagcaggactccgtctcaaaaaaaaagaaaagattcatgatgctgctgctcccagaaggtttgctggatgtgtttacataggactctaacttgtgtgcactacagttgttcaccagggccagtgattcaccccagtgtgtggccagaccatgactgtgtagcaggaatgttttaatttgtgcttccttagtaaattgaaatatcagctgagagattatttgctgctgttattcaaaaggccatttatgaagttagtatttgagccccataagatctttaaaaagcctccaatcatttaaaggaagaaatcagagttgctataaaattcagtaaaaagctcatagccaaacggctgtgctcagatggaaagtctgagctgaggttggtctcttgccaaaccgtggctgttgtgtgttgttcttcatgtcttcgagttcattttttttcattctgcctattctggcatcagctcacttgaggagtccctcagccttcttgtatttaaggcatcgtcttagactttgtggctctaaagtacctgtctgttgagatttcaagtctcttgtcaccatcctcacacatgacaacaaaacccataatgcataagtggcctttttgaaccaagactttgcaaactgatctctcccccgtgaaggagttgagcacattagcaacaatgtacattaattttggattttcattttcatgttttattttgtaaatattatctgatgtttggagcttgagtatacagactgtaaatatagttcttgtatttgtactaattctgattcttttgctgtatagccttagatgtgcaatgcagacactatctaactgtgtgtggtaaccttgcgtcacggagctgttagtgaacgaggtaaaaataataaaggtacagccagtgcatcagaaaaaaacga

SEQ ID NO: 360313 - DNA, 1223 bp, Homo sapiens
gtgggttgaccgtggctgtgggttgaccgtagcttgtgggttgaccgtgggttgaccgtggctttggttgggcttggaataaaggagatgatacataataaactattctttggttagcattagtaatgcttgtagacactcaaacaaggaaggcgaagtcctgatgatgatttattgtatcaatacctcattttatttggttgtggtctcagtttgcctcactggagaatccactaagaaagatggattttaatgggaagaaaagaattattttctacatcgttcctcatctcttgagtttgtcaaaaagttttctaagaggcagtgtgaagagccagagatgtccgaaattgcctgacttcatgttttggaagattcctaagtcacatgaaatcatctatcaaacacttgtcttccaaacggtgtgaaaaactacagccaagatagcagttagcattcaaggaagccttaaagattgtgattatgtttttttttcctttgcgtgtgggcactatgctttattagaacacattatttttaatcatagtattttttctttgcctctaagaaaatactttcttaatgctcagaaagttgcttccaattaatgtttttttccccttaaaaagagaagctttgagagatatttttgctttcatagctagaacagttgaagtcttcaactgaggttttatagcagattagacatgggtaaatgatgtctgtaatgggttgagttactgagatgacaatctcctgtgccatttggtttgaatgtacttgataggctgcttcaaatcagtcacttcaatgcattttgtgtaaacccagttgtccttttttattcctctttagacataaatgtgctaactattcctttctatacacaatttattttctaagattaaaaataataattgctaggtttggtggcacatgcgtacagccccagctacttaggaggctgaagcaggaggatccctagagcccaggagttctgggctgtggtacactatgccagttgggtgtaagtttggcatcaatatggtgatgtccctgaagcaggaaaccacaaacttgcatcaggacgggtgaacccagcccaggttggaaatggagcaggccaaaactcccaggctgatcagtaatgggatcttgcctatgaatagccagtgcactgcagccaggacaacagagtgagaacctgtctttaaaaaaaaaaa

SEQ ID NO: 360314 - DNA, 4690 bp, Homo sapiens
gcggagtttcgcgagggccgaagcggggcagtgtgacggcagcggtcctgggaggcgcccgcgcgcgtcggagcagctccccgtcctccgcagccgtcaccgccggccgtcgccgcgccctggcctcccgcactcgcgcactcctgtccgccgcccaccgcccacctcccacctcgatgcggtgccgggctgctgcgtgatggggctgcggagcggcgccctgcggctcgcggcggccgctgctcgcgctgaggtgcgtcggtgcccggccccccgcgcccccgcgcgccgcggctcctgttgacccggtccgcccgtcggtctgcagcgcggctgaggaaacttggctgtaacttcaaaagaagatttgattctttatttctggactgcatatatatatataacaaggccattaaaatgtcgggagcctcagtgaaggtggctgtccgggtaaggcccttcaattctcgagagaccagcaaggaatccaaatgcatcattcagatgcaaggcaactcgaccagtattattaacccaaagaatccaaaggaagctccaaagtccttcagcttcgactattcctactggtctcatacctcacccgaagatccctgttttgcatctcaaaaccgtgtgtacaatgacattggcaaggaaatgctcttacacgcctttgagggatataatgtctgtatttttgcctatgggcagactggtgctggaaaatcttatacaatgatgggtaaacaagaagaaagccaggctggcatcattccacagttatgtgaagaactttttgagaaaatcaatgacaactgtaatgaagaaatgtcttactctgtagaggtgagctacatggaaatttactgtgaaagagtacgagatttgctgaatccaaaaaacaagggtaatttgcgtgtgcgtgaacacccacttcttggaccctatgtggaggatctgtccaagttggcagttacttcctacacagacattgctgacctcatggatgctgggaacaaagccaggacagtggcagctacaaacatgaatgaaacaagtagccgttcccacgctgtgtttacgattgttttcacccagaagaaacacgataatgagaccaacctttccactgagaaggtcagtaaaatcagcttggtggatctagcaggaagtgaacgagctgattcaactggtgccaaagggactcgattaaaggaaggagcaaatattaataagtctcttacaactttgggcaaagtcatttcagccttggccgaggtgagtaaaaagaagaagaaaacagattttattccctacagggattctgtacttacttggctccttcgagaaaatttaggtggcaattctcggactgcaatggttgctgctctgagccccgcggatatcaactacgatgagactttgagcactctgagatatgcagatcgtgcaaaacaaattaaatgcaatgctgttatcaatgaggaccccaatgccaaactggttcgtgaattaaaggaggaggtgacacggctgaaggaccttcttcgtgctcagggcctgggagatattattgatattgatccattgatcgatgattactctggaagtggaagcaaatatctgaaagattttcagaacaataagcatagatacttgctagcctctgagaatcaacgccctggccatttttccacagcatccatggggtccctcacttcatccccatcttcctgctcactcagtagtcaggtgggcttgacgtctgtgaccagtattcaagagaggatcatgtctacacctggaggagaggaagctattgaacgtttaaaggaatcagagaagatcattgctgagttgaatgaaacttgggaagagaagcttcgtaaaacagaggccatcagaatggagagagaggctttgttggctgagatgggagttgccattcgggaagatggaggaaccctaggggttttctcacctaaaaagaccccacatcttgttaacctcaatgaagacccactaatgtctgagtgcctactttattacatcaaagatggaattacaagggttggccaagcagatgctgagcggcgccaggacatagtgctgagcggggctcacattaaagaagagcattgtatcttccggagtgagagaagcaacagcggggaagttatcgtgaccttagagccctgtgagcgctcagaaacctacgtaaatggcaagagggtgtcccagcctgttcagctgcgctcaggaaaccgtatcatcatgggtaaaaaccatgttttccgctttaaccacccggaacaagcacgagctgagcgagagaagactccttctgctgagaccccctctgagcctgtggactggacatttgcccagagggagcttctggaaaaacaaggaattgatatgaaacaagagatggagaaaaggctacaggaaatggagatcttatacaaaaaggagaaggaagaagcagatcttcttttggagcagcagagactggactatgagagtaaattgcaggccttgcagaagcaggttgaaacccgatctctggctgcagaaacaactgaagaggaggaagaagaggaagaagttccttggacacagcatgaatttgagttggcccaatgggccttccggaaatggaagtctcatcagtttacttcattacgggacttactctggggcaatgccgtgtacctaaaggaggccaatgccatcagtgtggaactgaaaaagaaggtgcagtttcagtttgttctgctgactgacacactgtactcccctttgcctcctgaattacttcccactgagatggaaaaaactcatgaggacaggcctttccctcgcacagtggtagcagtagaagtccaggatttgaagaatggagcaacacactattggtctttggagaaactcaagcagaggctggatttgatgcgagagatgtatgatagggcaggggagatggcctccagtgcccaagacgaaagcgaaaccactgtgactggcagcgatcccttctatgatcggttccactggttcaaacttgtggggagctcccccattttccacggctgtgtgaacgagcgccttgccgaccgcacaccctcccccactttttccacggccgattccgacatcactgagctggctgacgagcagcaagatgagatggaggattttgatgatgaggcattcgtggatgacgccggctctgacgcagggacggaggagggatcagatctcttcagtgacgggcatgacccgttttacgaccgatccccttggttcattttagtgggaagggcatttgtttacctgagcaatctgctgtatcccgtgcccctgatccacagggtggccatcgtcagtgagaaaggtgaagtgcggggatttctgcgtgtggctgtacaggccatcgcagcggatgaagaagctcctgattatggctctggaattcgacagtcaggaacagctaaaatatcttttgataatgaatactttaatcagagtgacttttcgtctgttgcaatgactcgttctggtctgtccttggaggagttgaggattgtggaaggacagggtcagagttctgaggtcatcactcctccagaagaaatcagtcgaattaatgacttggatttgaagtcaagcactttgctggatggtaagatggtaatggaagggttttctgaagagattggcaaccacctgaaactgggcagtgccttcactttccgagtaacagtgttgcaggccagtggaatcctcccagagtatgcagatatcttctgtcagttcaactttttgcatcgccatgatgaagcattctccacggagcccctcaaaaacaatggcagaggaagtcccctggccttttatcatgtgcagaatattgcagtggagatcactgaatcatttgtggattacatcaaaaccaagcctattgtatttgaagtctttgggcattatcagcagcacccacttcatctgcaaggacaggagcttaacagtccgcctcagccgtgccgccgattcttccctccacccatgccactgtccaagccagttccagccaccaagttaaacacgatgagcaaaaccagccttggccagagcatgagcaagtatgacctcctggtttggtttgagatcagtgaactggagcctacaggagagtatatcccagctgtggttgaccacacagcaggcttgccttgccaggggacatttttgcttcatcagggcagatcacgaggtcaggagatcgagaccatcctggctaacacggtgaaaccccgtctctactaaaaatacaaaaaaattagccaggcgtggtggtgggcgcctgtagtcccaactgctcgggaggctgaggcaggagaatggcatgaacctggaggcggagcttgcagtgagccacgattgtgccactgcactccagcctgggcaacagagcaatactccatctcaaaaaaatatataaataaataaataagatattttgcacatggaaacatctgtggtcttggctactcaggaggctgaggtgggaggatcgcttgagcttgtggaggtgaggttgcagtgagctgagatggcaccactgcatcaagcattgacgacagagtgggcgagactctgtctcgaaaaaaaaatacataaacatatt

SEQ ID NO: 360315 - DNA, 3188 bp, Homo sapiens
gcggagtttcgcgagggccgaagcggggcagtgtgacggcagcggtcctgggaggcgcccgcgcgcgtcggagcagctccccgtcctccgcagccgtcaccgccggccgtcgccgcgccctggcctcccgcactcgcgcactcctgtccgccgcccaccgcccacctcccacctcgatgcggtgccgggctgctgcgtgatggggctgcggagcggcgccctgcggctcgcggcggccgctgctcgcgctgaggtgcgtcggtgcccggccccccgcgcccccgcgcgccgcggctcctgttgacccggtccgcccgtcggtctgcagcgcggctgaggaaacttggctgtaacttcaaaagaagatttgattctttatttctggactgcatatatatatataacaaggccattaaaatgtcgggagcctcagtgaaggtggctgtccgggtaaggcccttcaattctcgagagaccagcaaggaatccaaatgcatcattcagatgcaaggcaactcgaccagtattattaacccaaagaatccaaaggaagctccaaagtccttcagcttcgactattcctactggtctcatacctcacccgaagatccctgttttgcatctcaaaaccgtgtgtacaatgacattggcaaggaaatgctcttacacgcctttgagggatataatgtctgtatttttgcctatgggcagactggtgctggaaaatcttatacaatgatgggtaaacaagaagaaagccaggctggcatcattccacagttatgtgaagaactttttgagaaaatcaatgacaactgtaatgaagaaatgtcttactctgtagaggtgagctacatggaaatttactgtgaaagagtacgagatttgctgaatccaaaaaacaagggtaatttgcgtgtgcgtgaacacccacttcttggaccctatgtggaggatctgtccaagttggcagttacttcctacacagacattgctgacctcatggatgctgggaacaaagccaggacagtggcagctacaaacatgaatgaaacaagtagccgttcccacgctgtgtttacgattgttttcacccagaagaaacacgataatgagaccaacctttccactgagaaggtcagtaaaatcagcttggtggatctagcaggaagtgaacgagctgattcaactggtgccaaagggactcgattaaaggaaggagcaaatattaataagtctcttacaactttgggcaaagtcatttcagccttggccgaggtgagtaaaaagaagaagaaaacagattttattccctacagggattctgtacttacttggctccttcgagaaaatttaggtggcaattctcggactgcaatggttgctgctctgagccccgcggatatcaactacgatgagactttgagcactctgagatatgcagatcgtgcaaaacaaattaaatgcaatgctgttatcaatgaggaccccaatgccaaactggttcgtgaattaaaggaggaggtgacacggctgaaggaccttcttcgtgctcagggcctgggagatattattgatattgatccattgatcgatgattactctggaagtggaagcaaatatctgaaagattttcagaacaataagcatagatacttgctagcctctgagaatcaacgccctggccatttttccacagcatccatggggtccctcacttcatccccatcttcctgctcactcagtagtcaggtgggcttgacgtctgtgaccagtattcaagagaggatcatgtctacacctggaggagaggaagctattgaacgtttaaaggaatcagagaagatcattgctgagttgaatgaaacttgggaagagaagcttcgtaaaacagaggccatcagaatggagagagaggctttgttggctgagatgggagttgccattcgggaagatggaggaaccctaggggttttctcacctaaaaagaccccacatcttgttaacctcaatgaagacccactaatgtctgagtgcctactttattacatcaaagatggaattacaagggttggccaagcagatgctgagcggcgccaggacatagtgctgagcggggctcacattaaagaagagcattgtatcttccggagtgagagaagcaacagcggggaagttatcgtgaccttagagccctgtgagcgctcagaaacctacgtaaatggcaagagggtgtcccagcctgttcagctgcgctcaggaaaccgtatcatcatgggtaaaaaccatgttttccgctttaaccacccggaacaagcacgagctgagcgagagaagactccttctgctgagaccccctctgagcctgtggactggacatttgcccagagggagcttctggaaaaacaaggaattgatatgaaacaagagatggagaaaaggctacaggaaatggagatcttatacaaaaaggagaaggaagaagcagatcttcttttggagcagcagagactggactatgagagtaaattgcaggccttgcagaagcaggttgaaacccgatctctggctgcagaaacaactgaagaggaggaagaagaggaagaagttccttggacacagcatgaatttgagttggcccaatgggccttccggaaatggaagtctcatcagtttacttcattacgggacttactctggggcaatgccgtgtacctaaaggaggccaatgccatcagtgtggaactgaaaaagaaggtgcagtttcagtttgttctgctgactgacacactgtactcccctttgcctcctgaattacttcccactgagatggaaaaaactcatgaggacaggcctttccctcgcacagtggtagcagtagaagtccaggatttgaagaatggagcaacacactattggtctttggagaaactcaagcagaggctggatttgatgcgagagatgtatgatagggcaggggagatggcctccagtgcccaagacgaaagcgaaaccactgtgactggcagcgatcccttctatgatcggttccactggttcaaacttgtggggagggcatttgtttacctgagcaatctgctgtatcccgtgcccctgatccacagggtggccatcgtcagtgagaaaggtgaagtgttgggcgataacatcacgagatcctcgagatc

SEQ ID NO: 360316 - DNA, 2089 bp, Homo sapiens
gcggagtttcgcgagggccgaagcggggcagtgtgacggcagcggtcctgggaggcgcccgcgcgcgtcggagcagctccccgtcctccgcagccgtcaccgccggccgtcgccgcgccctggcctcccgcactcgcgcactcctgtccgccgcccaccgcccacctcccacctcgatgcggtgccgggctgctgcgtgatggggctgcggagcggcgccctgcggctcgcggcggccgctgctcgcgctgaggtgcgtcggtgcccggccccccgcgcccccgcgcgccgcggctcctgttgacccggtccgcccgtcggtctgcagcgcggctgaggaaacttggctgtaacttcaaaagaagatttgattctttatttctggactgcatatatatatataacaaggccattaaaatgtcgggagcctcagtgaaggtggctgtccgggtaaggcccttcaattctcgagagaccagcaaggaatccaaatgcatcattcagatgcaaggcaactcgaccagtattattaacccaaagaatccaaaggaagctccaaagtccttcagcttcgactattcctactggtctcatacctcacccgaagatccctgttttgcatctcaaaaccgtgtgtacaatgacattggcaaggaaatgctcttacacgcctttgagggatataatgtctgtatttttgcctatgggcagactggtgctggaaaatcttatacaatgatgggtaaacaagaagaaagccaggctggcatcattccacagttatgtgaagaactttttgagaaaatcaatgacaactgtaatgaagaaatgtcttactctgtagaggtgagctacatggaaatttactgtgaaagagtacgagatttgctgaatccaaaaaacaagggtaatttgcgtgtgcgtgaacacccacttcttggaccctatgtggaggatctgtccaagttggcagttacttcctacacagacattgctgacctcatggatgctgggaacaaagccaggacagtggcagctacaaacatgaatgaaacaagtagccgttcccacgctgtgtttacgattgttttcacccagaagaaacacgataatgagaccaacctttccactgagaaggtcagtaaaatcagcttggtggatctagcaggaagtgaacgagctgattcaactggtgccaaagggactcgattaaaggaaggagcaaatattaataagtctcttacaactttgggcaaagtcatttcagccttggccgaggtgagtaaaaagaagaagaaaacagattttattccctacagggattctgtacttacttggctccttcgagaaaatttaggtggcaattctcggactgcaatggttgctgctctgagccccgcggatatcaactacgatgagactttgagcactctgagatatgcagatcgtgcaaaacaaattaaatgcaatgctgttatcaatgaggaccccaatgccaaactggttcgtgaattaaaggaggaggtgacacggctgaaggaccttcttcgtgctcagggcctgggagatattattgatacatccatggggtccctcacttcatccccatcttcctgctcactcagtagtcaggtgggcttgacgtctgtgaccagtattcaagagaggatcatgtctacacctggaggagaggaagctattgaacgtttaaaggaatcagagaagatcattgctgagttgaatgaaacttgggaagagaagcttcgtaaaacagaggccatcagaatggagagagaggctttgttggctgagatgggagttgccattcgggaagatggaggaaccctaggggttttctcacctaaaaaggtaggaaacaatgctgtgaaacctaatcagacagagacactttttgtttgtctttgttactggggcacttcatgtctttcaggacctactctcccccttattatcttgatacttgccttaatttcagatatttctgatttcatcttagagcatggtcttatagtacaaaggcagcctatttctaaaatgcctatcttgtttactgtttacaaaagaaaaa

SEQ ID NO: 360317 - DNA, 962 bp, Homo sapiens
  misc_feature (962)..(962): n is a, c, g, or t
ttatgtacattatgttagtggatcttcatgattgcttttcaagatagtaggctaaatattagggtctacagtttataaatgaggagacagactcccagaggttaagcagcttaactaaagtcacatagcatcagtacagttaagaatatggagtttaaatctggccgggtatggtggctcgcacctgtaatcccagcatttgggaggctgagtcggacagattgcttgagctcaggagttagagaccagcctgggcaacatggcgaaaccctgtctctacaaaaaaatgcaaaaattagccgggcgcggtggtgcacgcctttggtctcagctactcaggaagctgaggcaggagaactgcttgaacccaggaggcagaggttgcagtgagccaagatcgcgctattgcactccagcctgggtgacagagcaagactctgcctcagaaaaaaaaaaaaaaataataatgctgggtagtgaccttgtgattgttacagctccctttgatcaaagaaatatagctttcaggcataaacctggaagtctccctctgaatccagcagttgttttcattgatgcttgtcaggttgaagatgctttcagtgatgctctctatactcataaataagcaaatgtggcaggctttgctttctggatcccaggattaaaactaaccgtgaccactactccaaacaaaacacaatatgcctaggggcacggatgaacgtccagggagcccgggccccaggctttgttgcgtgttccctgctcctctccatctggtgtggaaacactgcccagggagaaaggaggaagctcactgtggacagtcttctttccttctgacagaccaggtcatctggcttccgagatcatcagagaagataagtctgtctctttcagctgccagtaagttttccaggatgagaggggaacatccttactcccttgttagacctttn

SEQ ID NO: 360318 - DNA, 438 bp, Homo sapiens
tgcctcagcctcctgagtagctgggattacaggtgcccgccaccacgcccggctaatttttgtatttttagtagagacggggtttcaccatgttggtcaggctggtctcgaactcctgacctcgtgatctgcccacctcagcccctcaaagtgctgggatgacaggcgtgagccaccgcacccggcctgaaaccgattctttattgactagtctcatttgagctgaggaagttgataaatctacatgaatagagtgcgaagcagcccatgccgtgttactactttggtatcattctctcatgccaaagacttgagtttataatccagcaagagctttttccctccctccccctgtgtagtctcactcaattcttgctaatttttttttctgctttagcggatgaagaagctcctgattatggctctggaattcgacag

SEQ ID NO: 360319 - DNA, 5546 bp, Homo sapiens
  misc_feature (273)..(273): n is a, c, g, or t
agcaaacaaactcttctagagatatttttggtaaccacagtgaataaaagattgactgttagtaactattttcatttactagactgccctgaactactcatctgtgagttgagtattttttttttaagtgaaagcatgtttattaagaaaataaaggaataggctgggtgcggtggctcacccctgtaatcccagcactttgggaggccaaggtgggtggatcacctgaagtcaggagttcaagaccagccgggccaacatggtgaaaccccntctctaccaaaaatgcaaaaattaggtaggcgtggtggcaggtgcctgtagtcccagctactcgggaggctgaggcaggagaattacttgaacccaagaggtggaggttgcagtgagccgagatcgggcactccagcctgggcgacagagcaagattctgtctcaaaaaaaaaagaaacaaagaaagaaagtaaagcaataaagaatggctacttcataggcagagcagctgagtattttcttttcccagcaacttttatctcccgaatagaaattctttctaatcccacttactatttggaattctaaatccaacattgctttcccagagatccatgttatcaagatttgcttgtattagttaagagcgattgcttattatctatacagcccttgaaattacattgttgtgaagtcaggctgctgttttagggctaagtaaggttttctgaaaaagaggcaatggtgcaaagacagctggaaagacagagttaaacataccttttaaagtggatcaattttatgtaaccagagtatgatctttctgttttatgtgtttattggaagagttgtcacttaaagtgatattcctcaaatagctaaaaatgtcctgggttttctagatagaaaatatctctaagttgtacttattaaaatgtgacttggggaattttaaattatattcagtggaagtatatttgcccagctttatttttgttcgggtaatttatttctcaaaattttggaggtgaggtctttattgatttgtgtgtgtgaaaaacaagacaaaacacacccactatgaggatcctttaaaaaaaaagctttcttgttatccagataacacactttaatcgtacgacggaaatggatacatttaacatgacaaaaaatagcaaatcctctgctcatggaaagatgatttccaaaccctcttgtcttacagaagaaaacatttggttgactaagaactgacatggtctgctcatagggattcttagcatttttaacatcatccctgtttgactgcttctttttctacattctcatcttctaacttttttctagggctgctctttttagtaaagctaaacaaaacctggcgtcctacagccttactaacctttgttaatccgcctgctcgtcacatctttgtatggcatctgtgctcactcatgggggaaagagattctggaagaagcaacagcaataaccaaggcaaatgtggggaagtgtctgcatgggttgttagcatgatgtgtggggcctaggttttacttcattttcttcgaatagtgaggtcgttaagtcacgccatttgaataattttgtatgaccatagggtgacatactcatccctgttgtcaattctcctaagaaatttggtggcaaatttcatcacttaagccagaaagtggaaatttggattagggatgccaaataagcaaatctttatattgatagaaatgtacataggcgtatgtcttaatagacttccacattattgaggggttttttttggttttgttttgttttttagtttttttggtcttatttttaaatttggttaaggcttttttgcttgctttttcttcgatttaattttccttttttacattttaattttggttattttggggccattttttgattttgtttttccaaaggacgcggattctgatagcggggacgattctgacaagaggtcgtgtgaagagagctggaaactgattacttctctgagagaaaagctacctcccagcaagttgcaaaccattgttaaaaaatgtggcctcccaagcagtgggaagaaacgtgaaccaattaaaatgtatcagataccccaaagaaggcgcttgagtaaagattccaagtgggtcacaatctcagatcttaaaattcaggctgtcaaagagatttgctatgaggttgctctcaatgacttcaggcacagtcggcaggagattgaagccctggccattgtcaagatgaaggagctttgtgccatgtatggcaagaaagaccccaatgagcgggactcctggagggcagtggccagggacgtctgggataccgtcggtgttggggatgagaagatcgaagacgtcatggccactgggaaaggcagcactgatgtagatgacctcaaggttcatatagacaagctggaagatattttgcaagaagtcaaaaagcaaaataacatgaaagacgaggagataaaagtcttaagaaataaaatgctcaaaatggaaaaagtcttgccactgatcggatctcaggaacagaaaagcccaggaagccacaaagcaaaggagcctgttggtgctggtgttagtagcacctctgagaataatgtaagtaaaggagacaatggagaacttgcaaaagaagaacgtgtttcccagctgatgaatggggatccagcttttagacgtggacgtctgcgctggatgaggcaagagcaaattcggtttaagaacttgcaacagcaggagataacaaagcagcttcgtcggcagaatgtacctcataggttcatccctcctgagaaccggaagccccgcttcccctttaagagcaaccctaaacacagaaactcttggagtcctgggacacatatcatcataacagaagatgaggttatagagcttaggattccaaaagacgatgaagcaaggaaagggaataaagaagagagccaagaaaaagggggtaaaggagcttttaaggatccccagtttccatggggctctcaaggaatgagaagtcaagatcacatccaagttagcaagcagcacattaataatcagcaacagccacctcaactacgttggagaagcaattctctcaataatggccagccgaaaagtacgcgctgccaggcatctgcctccgcggagtcattaaactcccacagtggtcaccccactgctgatgtacagactttccaggcaaagcgccatattcatcaacaccgtcagtcttactgtaattataacactggaggtcagttagagggcaatgcagccacttcctatcagaagcagactgacaaacccagccactgtagccagtttgtgacacctccgcggatgaggagacagttctcagcacccaatctcaaagctggtcgagaaaccacagtataaatcagttactggacaaacttgaaatcatggtggaagaaacagacagtgttagctcatgatttgatttggttctacctttggccttgagttcttattatttacattataaatattaactggttttatattgttaagacaaaacactggtaaaagtttcaacacctcccttttgcttgtataccataaatgggcagtttctgaaattttggataaagcatcaagaactcctttttctgaaacgttcctccttttttagtgcctaattaatatacttacttacacagacttgtcccatcttgatgtaagtttgttatgtttttataatgcctataaattaatctgacatccagaaagacctgcctcttagtttatgcagacattcaaaaggagaatttgataagcagaattaaatgtctgttattcataaatgttagaaattggtttaaaaataataacatgcaactgggtgggcacagctttggatttctcatccacgtctgttcccttctttaaatatgattagaattttcgtaagccaaaactaaaggtcttcaaacatatcttgcaatacatagctttgcatcttccacacaacttccacgtcttcttttattctgtattttacaaaaaactcatataatggttttttcttttgaatgtatcagaatatgtatgaaatttgtcatatcagaatctataaattggcactgtgtctgggattctgtttgtggtttgcattttgaagttcaatgtatcatttgacacacatgcacacaaagtgaactattcaccaaaatcatgccaacagaaataccaacaaaaaacttgtgtagcttgtaaggaggttatttggcttgagagggaagaggtgggacagacatgggggacaaagctacagcatatggctctgtggtgctgcttttttccaatagttgatgaaatagtgaaataaaagttaactttggttgggcttggaataaaggagatgatacataataaactattctttggttagcattagtaatgcttgtagacactcaaacaaggaaggcgaagtcctgatgatgatttattgtatcaatacctcattttatttggttgtggtctcagtttgcctcactggagaatccactaagaaagatggattttaatgggaagaaaagaattattttctacatcgttcctcatctcttgagtttgtcaaaaagttttctaagaggcagtgtgaagagccagagatgtccgaaattgcctgacttcatgttttggaagattcctaagtcacatgaaatcatctatcaaacacttgtcttccaaacggtgtgaaaaactacagccaagatagcagttagcattcaaggaagccttaaagattgtgattatgtttttttttcctttgcgtgtgggcactatgctttattagaacacattatttttaatcatagtattttttctttgcctctaagaaaatactttcttaatgctcagaaagttgcttccaattaatgtttttttccccttaaaaagagaagctttgagagatatttttgctttcatagctagaacagttgaagtcttcaactgaggttttatagcagattagacatgggtaaatgatgtctgtaatgggttgagttactgagatgacaatctcctgtgccatttggtttgaatgtacttgataggctgcttcaaatcagtcacttcaatgcattttgtgtaaacccagttgtccttttttattcctctttagacataaatgtgctaactattcctttctatacacaatttattttctaagattaaaaataataattgctaggtttggtggcacatgcgtacagccccagctacttaggaggctgaagcaggaggatccctagagcccaggagttctgggctgtggtacactatgccagttgggtgtaagtttggcatcaatatggtgatgtccctgaagcaggaaaccacaaacttgcatcaggacgggtgaacccagcccaggttggaaatggagcaggccaaaactcccaggctgatcagtaatgggatcttgcctatgaatagccagtgcactgcagccaggacaacagagtgagaacctgtctttaaaaaaaaaaa

SEQ ID NO: 360320 - DNA, 10756 bp, Homo sapiens
gcggagtttcgcgagggccgaagcggggcagtgtgacggcagcggtcctgggaggcgcccgcgcgcgtcggagcagctccccgtcctccgcagccgtcaccgccggccgtcgccgcgccctggcctcccgcactcgcgcactcctgtccgccgcccaccgcccacctcccacctcgatgcggtgccgggctgctgcgtgatggggctgcggagcggcgccctgcggctcgcggcggccgctgctcgcgctgaggtgcgtcggtgcccggccccccgcgcccccgcgcgccgcggctcctgttgacccggtccgcccgtcggtctgcagcgcggctgaggaaacttggctgtaacttcaaaagaagatttgattctttatttctggactgcatatatatatataacaaggccattaaaatgtcgggagcctcagtgaaggtggctgtccgggtaaggcccttcaattctcgagagaccagcaaggaatccaaatgcatcattcagatgcaaggcaactcgaccagtattattaacccaaagaatccaaaggaagctccaaagtccttcagcttcgactattcctactggtctcatacctcacccgaagatccctgttttgcatctcaaaaccgtgtgtacaatgacattggcaaggaaatgctcttacacgcctttgagggatataatgtctgtatttttgcctatgggcagactggtgctggaaaatcttatacaatgatgggtaaacaagaagaaagccaggctggcatcattccacagttatgtgaagaactttttgagaaaatcaatgacaactgtaatgaagaaatgtcttactctgtagaggtgagctacatggaaatttactgtgaaagagtacgagatttgctgaatccaaaaaacaagggtaatttgcgtgtgcgtgaacacccacttcttggaccctatgtggaggatctgtccaagttggcagttacttcctacacagacattgctgacctcatggatgctgggaacaaagccaggacagtggcagctacaaacatgaatgaaacaagtagccgttcccacgctgtgtttacgattgttttcacccagaagaaacacgataatgagaccaacctttccactgagaaggtcagtaaaatcagcttggtggatctagcaggaagtgaacgagctgattcaactggtgccaaagggactcgattaaaggaaggagcaaatattaataagtctcttacaactttgggcaaagtcatttcagccttggccgaggtgagtaaaaagaagaagaaaacagattttattccctacagggattctgtacttacttggctccttcgagaaaatttaggtggcaattctcggactgcaatggttgctgctctgagccccgcggatatcaactacgatgagactttgagcactctgagatatgcagatcgtgcaaaacaaattaaatgcaatgctgttatcaatgaggaccccaatgccaaactggttcgtgaattaaaggaggaggtgacacggctgaaggaccttcttcgtgctcagggcctgggagatattattgatacatccatggggtccctcacttcatccccatcttcctgctcactcagtagtcaggtgggcttgacgtctgtgaccagtattcaagagaggatcatgtctacacctggaggagaggaagctattgaacgtttaaaggaatcagagaagatcattgctgagttgaatgaaacttgggaagagaagcttcgtaaaacagaggccatcagaatggagagagaggctttgttggctgagatgggagttgccattcgggaagatggaggaaccctaggggttttctcacctaaaaagaccccacatcttgttaacctcaatgaagacccactaatgtctgagtgcctactttattacatcaaagatggaattacaagggttggccaagcagatgctgagcggcgccaggacatagtgctgagcggggctcacattaaagaagagcattgtatcttccggagtgagagaagcaacagcggggaagttatcgtgaccttagagccctgtgagcgctcagaaacctacgtaaatggcaagagggtgtcccagcctgttcagctgcgctcaggaaaccgtatcatcatgggtaaaaaccatgttttccgctttaaccacccggaacaagcacgagctgagcgagagaagactccttctgctgagaccccctctgagcctgtggactggacatttgcccagagggagcttctggaaaaacaaggaattgatatgaaacaagagatggagaaaaggctacaggaaatggagatcttatacaaaaaggagaaggaagaagcagatcttcttttggagcagcagagactggactatgagagtaaattgcaggccttgcagaagcaggttgaaacccgatctctggctgcagaaacaactgaagaggaggaagaagaggaagaagttccttggacacagcatgaatttgagttggcccaatgggccttccggaaatggaagtctcatcagtttacttcattacgggacttactctggggcaatgccgtgtacctaaaggaggccaatgccatcagtgtggaactgaaaaagaaggtgcagtttcagtttgttctgctgactgacacactgtactcccctttgcctcctgaattacttcccactgagatggaaaaaactcatgaggacaggcctttccctcgcacagtggtagcagtagaagtccaggatttgaagaatggagcaacacactattggtctttggagaaactcaagcagaggctggatttgatgcgagagatgtatgatagggcaggggagatggcctccagtgcccaagacgaaagcgaaaccactgtgactggcagcgatcccttctatgatcggttccactggttcaaacttgtggggagctcccccattttccacggctgtgtgaacgagcgccttgccgaccgcacaccctcccccactttttccacggccgattccgacatcactgagctggctgacgagcagcaagatgagatggaggattttgatgatgaggcattcgtggatgacgccggctctgacgcagggacggaggagggatcagatctcttcagtgacgggcatgacccgttttacgaccgatccccttggttcattttagtgggaagggcatttgtttacctgagcaatctgctgtatcccgtgcccctgatccacagggtggccatcgtcagtgagaaaggtgaagtgcggggatttctgcgtgtggctgtacaggccatcgcagcggatgaagaagctcctgattatggctctggaattcgacagtcaggaacagctaaaatatcttttgataatgaatactttaatcagagtgacttttcgtctgttgcaatgactcgttctggtctgtccttggaggagttgaggattgtggaaggacagggtcagagttctgaggtcatcactcctccagaagaaatcagtcgaattaatgacttggatttgaagtcaagcactttgctggatggtaagatggtaatggaagggttttctgaagagattggcaaccacctgaaactgggcagtgccttcactttccgagtaacagtgttgcaggccagtggaatcctcccagagtatgcagatatcttctgtcagttcaactttttgcatcgccatgatgaagcattctccacggagcccctcaaaaacaatggcagaggaagtcccctggccttttatcatgtgcagaatattgcagtggagatcactgaatcatttgtggattacatcaaaaccaagcctattgtatttgaagtctttgggcattatcagcagcacccacttcatctgcaaggacaggagcttaacagtccgcctcagccgtgccgccgattcttccctccacccatgccactgtccaagccagttccagccaccaagttaaacacgatgagcaaaaccagccttggccagagcatgagcaagtatgacctcctggtttggtttgagatcagtgaactggagcctacaggagagtatatcccagctgtggttgaccacacagcaggcttgccttgccaggggacatttttgcttcatcagggcatccagcgaaggatcacagtgaccattatccatgagaaggggagcgagctccattggaaagatgttcgtgaactggtggtaggtcgtattcggaataagcctgaggtggatgaagctgcagttgatgccatcctctccctaaatattatttctgccaagtacctgaagtcttcccacaactctagcaggaccttctaccgctttgaggctgtgtgggatagctctctgcataactcccttcttctgaaccgagtgacaccctatggagaaaagatctacatgaccttgtcggcctacctagagctggatcattgcatccagccggctgtcatcaccaaggatgtgtgcatggtcttctactcccgagatgccaagatctcaccaccacgctctctgcgtagcctctttggcagcggctactcaaagtcaccagattcgaatcgagtcactggcatttacgaactcagcttatgcaaaatgtcagacacaggtagtccaggtatgcagagaaggagaagaaaaatcttagatacgtcagtggcatatgtgcggggagaagagaacttagcaggctggcggccccgtggagacagcctcatccttgagcaccagtgggagctggagaagctggagctcctacatgaggtggaaaaaacccgccactttttgctgctgcgtgagagacttggtgacagcatccccaaatccctgagcgactcgttatcccccagcctcagcagtgggaccctcagcacctccaccagtatctcctctcagatctcaaccactacctttgaaagcgccatcacacctagcgagagcagtggctatgattcaggagacatcgaaagcctggtggaccgagagaaagagctggctaccaagtgcctgcaacttctcacccacactttcaacagagaattcagccaggtgcacggcagcgtcagtgactgtaagttgtctgatatctctccaattggacgggatccctctgagtccagtttcagcagtgccaccctcactccctcctccacctgtccctctctggtagactctaggagcaactctctggatcagaagaccccagaagccaattcccgggcctctagtccctgcccagaatttgaacagtttcagattgtcccagctgtggaaacaccatatttggcccgagcaggaaaaaacgaatttctcaatcttgttccagatattgaagaaattagaccaagctcagtggtctctaagaaaggataccttcatttcaaggagcctctttacagtaactgggctaaacattttgttgtcgtccgtcggccttatgtcttcatctataacagtgacaaagaccctgtggagcgtggaatcattaacctgtccacagcacaggtggagtacagtgaggaccagcaggccatggtgaagacaccaaacacctttgctgtctgcacaaagcaccgtggggtccttttgcaggccctcaatgacaaagacatgaacgactggttgtatgccttcaacccacttctagctggcacaatacggtcaaagctttcccgcagatgcccgagccagtcgaaatactaagtgactctgccgagtgccctcactcgccttcgagagataaagaaagcgttacctctcatttctctttgtgattcttgacggtgactcttgtatgtaatcctgtggcttaactacttctccctccttgtccagcacttttctagctctcccgttccccatctccattgctctgtactcttttcttttttcttgtgctgagaatctcgttagtagcatgtggcctaacaaaaggaaaaaatgtttttaaacacacacacacacacacacacacacacacacatacacagacaaaaacacaaaaactctgaggggatctggtgaatctccaaattattgtgggtgtactttggcttccttttgtatgataggtccccatcatgaccacctctgatgtctgtgctgctgtcaccaggcacctttgtttttcaagacaacatactttttttttcttttctctgtttgtgatatcactttaatttttcttgggtggcttagagactaagggaggagacatctggcctttttagaacctgagaggaaaaaaagagtctttttttcccctctgtctctttttgccatggctaatccctgcatttccattcagggaaaaggtggtagtgagcatagaactgcaacagttatattctgagtcaaagttggggctttttacggcataattatggaatttttatttactggtagagaggagacgagaggctttttcagtgggcctgggacagtggctgctcttgactttgtgtgaagggaaatgccaaggatgcttctggtggacttcaggggaccccagggtttggccgtgggccgtgatggcagcaggcggtgggatgcttgtagctcctcacagcaggattcctgcccactgttttttctctgttgggagggaagctcttttctaggagtgtctcagttctgcttttggcattagtgatggtggtggtacagttggaattagtgccatgtcatacacaaatgttccacaaggcgggagtgtttcactttctggtgataaacttgatggtcattgttatgattaagataatgccgggcaggccgggcacagtggctcacgcctgtaatccaagcacttggggaggccgaggcgggcagatcacgagatcaggagttcaagaccagcctggccaatatgatgaaaccccgtctctactaaaaatacaaaattagtcgggtatggtggcacatgcctgtaattccagctgcttgggagcctgaggcaggagaactgcttgaacccaggaggcagaggttgcagtgagccaagatcgcgctattgcactccagcctgggtgacagagcaagactctgcctcagaaaaaaaaaaaaaaataataatgctgggtagtgaccttgtgattgttacagctccctttgatcaaagaaatatagctttcaggcataaacctggaagtctccctctgaatccagcagttgttttcattgatgcttgtcaggttgaagatgctttcagtgatgctctctatactcataaataagcaaatgtggcaggctttgctttctggatcccaggattaaaactaaccgtgaccactactccaaacaaaacacaatatgcctaggggcacggatgaacgtccagggagcccgggccccaggctttgttgcgtgttccctgctcctctccatctggtgtggaaacactgcccagggagaaaggaggaagctcactgtggacagtcttctttccttctgacagaccaggtcatctggcttccgagatcatcagagaagataagtctgtctctttcagctgccagtaagttttccaggatgagaggggaaaaagaaagcctccagtgacttcagttgctttgccagttgtcttgggattgttttacaccatcctttacttcccttgctcagacctctctgtttcaccattgctcaggcattcaggaaagtatctgctcactcccacttggtgagtcctcggccttgaggttgctgactctcaggcgttaggcagctggatgacttcccgcttcacgcagcaaaggccaggggcttgcgcgcctctgcagagttgttgctagggagacttgtgtcatcatccacaaccttgtttctcacttcctggttgggctcatctctgaagaacaggtctcccagcttcgctccttatcactgcattgtgaagaggaggaaaagtgaatcacggagagagaaaggaaaggatagaatcacaggctgcgtctgcacctgaaaagtgacccgcggaaactctatggcggattttttttttaactttcttcttcctgttaaaacataggtcactaactgtgatgttatttgttttctaagtggtatgtgagattttctaatgtagttagaagtttcattgtctgatggacacaatatgcccttccggttctattcaaaccagcaggatctgtcggtgcttagagatggctgcctggactggaatcaaatctaatttcagggaaatgaagatggaatttgaaggtcacttttaaaattaagtcattgatgctgctgttacagagtgtgacagaggatccatgtctgtgacacaggacggtgggaagcctgagagagagtgaaattatgtgatacactgaaatgacttttgtttttcttctaactcatacaaaactggtttggaaagtctttgctttggaagcgtcagacattagaacaggccaaactggactgtctgttcatagcgtgcctgaataagaaggcctcttagggagccagagggagcagagtggtcgtgtcctgcgtgctcttcaccctctggggcgcccctgctgcggctggcaggtgcagacagcctttgctggtccccagcacgtccagggtgggtgctcccttgcccgacagaaccatccccactgtgaggctgtgagagatttgtggcaggaactgtttatgaggctctagttgttgctgttgtggcgggaaagttaagaaacatagcccttaaggaaaccacctttatgtattttcttaaagcacgcctttaaataagcaaaaactttaaaaggcaggaaagagaattcttaggcaaattcagagaaataagtgctagttaatactaatcacctcctcctctgtctctcatcctcctttctcccatcaaagcaaaatatggcctcaccaccagccccaaatcagtgctcagaccctctctgtgtctgtgtgccctcctgggagtcagtcagcgctcaggccaggactgtgcagggccagccagcccatgcgctagtcaggagcacaggcaaggggtgcttgtggcagtggccgggcacctgagccccagctcgttgttaaacgtgctgacggcaaggggcaatggagtgagtttcccaactaagaaaccactattatatattttttcccttcagtcacatagacttcagacaactctcctattttttatggatttttcagctcatttcagatgaaggaactaagtcattgtgaactgtctcttgagatctaaaaacaagatgacttttcctggcacatattccaaagcaaagactttgttgcctgctgcttattgtctaatttacagggatatttaattttgtcaggtctatgtatatttatccagctatacttacttgcacagtggattggagagaaaggattctccagtgtgcacactcatcggtactctttctgcatttccctcgtgctgtgtcccgctcgggttccaatggacagtatcagggcttgtttgacttaggtctttcagttttcctttcggttcccttttaaaaatgtgattgttaacctgcctcttgaaagattcaaccgggtgtggtggctcacgcctgtaatcccagcacattgggaggccaaggcaggtggatcacctgaggtcagaagtttgagaccagcctggccaacatggtgaaaccccgtctctactaaaaatacaaaaagtagccaggcgtggtggcgtgtgcctgtagtcccagctacttgggaggctgaggcaggagaatagcttgaacctgggaggtggaggctgcagtgagttgagactgcaccattgcactccagcctgggtgacaaagcaggactccgtctcaaaaaaaaagaaaagattcatgatgctgctgctcccagaaggtttgctggatgtgtttacataggactctaacttgtgtgcactacagttgttcaccagggccagtgattcaccccagtgtgtggccagaccatgactgtgtagcaggaatgttttaatttgtgcttccttagtaaattgaaatatcagctgagagattatttgctgctgttattcaaaaggccatttatgaagttagtatttgagccccataagatctttaaaaagcctccaatcatttaaaggaagaaatcagagttgctataaaattcagtaaaaagctcatagccaaacggctgtgctcagatggaaagtctgagctgaggttggtctcttgccaaaccgtggctgttgtgtgttgttcttcatgtcttcgagttcattttttttcattctgcctattctggcatcagctcacttgaggagtccctcagccttcttgtatttaaggcatcgtcttagactttgtggctctaaagtacctgtctgttgagatttcaagtctcttgtcaccatcctcacacatgacaacaaaacccataatgcataagtggcctttttgaaccaagactttgcaaactgatctctcccccgtgaaggagttgagcacattagcaacaatgtacattaattttggattttcattttcatgttttattttgtaaatattatctgatgtttggagcttgagtatacagactgtaaatatagttcttgtatttgtactaattctgattcttttgctgtatagccttagatgtgcaatgcagacactatctaactgtgtgtggtaaccttgcgtcacggagctgttagtgaacgaggtaaaaataataaaggtacagccagtgcatcagaaaaaaacga

SEQ ID NO: 360321 - DNA, 10703 bp, Homo sapiens
gcggagtttcgcgagggccgaagcggggcagtgtgacggcagcggtcctgggaggcgcccgcgcgcgtcggagcagctccccgtcctccgcagccgtcaccgccggccgtcgccgcgccctggcctcccgcactcgcgcactcctgtccgccgcccaccgcccacctcccacctcgatgcggtgccgggctgctgcgtgatggggctgcggagcggcgccctgcggctcgcggcggccgctgctcgcgctgaggtgcgtcggtgcccggccccccgcgcccccgcgcgccgcggctcctgttgacccggtccgcccgtcggtctgcagcgcggctgaggaaacttggctgtaacttcaaaagaagatttgattctttatttctggactgcatatatatatataacaaggccattaaaatgtcgggagcctcagtgaaggtggctgtccgggtaaggcccttcaattctcgagagaccagcaaggaatccaaatgcatcattcagatgcaaggcaactcgaccagtattattaacccaaagaatccaaaggaagctccaaagtccttcagcttcgactattcctactggtctcatacctcacccgaagatccctgttttgcatctcaaaaccgtgtgtacaatgacattggcaaggaaatgctcttacacgcctttgagggatataatgtctgtatttttgcctatgggcagactggtgctggaaaatcttatacaatgatgggtaaacaagaagaaagccaggctggcatcattccacagttatgtgaagaactttttgagaaaatcaatgacaactgtaatgaagaaatgtcttactctgtagaggtgagctacatggaaatttactgtgaaagagtacgagatttgctgaatccaaaaaacaagggtaatttgcgtgtgcgtgaacacccacttcttggaccctatgtggaggatctgtccaagttggcagttacttcctacacagacattgctgacctcatggatgctgggaacaaagccaggacagtggcagctacaaacatgaatgaaacaagtagccgttcccacgctgtgtttacgattgttttcacccagaagaaacacgataatgagaccaacctttccactgagaaggtcagtaaaatcagcttggtggatctagcaggaagtgaacgagctgattcaactggtgccaaagggactcgattaaaggaaggagcaaatattaataagtctcttacaactttgggcaaagtcatttcagccttggccgaggtgagtaaaaagaagaagaaaacagattttattccctacagggattctgtacttacttggctccttcgagaaaatttaggtggcaattctcggactgcaatggttgctgctctgagccccgcggatatcaactacgatgagactttgagcactctgagatatgcagatcgtgcaaaacaaattaaatgcaatgctgttatcaatgaggaccccaatgccaaactggttcgtgaattaaaggaggaggtgacacggctgaaggaccttcttcgtgctcagggcctgggagatattattgatacatccatggggtccctcacttcatccccatcttcctgctcactcagtagtcaggtgggcttgacgtctgtgaccagtattcaagagaggatcatgtctacacctggaggagaggaagctattgaacgtttaaaggaatcagagaagatcattgctgagttgaatgaaacttgggaagagaagcttcgtaaaacagaggccatcagaatggagagagaggctttgttggctgagatgggagttgccattcgggaagatggaggaaccctaggggttttctcacctaaaaagaccccacatcttgttaacctcaatgaagacccactaatgtctgagtgcctactttattacatcaaagatggaattacaagggttggccaagcagatgctgagcggcgccaggacatagtgctgagcggggctcacattaaagaagagcattgtatcttccggagtgagagaagcaacagcggggaagttatcgtgaccttagagccctgtgagcgctcagaaacctacgtaaatggcaagagggtgtcccagcctgttcagctgcgctcaggaaaccgtatcatcatgggtaaaaaccatgttttccgctttaaccacccggaacaagcacgagctgagcgagagaagactccttctgctgagaccccctctgagcctgtggactggacatttgcccagagggagcttctggaaaaacaaggaattgatatgaaacaagagatggagaaaaggctacaggaaatggagatcttatacaaaaaggagaaggaagaagcagatcttcttttggagcagcagagactggactatgagagtaaattgcaggccttgcagaagcaggttgaaacccgatctctggctgcagaaacaactgaagaggaggaagaagaggaagaagttccttggacacagcatgaatttgagttggcccaatgggccttccggaaatggaagtctcatcagtttacttcattacgggacttactctggggcaatgccgtgtacctaaaggaggccaatgccatcagtgtggaactgaaaaagaaggtgcagtttcagtttgttctgctgactgacacactgtactcccctttgcctcctgaattacttcccactgagatggaaaaaactcatgaggacaggcctttccctcgcacagtggtagcagtagaagtccaggatttgaagaatggagcaacacactattggtctttggagaaactcaagcagaggctggatttgatgcgagagatgtatgatagggcaggggagatggcctccagtgcccaagacgaaagcgaaaccactgtgactggcagcgatcccttctatgatcggttccactggttcaaacttgtggggagctcccccattttccacggctgtgtgaacgagcgccttgccgaccgcacaccctcccccactttttccacggccgattccgacatcactgagctggctgacgagcagcaagatgagatggaggattttgatgatgaggcattcgtggatgacgccggctctgacgcagggacggaggagggatcagatctcttcagtgacgggcatgacccgttttacgaccgatccccttggttcattttagtgggaagggcatttgtttacctgagcaatctgctgtatcccgtgcccctgatccacagggtggccatcgtcagtgagaaaggtgaagtgcggggatttctgcgtgtggctgtacaggccatcgcagcggatgaagaagctcctgattatggctctggaattcgacagtcaggaacagctaaaatatcttttgataatgaatactttaatcagagtgacttttcgtctgttgcaatgactcgttctggtctgtccttggaggagttgaggattgtggaaggacagggtcagagttctgaggtcatcactcctccagaagaaatcagtcgaattaatgacttggatttgaagtcaagcactttgctggatggtaagatggtaatggaagggttttctgaagagattggcaaccacctgaaactgggcagtgccttcactttccgagtaacagtgttgcaggccagtggaatcctcccagagtatgcagatatcttctgtcagttcaactttttgcatcgccatgatgaagcattctccacggagcccctcaaaaacaatggcagaggaagtcccctggccttttatcatgtgcagaatattgcagtggagatcactgaatcatttgtggattacatcaaaaccaagcctattgtatttgaagtctttgggcattatcagcagcacccacttcatctgcaaggacaggagcttaacagtccgcctcagccgtgccgccgattcttccctccacccatgccactgtccaagccagttccagccaccaagttaaacacgatgagcaaaaccagccttggccagagcatgagcaagtatgacctcctggtttggtttgagatcagtgaactggagcctacaggagagtatatcccagctgtggttgaccacacagcaggcttgccttgccaggggacatttttgcttcatcagggcatccagcgaaggatcacagtgaccattatccatgagaaggggagcgagctccattggaaagatgttcgtgaactggtggtaggtcgtattcggaataagcctgaggtggatgaagctgcagttgatgccatcctctccctaaatattatttctgccaagtacctgaagtcttcccacaactctagcaggaccttctaccgctttgaggctgtgtgggatagctctctgcataactcccttcttctgaaccgagtgacaccctatggagaaaagatctacatgaccttgtcggcctacctagagctggatcattgcatccagccggctgtcatcaccaaggatgtgtgcatggtcttctactcccgagatgccaagatctcaccaccacgctctctgcgtagcctctttggcagcggctactcaaagtcaccagattcgaatcgagtcactggcatttacgaactcagcttatgcaaaatgtcagacacaggtagtccaggtatgcagagaaggagaagaaaaatcttagatacgtcagtggcatatgtgcggggagaagagaacttagcaggctggcggccccgtggagacagcctcatccttgagcaccagtgggagctggagaagctggagctcctacatgaggtggaaaaaacccgccactttttgctgctgcgtgagagacttggtgacagcatccccaaatccctgagcgactcgttatcccccagcctcagcagtgggaccctcagcacctccaccagtatctcctctcagatctcaaccactacctttgaaagcgccatcacacctagcgagagcagtggctatgattcaggagacatcgaaagcctggtggaccgagagaaagagctggctaccaagtgcctgcaacttctcacccacactttcaacagagaattcagccaggtgcacggcagcgtcagtgactgtaagttgtctgatatctctccaattggacgggatccctctgagtccagtttcagcagtgccaccctcactccctcctccacctgtccctctctggtagactctaggagcaactctctggatcagaagaccccagaagccaattcccgggcctctagtccctgcccagaatttgaacagtttcagattgtcccagctgtggaaacaccatatttggcccgagcaggaaaaaacgaatttctcaatcttgttccagatattgaagaaattagaccaagctcagtggtctctaagaaaggataccttcatttcaaggagcctctttacagtaactgggctaaacattttgttgtcgtccgtcggccttatgtcttcatctataacagtgacaaagaccctgtggagcgtggaatcattaacctgtccacagcacaggtggagtacagtgaggaccagcaggccatggtgaagacaccaaacacctttgctgtctgcacaaagcaccgtggggtccttttgcaggccctcaatgacaaagacatgaacgactggttgtatgccttcaacccacttctagctggcacaatacggtcaaagctttcccgcagatgcccgagccagtcgaaatactaagtgactctgccgagtgccctcactcgccttcgagagataaagaaagcgttacctctcatttctctttgtgattcttgacggtgactcttgtatgtaatcctgtggcttaactacttctccctccttgtccagcacttttctagctctcccgttccccatctccattgctctgtactcttttcttttttcttgtgctgagaatctcgttagtagcatgtggcctaacaaaaggaaaaaatgtttttaaacacacacacacacacacacacacacacacacatacacagacaaaaacacaaaaactctgaggggatctggtgaatctccaaattattgtgggtgtactttggcttccttttgtatgataggtccccatcatgaccacctctgatgtctgtgctgctgtcaccaggcacctttgtttttcaagacaacatactttttttttcttttctctgtttgtgatatcactttaatttttcttgggtggcttagagactaagggaggagacatctggcctttttagaacctgagaggaaaaaaagagtctttttttcccctctgtctctttttgccatggctaatccctgcatttccattcagggaaaaggtggtagtgagcatagaactgcaacagttatattctgagtcaaagttggggctttttacggcataattatggaatttttatttactggtagagaggagacgagaggctttttcagtgggcctgggacagtggctgctcttgactttgtgtgaagggaaatgccaaggatgcttctggtggacttcaggggaccccagggtttggccgtgggccgtgatggcagcaggcggtgggatgcttgtagctcctcacagcaggattcctgcccactgttttttctctgttgggagggaagctcttttctaggagtgtctcagttctgcttttggcattagtgatggtggtggtacagttggaattagtgccatgtcatacacaaatgttccacaaggcgggagtgtttcactttctggtgataaacttgatggtcattgttatgattaagataatgccgggcaggccgggcacagtggctcacgcctgtaatccaagcacttggggaggccgaggcgggcagatcacgagatcaggagttcaagaccagcctggccaatatgatgaaaccccgtctctactaaaaatacaaaattagtcgggtatggtggcacatgcctgtaattccagctgcttgggagcctgaggcaggagaactgcttgaacccaggaggcagaggttgcagtgagccaagatcgcgctattgcactccagcctgggtgacagagcaagactctgcctcagaaaaaaaaaaaaaaaaatatagctttcaggcataaacctggaagtctccctctgaatccagcagttgttttcattgatgcttgtcaggttgaagatgctttcagtgatgctctctatactcataaataagcaaatgtggcaggctttgctttctggatcccaggattaaaactaaccgtgaccactactccaaacaaaacacaatatgcctaggggcacggatgaacgtccagggagcccgggccccaggctttgttgcgtgttccctgctcctctccatctggtgtggaaacactgcccagggagaaaggaggaagctcactgtggacagtcttctttccttctgacagaccaggtcatctggcttccgagatcatcagagaagataagtctgtctctttcagctgccagtaagttttccaggatgagaggggaaaaagaaagcctccagtgacttcagttgctttgccagttgtcttgggattgttttacaccatcctttacttcccttgctcagacctctctgtttcaccattgctcaggcattcaggaaagtatctgctcactcccacttggtgagtcctcggccttgaggttgctgactctcaggcgttaggcagctggatgacttcccgcttcacgcagcaaaggccaggggcttgcgcgcctctgcagagttgttgctagggagacttgtgtcatcatccacaaccttgtttctcacttcctggttgggctcatctctgaagaacaggtctcccagcttcgctccttatcactgcattgtgaagaggaggaaaagtgaatcacggagagagaaaggaaaggatagaatcacaggctgcgtctgcacctgaaaagtgacccgcggaaactctatggcggattttttttttaactttcttcttcctgttaaaacataggtcactaactgtgatgttatttgttttctaagtggtatgtgagattttctaatgtagttagaagtttcattgtctgatggacacaatatgcccttccggttctattcaaaccagcaggatctgtcggtgcttagagatggctgcctggactggaatcaaatctaatttcagggaaatgaagatggaatttgaaggtcacttttaaaattaagtcattgatgctgctgttacagagtgtgacagaggatccatgtctgtgacacaggacggtgggaagcctgagagagagtgaaattatgtgatacactgaaatgacttttgtttttcttctaactcatacaaaactggtttggaaagtctttgctttggaagcgtcagacattagaacaggccaaactggactgtctgttcatagcgtgcctgaataagaaggcctcttagggagccagagggagcagagtggtcgtgtcctgcgtgctcttcaccctctggggcgcccctgctgcggctggcaggtgcagacagcctttgctggtccccagcacgtccagggtgggtgctcccttgcccgacagaaccatccccactgtgaggctgtgagagatttgtggcaggaactgtttatgaggctctagttgttgctgttgtggcgggaaagttaagaaacatagcccttaaggaaaccacctttatgtattttcttaaagcacgcctttaaataagcaaaaactttaaaaggcaggaaagagaattcttaggcaaattcagagaaataagtgctagttaatactaatcacctcctcctctgtctctcatcctcctttctcccatcaaagcaaaatatggcctcaccaccagccccaaatcagtgctcagaccctctctgtgtctgtgtgccctcctgggagtcagtcagcgctcaggccaggactgtgcagggccagccagcccatgcgctagtcaggagcacaggcaaggggtgcttgtggcagtggccgggcacctgagccccagctcgttgttaaacgtgctgacggcaaggggcaatggagtgagtttcccaactaagaaaccactattatatattttttcccttcagtcacatagacttcagacaactctcctattttttatggatttttcagctcatttcagatgaaggaactaagtcattgtgaactgtctcttgagatctaaaaacaagatgacttttcctggcacatattccaaagcaaagactttgttgcctgctgcttattgtctaatttacagggatatttaattttgtcaggtctatgtatatttatccagctatacttacttgcacagtggattggagagaaaggattctccagtgtgcacactcatcggtactctttctgcatttccctcgtgctgtgtcccgctcgggttccaatggacagtatcagggcttgtttgacttaggtctttcagttttcctttcggttcccttttaaaaatgtgattgttaacctgcctcttgaaagattcaaccgggtgtggtggctcacgcctgtaatcccagcacattgggaggccaaggcaggtggatcacctgaggtcagaagtttgagaccagcctggccaacatggtgaaaccccgtctctactaaaaatacaaaaagtagccaggcgtggtggcgtgtgcctgtagtcccagctacttgggaggctgaggcaggagaatagcttgaacctgggaggtggaggctgcagtgagttgagactgcaccattgcactccagcctgggtgacaaagcaggactccgtctcaaaaaaaaagaaaagattcatgatgctgctgctcccagaaggtttgctggatgtgtttacataggactctaacttgtgtgcactacagttgttcaccagggccagtgattcaccccagtgtgtggccagaccatgactgtgtagcaggaatgttttaatttgtgcttccttagtaaattgaaatatcagctgagagattatttgctgctgttattcaaaaggccatttatgaagttagtatttgagccccataagatctttaaaaagcctccaatcatttaaaggaagaaatcagagttgctataaaattcagtaaaaagctcatagccaaacggctgtgctcagatggaaagtctgagctgaggttggtctcttgccaaaccgtggctgttgtgtgttgttcttcatgtcttcgagttcattttttttcattctgcctattctggcatcagctcacttgaggagtccctcagccttcttgtatttaaggcatcgtcttagactttgtggctctaaagtacctgtctgttgagatttcaagtctcttgtcaccatcctcacacatgacaacaaaacccataatgcataagtggcctttttgaaccaagactttgcaaactgatctctcccccgtgaaggagttgagcacattagcaacaatgtacattaattttggattttcattttcatgttttattttgtaaatattatctgatgtttggagcttgagtatacagactgtaaatatagttcttgtatttgtactaattctgattcttttgctgtatagccttagatgtgcaatgcagacactatctaactgtgtgtggtaaccttgcgtcacggagctgttagtgaacgaggtaaaaataataaaggtacagccagtgcatcagaaaaaaacga

SEQ ID NO: 360322 - DNA, 10876 bp, Homo sapiens
gcggagtttcgcgagggccgaagcggggcagtgtgacggcagcggtcctgggaggcgcccgcgcgcgtcggagcagctccccgtcctccgcagccgtcaccgccggccgtcgccgcgccctggcctcccgcactcgcgcactcctgtccgccgcccaccgcccacctcccacctcgatgcggtgccgggctgctgcgtgatggggctgcggagcggcgccctgcggctcgcggcggccgctgctcgcgctgaggtgcgtcggtgcccggccccccgcgcccccgcgcgccgcggctcctgttgacccggtccgcccgtcggtctgcagcgcggctgaggaaacttggctgtaacttcaaaagaagatttgattctttatttctggactgcatatatatatataacaaggccattaaaatgtcgggagcctcagtgaaggtggctgtccgggtaaggcccttcaattctcgagagaccagcaaggaatccaaatgcatcattcagatgcaaggcaactcgaccagtattattaacccaaagaatccaaaggaagctccaaagtccttcagcttcgactattcctactggtctcatacctcacccgaagatccctgttttgcatctcaaaaccgtgtgtacaatgacattggcaaggaaatgctcttacacgcctttgagggatataatgtctgtatttttgcctatgggcagactggtgctggaaaatcttatacaatgatgggtaaacaagaagaaagccaggctggcatcattccacagttatgtgaagaactttttgagaaaatcaatgacaactgtaatgaagaaatgtcttactctgtagaggtgagctacatggaaatttactgtgaaagagtacgagatttgctgaatccaaaaaacaagggtaatttgcgtgtgcgtgaacacccacttcttggaccctatgtggaggatctgtccaagttggcagttacttcctacacagacattgctgacctcatggatgctgggaacaaagccaggacagtggcagctacaaacatgaatgaaacaagtagccgttcccacgctgtgtttacgattgttttcacccagaagaaacacgataatgagaccaacctttccactgagaaggtcagtaaaatcagcttggtggatctagcaggaagtgaacgagctgattcaactggtgccaaagggactcgattaaaggaaggagcaaatattaataagtctcttacaactttgggcaaagtcatttcagccttggccgaggtgagtaaaaagaagaagaaaacagattttattccctacagggattctgtacttacttggctccttcgagaaaatttaggtggcaattctcggactgcaatggttgctgctctgagccccgcggatatcaactacgatgagactttgagcactctgagatatgcagatcgtgcaaaacaaattaaatgcaatgctgttatcaatgaggaccccaatgccaaactggttcgtgaattaaaggaggaggtgacacggctgaaggaccttcttcgtgctcagggcctgggagatattattgatattgatccattgatcgatgattactctggaagtggaagcaaatatctgaaagattttcagaacaataagcatagatacttgctagcctctgagaatcaacgccctggccatttttccacagcatccatggggtccctcacttcatccccatcttcctgctcactcagtagtcaggtgggcttgacgtctgtgaccagtattcaagagaggatcatgtctacacctggaggagaggaagctattgaacgtttaaaggaatcagagaagatcattgctgagttgaatgaaacttgggaagagaagcttcgtaaaacagaggccatcagaatggagagagaggctttgttggctgagatgggagttgccattcgggaagatggaggaaccctaggggttttctcacctaaaaagaccccacatcttgttaacctcaatgaagacccactaatgtctgagtgcctactttattacatcaaagatggaattacaagggttggccaagcagatgctgagcggcgccaggacatagtgctgagcggggctcacattaaagaagagcattgtatcttccggagtgagagaagcaacagcggggaagttatcgtgaccttagagccctgtgagcgctcagaaacctacgtaaatggcaagagggtgtcccagcctgttcagctgcgctcaggaaaccgtatcatcatgggtaaaaaccatgttttccgctttaaccacccggaacaagcacgagctgagcgagagaagactccttctgctgagaccccctctgagcctgtggactggacatttgcccagagggagcttctggaaaaacaaggaattgatatgaaacaagagatggagaaaaggctacaggaaatggagatcttatacaaaaaggagaaggaagaagcagatcttcttttggagcagcagagactggactatgagagtaaattgcaggccttgcagaagcaggttgaaacccgatctctggctgcagaaacaactgaagaggaggaagaagaggaagaagttccttggacacagcatgaatttgagttggcccaatgggccttccggaaatggaagtctcatcagtttacttcattacgggacttactctggggcaatgccgtgtacctaaaggaggccaatgccatcagtgtggaactgaaaaagaaggtgcagtttcagtttgttctgctgactgacacactgtactcccctttgcctcctgaattacttcccactgagatggaaaaaactcatgaggacaggcctttccctcgcacagtggtagcagtagaagtccaggatttgaagaatggagcaacacactattggtctttggagaaactcaagcagaggctggatttgatgcgagagatgtatgatagggcaggggagatggcctccagtgcccaagacgaaagcgaaaccactgtgactggcagcgatcccttctatgatcggttccactggttcaaacttgtggggagctcccccattttccacggctgtgtgaacgagcgccttgccgaccgcacaccctcccccactttttccacggccgattccgacatcactgagctggctgacgagcagcaagatgagatggaggattttgatgatgaggcattcgtggatgacgccggctctgacgcagggacggaggagggatcagatctcttcagtgacgggcatgacccgttttacgaccgatccccttggttcattttagtgggaagggcatttgtttacctgagcaatctgctgtatcccgtgcccctgatccacagggtggccatcgtcagtgagaaaggtgaagtgcggggatttctgcgtgtggctgtacaggccatcgcagcggatgaagaagctcctgattatggctctggaattcgacagtcaggaacagctaaaatatcttttgataatgaatactttaatcagagtgacttttcgtctgttgcaatgactcgttctggtctgtccttggaggagttgaggattgtggaaggacagggtcagagttctgaggtcatcactcctccagaagaaatcagtcgaattaatgacttggatttgaagtcaagcactttgctggatggtaagatggtaatggaagggttttctgaagagattggcaaccacctgaaactgggcagtgccttcactttccgagtaacagtgttgcaggccagtggaatcctcccagagtatgcagatatcttctgtcagttcaactttttgcatcgccatgatgaagcattctccacggagcccctcaaaaacaatggcagaggaagtcccctggccttttatcatgtgcagaatattgcagtggagatcactgaatcatttgtggattacatcaaaaccaagcctattgtatttgaagtctttgggcattatcagcagcacccacttcatctgcaaggacaggagcttaacagtccgcctcagccgtgccgccgattcttccctccacccatgccactgtccaagccagttccagccaccaagttaaacacgatgagcaaaaccagccttggccagagcatgagcaagtatgacctcctggtttggtttgagatcagtgaactggagcctacaggagagtatatcccagctgtggttgaccacacagcaggcttgccttgccaggggacatttttgcttcatcagggcatccagcgaaggatcacagtgaccattatccatgagaaggggagcgagctccattggaaagatgttcgtgaactggtggtaggtcgtattcggaataagcctgaggtggatgaagctgcagttgatgccatcctctccctaaatattatttctgccaagtacctgaagtcttcccacaactctagcaggaccttctaccgctttgaggctgtgtgggatagctctctgcataactcccttcttctgaaccgagtgacaccctatggagaaaagatctacatgaccttgtcggcctacctagagctggatcattgcatccagccggctgtcatcaccaaggatgtgtgcatggtcttctactcccgagatgccaagatctcaccaccacgctctctgcgtagcctctttggcagcggctactcaaagtcaccagattcgaatcgagtcactggcatttacgaactcagcttatgcaaaatgtcagacacaggtagtccaggtatgcagagaaggagaagaaaaatcttagatacgtcagtggcatatgtgcggggagaagagaacttagcaggctggcggccccgtggagacagcctcatccttgagcaccagtgggagctggagaagctggagctcctacatgaggtggaaaaaacccgccactttttgctgctgcgtgagagacttggtgacagcatccccaaatccctgagcgactcgttatcccccagcctcagcagtgggaccctcagcacctccaccagtatctcctctcagatctcaaccactacctttgaaagcgccatcacacctagcgagagcagtggctatgattcaggagacatcgaaagcctggtggaccgagagaaagagctggctaccaagtgcctgcaacttctcacccacactttcaacagagaattcagccaggtgcacggcagcgtcagtgactgtaagttgtctgatatctctccaattggacgggatccctctgagtccagtttcagcagtgccaccctcactccctcctccacctgtccctctctggtagactctaggagcaactctctggatcagaagaccccagaagccaattcccgggcctctagtccctgcccagaatttgaacagtttcagattgtcccagctgtggaaacaccatatttggcccgagcaggaaaaaacgaatttctcaatcttgttccagatattgaagaaattagaccaagctcagtggtctctaagaaaggataccttcatttcaaggagcctctttacagtaactgggctaaacattttgttgtcgtccgtcggccttatgtcttcatctataacagtgacaaagaccctgtggagcgtggaatcattaacctgtccacagcacaggtggagtacagtgaggaccagcaggccatggtgaagacaccaaacacctttgctgtctgcacaaagcaccgtggggtccttttgcaggccctcaatgacaaagacatgaacgactggttgtatgccttcaacccacttctagctggcacaatacggtcaaagctttcccgcagatgcccgagccagtcgaaatactaagtgactctgccgagtgccctcactcgccttcgagagataaagaaagcgttacctctcatttctctttgtgattcttgacggtgactcttgtatgtaatcctgtggcttaactacttctccctccttgtccagcacttttctagctctcccgttccccatctccattgctctgtactcttttcttttttcttgtgctgagaatctcgttagtagcatgtggcctaacaaaaggaaaaaatgtttttaaacacacacacacacacacacacacacacacacatacacagacaaaaacacaaaaactctgaggggatctggtgaatctccaaattattgtgggtgtactttggcttccttttgtatgataggtccccatcatgaccacctctgatgtctgtgctgctgtcaccaggcacctttgtttttcaagacaacatactttttttttcttttctctgtttgtgatatcactttaatttttcttgggtggcttagagactaagggaggagacatctggcctttttagaacctgagaggaaaaaaagagtctttttttcccctctgtctctttttgccatggctaatccctgcatttccattcagggaaaaggtggtagtgagcatagaactgcaacagttatattctgagtcaaagttggggctttttacggcataattatggaatttttatttactggtagagaggagacgagaggctttttcagtgggcctgggacagtggctgctcttgactttgtgtgaagggaaatgccaaggatgcttctggtggacttcaggggaccccagggtttggccgtgggccgtgatggcagcaggcggtgggatgcttgtagctcctcacagcaggattcctgcccactgttttttctctgttgggagggaagctcttttctaggagtgtctcagttctgcttttggcattagtgatggtggtggtacagttggaattagtgccatgtcatacacaaatgttccacaaggcgggagtgtttcactttctggtgataaacttgatggtcattgttatgattaagataatgccgggcaggccgggcacagtggctcacgcctgtaatccaagcacttggggaggccgaggcgggcagatcacgagatcaggagttcaagaccagcctggccaatatgatgaaaccccgtctctactaaaaatacaaaattagtcgggtatggtggcacatgcctgtaattccagctgcttgggagcctgaggcaggagaactgcttgaacccaggaggcagaggttgcagtgagccaagatcgcgctattgcactccagcctgggtgacagagcaagactctgcctcagaaaaaaaaaaaaaaataataatgctgggtagtgaccttgtgattgttacagctccctttgatcaaagaaatatagctttcaggcataaacctggaagtctccctctgaatccagcagttgttttcattgatgcttgtcaggttgaagatgctttcagtgatgctctctatactcataaataagcaaatgtggcaggctttgctttctggatcccaggattaaaactaaccgtgaccactactccaaacaaaacacaatatgcctaggggcacggatgaacgtccagggagcccgggccccaggctttgttgcgtgttccctgctcctctccatctggtgtggaaacactgcccagggagaaaggaggaagctcactgtggacagtcttctttccttctgacagaccaggtcatctggcttccgagatcatcagagaagataagtctgtctctttcagctgccagtaagttttccaggatgagaggggaaaaagaaagcctccagtgacttcagttgctttgccagttgtcttgggattgttttacaccatcctttacttcccttgctcagacctctctgtttcaccattgctcaggcattcaggaaagtatctgctcactcccacttggtgagtcctcggccttgaggttgctgactctcaggcgttaggcagctggatgacttcccgcttcacgcagcaaaggccaggggcttgcgcgcctctgcagagttgttgctagggagacttgtgtcatcatccacaaccttgtttctcacttcctggttgggctcatctctgaagaacaggtctcccagcttcgctccttatcactgcattgtgaagaggaggaaaagtgaatcacggagagagaaaggaaaggatagaatcacaggctgcgtctgcacctgaaaagtgacccgcggaaactctatggcggattttttttttaactttcttcttcctgttaaaacataggtcactaactgtgatgttatttgttttctaagtggtatgtgagattttctaatgtagttagaagtttcattgtctgatggacacaatatgcccttccggttctattcaaaccagcaggatctgtcggtgcttagagatggctgcctggactggaatcaaatctaatttcagggaaatgaagatggaatttgaaggtcacttttaaaattaagtcattgatgctgctgttacagagtgtgacagaggatccatgtctgtgacacaggacggtgggaagcctgagagagagtgaaattatgtgatacactgaaatgacttttgtttttcttctaactcatacaaaactggtttggaaagtctttgctttggaagcgtcagacattagaacaggccaaactggactgtctgttcatagcgtgcctgaataagaaggcctcttagggagccagagggagcagagtggtcgtgtcctgcgtgctcttcaccctctggggcgcccctgctgcggctggcaggtgcagacagcctttgctggtccccagcacgtccagggtgggtgctcccttgcccgacagaaccatccccactgtgaggctgtgagagatttgtggcaggaactgtttatgaggctctagttgttgctgttgtggcgggaaagttaagaaacatagcccttaaggaaaccacctttatgtattttcttaaagcacgcctttaaataagcaaaaactttaaaaggcaggaaagagaattcttaggcaaattcagagaaataagtgctagttaatactaatcacctcctcctctgtctctcatcctcctttctcccatcaaagcaaaatatggcctcaccaccagccccaaatcagtgctcagaccctctctgtgtctgtgtgccctcctgggagtcagtcagcgctcaggccaggactgtgcagggccagccagcccatgcgctagtcaggagcacaggcaaggggtgcttgtggcagtggccgggcacctgagccccagctcgttgttaaacgtgctgacggcaaggggcaatggagtgagtttcccaactaagaaaccactattatatattttttcccttcagtcacatagacttcagacaactctcctattttttatggatttttcagctcatttcagatgaaggaactaagtcattgtgaactgtctcttgagatctaaaaacaagatgacttttcctggcacatattccaaagcaaagactttgttgcctgctgcttattgtctaatttacagggatatttaattttgtcaggtctatgtatatttatccagctatacttacttgcacagtggattggagagaaaggattctccagtgtgcacactcatcggtactctttctgcatttccctcgtgctgtgtcccgctcgggttccaatggacagtatcagggcttgtttgacttaggtctttcagttttcctttcggttcccttttaaaaatgtgattgttaacctgcctcttgaaagattcaaccgggtgtggtggctcacgcctgtaatcccagcacattgggaggccaaggcaggtggatcacctgaggtcagaagtttgagaccagcctggccaacatggtgaaaccccgtctctactaaaaatacaaaaagtagccaggcgtggtggcgtgtgcctgtagtcccagctacttgggaggctgaggcaggagaatagcttgaacctgggaggtggaggctgcagtgagttgagactgcaccattgcactccagcctgggtgacaaagcaggactccgtctcaaaaaaaaagaaaagattcatgatgctgctgctcccagaaggtttgctggatgtgtttacataggactctaacttgtgtgcactacagttgttcaccagggccagtgattcaccccagtgtgtggccagaccatgactgtgtagcaggaatgttttaatttgtgcttccttagtaaattgaaatatcagctgagagattatttgctgctgttattcaaaaggccatttatgaagttagtatttgagccccataagatctttaaaaagcctccaatcatttaaaggaagaaatcagagttgctataaaattcagtaaaaagctcatagccaaacggctgtgctcagatggaaagtctgagctgaggttggtctcttgccaaaccgtggctgttgtgtgttgttcttcatgtcttcgagttcattttttttcattctgcctattctggcatcagctcacttgaggagtccctcagccttcttgtatttaaggcatcgtcttagactttgtggctctaaagtacctgtctgttgagatttcaagtctcttgtcaccatcctcacacatgacaacaaaacccataatgcataagtggcctttttgaaccaagactttgcaaactgatctctcccccgtgaaggagttgagcacattagcaacaatgtacattaattttggattttcattttcatgttttattttgtaaatattatctgatgtttggagcttgagtatacagactgtaaatatagttcttgtatttgtactaattctgattcttttgctgtatagccttagatgtgcaatgcagacactatctaactgtgtgtggtaaccttgcgtcacggagctgttagtgaacgaggtaaaaataataaaggtacagccagtgcatcagaaaaaaacga

SEQ ID NO: 360323 - DNA, 9358 bp, Homo sapiens
gcggagtttcgcgagggccgaagcggggcagtgtgacggcagcggtcctgggaggcgcccgcgcgcgtcggagcagctccccgtcctccgcagccgtcaccgccggccgtcgccgcgccctggcctcccgcactcgcgcactcctgtccgccgcccaccgcccacctcccacctcgatgcggtgccgggctgctgcgtgatggggctgcggagcggcgccctgcggctcgcggcggccgctgctcgcgctgaggtgcgtcggtgcccggccccccgcgcccccgcgcgccgcggctcctgttgacccggtccgcccgtcggtctgcagcgcggctgaggaaacttggctgtaacttcaaaagaagatttgattctttatttctggactgcatatatatatataacaaggccattaaaatgtcgggagcctcagtgaaggtggctgtccgggtaaggcccttcaattctcgagagaccagcaaggaatccaaatgcatcattcagatgcaaggcaactcgaccagtattattaacccaaagaatccaaaggaagctccaaagtccttcagcttcgactattcctactggtctcatacctcagctcacattaaagaagagcattgtatcttccggagtgagagaagcaacagcggggaagttatcgtgaccttagagccctgtgagcgctcagaaacctacgtaaatggcaagagggtgtcccagcctgttcagctgcgctcaggaaaccgtatcatcatgggtaaaaaccatgttttccgctttaaccacccggaacaagcacgagctgagcgagagaagactccttctgctgagaccccctctgagcctgtggactggacatttgcccagagggagcttctggaaaaacaaggaattgatatgaaacaagagatggagaaaaggctacaggaaatggagatcttatacaaaaaggagaaggaagaagcagatcttcttttggagcagcagagactggactatgagagtaaattgcaggccttgcagaagcaggttgaaacccgatctctggctgcagaaacaactgaagaggaggaagaagaggaagaagttccttggacacagcatgaatttgagttggcccaatgggccttccggaaatggaagtctcatcagtttacttcattacgggacttactctggggcaatgccgtgtacctaaaggaggccaatgccatcagtgtggaactgaaaaagaaggtgcagtttcagtttgttctgctgactgacacactgtactcccctttgcctcctgaattacttcccactgagatggaaaaaactcatgaggacaggcctttccctcgcacagtggtagcagtagaagtccaggatttgaagaatggagcaacacactattggtctttggagaaactcaagcagaggctggatttgatgcgagagatgtatgatagggcaggggagatggcctccagtgcccaagacgaaagcgaaaccactgtgactggcagcgatcccttctatgatcggttccactggttcaaacttgtggggagctcccccattttccacggctgtgtgaacgagcgccttgccgaccgcacaccctcccccactttttccacggccgattccgacatcactgagctggctgacgagcagcaagatgagatggaggattttgatgatgaggcattcgtggatgacgccggctctgacgcagggacggaggagggatcagatctcttcagtgacgggcatgacccgttttacgaccgatccccttggttcattttagtgggaagggcatttgtttacctgagcaatctgctgtatcccgtgcccctgatccacagggtggccatcgtcagtgagaaaggtgaagtgcggggatttctgcgtgtggctgtacaggccatcgcagcggatgaagaagctcctgattatggctctggaattcgacagtcaggaacagctaaaatatcttttgataatgaatactttaatcagagtgacttttcgtctgttgcaatgactcgttctggtctgtccttggaggagttgaggattgtggaaggacagggtcagagttctgaggtcatcactcctccagaagaaatcagtcgaattaatgacttggatttgaagtcaagcactttgctggatggtaagatggtaatggaagggttttctgaagagattggcaaccacctgaaactgggcagtgccttcactttccgagtaacagtgttgcaggccagtggaatcctcccagagtatgcagatatcttctgtcagttcaactttttgcatcgccatgatgaagcattctccacggagcccctcaaaaacaatggcagaggaagtcccctggccttttatcatgtgcagaatattgcagtggagatcactgaatcatttgtggattacatcaaaaccaagcctattgtatttgaagtctttgggcattatcagcagcacccacttcatctgcaaggacaggagcttaacagtccgcctcagccgtgccgccgattcttccctccacccatgccactgtccaagccagttccagccaccaagttaaacacgatgagcaaaaccagccttggccagagcatgagcaagtatgacctcctggtttggtttgagatcagtgaactggagcctacaggagagtatatcccagctgtggttgaccacacagcaggcttgccttgccaggggacatttttgcttcatcagggcatccagcgaaggatcacagtgaccattatccatgagaaggggagcgagctccattggaaagatgttcgtgaactggtggtaggtcgtattcggaataagcctgaggtggatgaagctgcagttgatgccatcctctccctaaatattatttctgccaagtacctgaagtcttcccacaactctagcaggaccttctaccgctttgaggctgtgtgggatagctctctgcataactcccttcttctgaaccgagtgacaccctatggagaaaagatctacatgaccttgtcggcctacctagagctggatcattgcatccagccggctgtcatcaccaaggatgtgtgcatggtcttctactcccgagatgccaagatctcaccaccacgctctctgcgtagcctctttggcagcggctactcaaagtcaccagattcgaatcgagtcactggcatttacgaactcagcttatgcaaaatgtcagacacaggtagtccaggtatgcagagaaggagaagaaaaatcttagatacgtcagtggcatatgtgcggggagaagagaacttagcaggctggcggccccgtggagacagcctcatccttgagcaccagtgggagctggagaagctggagctcctacatgaggtggaaaaaacccgccactttttgctgctgcgtgagagacttggtgacagcatccccaaatccctgagcgactcgttatcccccagcctcagcagtgggaccctcagcacctccaccagtatctcctctcagatctcaaccactacctttgaaagcgccatcacacctagcgagagcagtggctatgattcaggagacatcgaaagcctggtggaccgagagaaagagctggctaccaagtgcctgcaacttctcacccacactttcaacagagaattcagccaggtgcacggcagcgtcagtgactgtaagttgtctgatatctctccaattggacgggatccctctgagtccagtttcagcagtgccaccctcactccctcctccacctgtccctctctggtagactctaggagcaactctctggatcagaagaccccagaagccaattcccgggcctctagtccctgcccagaatttgaacagtttcagattgtcccagctgtggaaacaccatatttggcccgagcaggaaaaaacgaatttctcaatcttgttccagatattgaagaaattagaccaagctcagtggtctctaagaaaggataccttcatttcaaggagcctctttacagtaactgggctaaacattttgttgtcgtccgtcggccttatgtcttcatctataacagtgacaaagaccctgtggagcgtggaatcattaacctgtccacagcacaggtggagtacagtgaggaccagcaggccatggtgaagacaccaaacacctttgctgtctgcacaaagcaccgtggggtccttttgcaggccctcaatgacaaagacatgaacgactggttgtatgccttcaacccacttctagctggcacaatacggtcaaagctttcccgcagatgcccgagccagtcgaaatactaagtgactctgccgagtgccctcactcgccttcgagagataaagaaagcgttacctctcatttctctttgtgattcttgacggtgactcttgtatgtaatcctgtggcttaactacttctccctccttgtccagcacttttctagctctcccgttccccatctccattgctctgtactcttttcttttttcttgtgctgagaatctcgttagtagcatgtggcctaacaaaaggaaaaaatgtttttaaacacacacacacacacacacacacacacacacatacacagacaaaaacacaaaaactctgaggggatctggtgaatctccaaattattgtgggtgtactttggcttccttttgtatgataggtccccatcatgaccacctctgatgtctgtgctgctgtcaccaggcacctttgtttttcaagacaacatactttttttttcttttctctgtttgtgatatcactttaatttttcttgggtggcttagagactaagggaggagacatctggcctttttagaacctgagaggaaaaaaagagtctttttttcccctctgtctctttttgccatggctaatccctgcatttccattcagggaaaaggtggtagtgagcatagaactgcaacagttatattctgagtcaaagttggggctttttacggcataattatggaatttttatttactggtagagaggagacgagaggctttttcagtgggcctgggacagtggctgctcttgactttgtgtgaagggaaatgccaaggatgcttctggtggacttcaggggaccccagggtttggccgtgggccgtgatggcagcaggcggtgggatgcttgtagctcctcacagcaggattcctgcccactgttttttctctgttgggagggaagctcttttctaggagtgtctcagttctgcttttggcattagtgatggtggtggtacagttggaattagtgccatgtcatacacaaatgttccacaaggcgggagtgtttcactttctggtgataaacttgatggtcattgttatgattaagataatgccgggcaggccgggcacagtggctcacgcctgtaatccaagcacttggggaggccgaggcgggcagatcacgagatcaggagttcaagaccagcctggccaatatgatgaaaccccgtctctactaaaaatacaaaattagtcgggtatggtggcacatgcctgtaattccagctgcttgggagcctgaggcaggagaactgcttgaacccaggaggcagaggttgcagtgagccaagatcgcgctattgcactccagcctgggtgacagagcaagactctgcctcagaaaaaaaaaaaaaaataataatgctgggtagtgaccttgtgattgttacagctccctttgatcaaagaaatatagctttcaggcataaacctggaagtctccctctgaatccagcagttgttttcattgatgcttgtcaggttgaagatgctttcagtgatgctctctatactcataaataagcaaatgtggcaggctttgctttctggatcccaggattaaaactaaccgtgaccactactccaaacaaaacacaatatgcctaggggcacggatgaacgtccagggagcccgggccccaggctttgttgcgtgttccctgctcctctccatctggtgtggaaacactgcccagggagaaaggaggaagctcactgtggacagtcttctttccttctgacagaccaggtcatctggcttccgagatcatcagagaagataagtctgtctctttcagctgccagtaagttttccaggatgagaggggaaaaagaaagcctccagtgacttcagttgctttgccagttgtcttgggattgttttacaccatcctttacttcccttgctcagacctctctgtttcaccattgctcaggcattcaggaaagtatctgctcactcccacttggtgagtcctcggccttgaggttgctgactctcaggcgttaggcagctggatgacttcccgcttcacgcagcaaaggccaggggcttgcgcgcctctgcagagttgttgctagggagacttgtgtcatcatccacaaccttgtttctcacttcctggttgggctcatctctgaagaacaggtctcccagcttcgctccttatcactgcattgtgaagaggaggaaaagtgaatcacggagagagaaaggaaaggatagaatcacaggctgcgtctgcacctgaaaagtgacccgcggaaactctatggcggattttttttttaactttcttcttcctgttaaaacataggtcactaactgtgatgttatttgttttctaagtggtatgtgagattttctaatgtagttagaagtttcattgtctgatggacacaatatgcccttccggttctattcaaaccagcaggatctgtcggtgcttagagatggctgcctggactggaatcaaatctaatttcagggaaatgaagatggaatttgaaggtcacttttaaaattaagtcattgatgctgctgttacagagtgtgacagaggatccatgtctgtgacacaggacggtgggaagcctgagagagagtgaaattatgtgatacactgaaatgacttttgtttttcttctaactcatacaaaactggtttggaaagtctttgctttggaagcgtcagacattagaacaggccaaactggactgtctgttcatagcgtgcctgaataagaaggcctcttagggagccagagggagcagagtggtcgtgtcctgcgtgctcttcaccctctggggcgcccctgctgcggctggcaggtgcagacagcctttgctggtccccagcacgtccagggtgggtgctcccttgcccgacagaaccatccccactgtgaggctgtgagagatttgtggcaggaactgtttatgaggctctagttgttgctgttgtggcgggaaagttaagaaacatagcccttaaggaaaccacctttatgtattttcttaaagcacgcctttaaataagcaaaaactttaaaaggcaggaaagagaattcttaggcaaattcagagaaataagtgctagttaatactaatcacctcctcctctgtctctcatcctcctttctcccatcaaagcaaaatatggcctcaccaccagccccaaatcagtgctcagaccctctctgtgtctgtgtgccctcctgggagtcagtcagcgctcaggccaggactgtgcagggccagccagcccatgcgctagtcaggagcacaggcaaggggtgcttgtggcagtggccgggcacctgagccccagctcgttgttaaacgtgctgacggcaaggggcaatggagtgagtttcccaactaagaaaccactattatatattttttcccttcagtcacatagacttcagacaactctcctattttttatggatttttcagctcatttcagatgaaggaactaagtcattgtgaactgtctcttgagatctaaaaacaagatgacttttcctggcacatattccaaagcaaagactttgttgcctgctgcttattgtctaatttacagggatatttaattttgtcaggtctatgtatatttatccagctatacttacttgcacagtggattggagagaaaggattctccagtgtgcacactcatcggtactctttctgcatttccctcgtgctgtgtcccgctcgggttccaatggacagtatcagggcttgtttgacttaggtctttcagttttcctttcggttcccttttaaaaatgtgattgttaacctgcctcttgaaagattcaaccgggtgtggtggctcacgcctgtaatcccagcacattgggaggccaaggcaggtggatcacctgaggtcagaagtttgagaccagcctggccaacatggtgaaaccccgtctctactaaaaatacaaaaagtagccaggcgtggtggcgtgtgcctgtagtcccagctacttgggaggctgaggcaggagaatagcttgaacctgggaggtggaggctgcagtgagttgagactgcaccattgcactccagcctgggtgacaaagcaggactccgtctcaaaaaaaaagaaaagattcatgatgctgctgctcccagaaggtttgctggatgtgtttacataggactctaacttgtgtgcactacagttgttcaccagggccagtgattcaccccagtgtgtggccagaccatgactgtgtagcaggaatgttttaatttgtgcttccttagtaaattgaaatatcagctgagagattatttgctgctgttattcaaaaggccatttatgaagttagtatttgagccccataagatctttaaaaagcctccaatcatttaaaggaagaaatcagagttgctataaaattcagtaaaaagctcatagccaaacggctgtgctcagatggaaagtctgagctgaggttggtctcttgccaaaccgtggctgttgtgtgttgttcttcatgtcttcgagttcattttttttcattctgcctattctggcatcagctcacttgaggagtccctcagccttcttgtatttaaggcatcgtcttagactttgtggctctaaagtacctgtctgttgagatttcaagtctcttgtcaccatcctcacacatgacaacaaaacccataatgcataagtggcctttttgaaccaagactttgcaaactgatctctcccccgtgaaggagttgagcacattagcaacaatgtacattaattttggattttcattttcatgttttattttgtaaatattatctgatgtttggagcttgagtatacagactgtaaatatagttcttgtatttgtactaattctgattcttttgctgtatagccttagatgtgcaatgcagacactatctaactgtgtgtggtaaccttgcgtcacggagctgttagtgaacgaggtaaaaataataaaggtacagccagtgcatcagaaaaaaacga

SEQ ID NO: 360324 - DNA, 7899 bp, Homo sapiens
gagctcttgaatgggctcctccgccaacctgcccgagcagcattcatagagcagtatcttgaaagtctgcttccaggtgtgactcttctccctacagtagttaagttttagagcatgatttggtgtgtgttggtcttcgtcaacagttctgccaagcgtttgcttgttcattatctgtgctgaaaaggcagctggaggcaaatctgagaggctaggactgagaaggggtcttaagacaaggccagaagtcagctcacagttgcaggaagatgttctcagtgaatctgaaagccagtttatctctccatggatgttctgacatttgtctcctggtttctgtctttagggcatttgtttacctgagcaatctgctgtatcccgtgcccctgatccacagggtggccatcgtcagtgagaaaggtgaagtgcggggatttctgcgtgtggctgtacaggccatcgcagcggatgaagaagctcctgattatggctctggaattcgacagtcaggaacagctaaaatatcttttgataatgaatactttaatcagagtgacttttcgtctgttgcaatgactcgttctggtctgtccttggaggagttgaggattgtggaaggacagggtcagagttctgaggtcatcactcctccagaagaaatcagtcgaattaatgacttggatttgaagtcaagcactttgctggatggtaagatggtaatggaagggttttctgaagagattggcaaccacctgaaactgggcagtgccttcactttccgagtaacagtgttgcaggccagtggaatcctcccagagtatgcagatatcttctgtcagttcaactttttgcatcgccatgatgaagcattctccacggagcccctcaaaaacaatggcagaggaagtcccctggccttttatcatgtgcagaatattgcagtggagatcactgaatcatttgtggattacatcaaaaccaagcctattgtatttgaagtctttgggcattatcagcagcacccacttcatctgcaaggacaggagcttaacagtccgcctcagccgtgccgccgattcttccctccacccatgccactgtccaagccagttccagccaccaagttaaacacgatgagcaaaaccagccttggccagagcatgagcaagtatgacctcctggtttggtttgagatcagtgaactggagcctacaggagagtatatcccagctgtggttgaccacacagcaggcttgccttgccaggggacatttttgcttcatcagggcatccagcgaaggatcacagtgaccattatccatgagaaggggagcgagctccattggaaagatgttcgtgaactggtggtaggtcgtattcggaataagcctgaggtggatgaagctgcagttgatgccatcctctccctaaatattatttctgccaagtacctgaagtcttcccacaactctagcaggaccttctaccgctttgaggctgtgtgggatagctctctgcataactcccttcttctgaaccgagtgacaccctatggagaaaagatctacatgaccttgtcggcctacctagagctggatcattgcatccagccggctgtcatcaccaaggatgtgtgcatggtcttctactcccgagatgccaagatctcaccaccacgctctctgcgtagcctctttggcagcggctactcaaagtcaccagattcgaatcgagtcactggcatttacgaactcagcttatgcaaaatgtcagacacaggtagtccaggtatgcagagaaggagaagaaaaatcttagatacgtcagtggcatatgtgcggggagaagagaacttagcaggctggcggccccgtggagacagcctcatccttgagcaccagtgggagctggagaagctggagctcctacatgaggtggaaaaaacccgccactttttgctgctgcgtgagagacttggtgacagcatccccaaatccctgagcgactcgttatcccccagcctcagcagtgggaccctcagcacctccaccagtatctcctctcagatctcaaccactacctttgaaagcgccatcacacctagcgagagcagtggctatgattcaggagacatcgaaagcctggtggaccgagagaaagagctggctaccaagtgcctgcaacttctcacccacactttcaacagagaattcagccaggtgcacggcagcgtcagtgactgtaagttgtctgatatctctccaattggacgggatccctctgagtccagtttcagcagtgccaccctcactccctcctccacctgtccctctctggtagactctaggagcaactctctggatcagaagaccccagaagccaattcccgggcctctagtccctgcccagaatttgaacagtttcagattgtcccagctgtggaaacaccatatttggcccgagcaggaaaaaacgaatttctcaatcttgttccagatattgaagaaattagaccaagctcagtggtctctaagaaaggataccttcatttcaaggagcctctttacagtaactgggctaaacattttgttgtcgtccgtcggccttatgtcttcatctataacagtgacaaagaccctgtggagcgtggaatcattaacctgtccacagcacaggtggagtacagtgaggaccagcaggccatggtgaagacaccaaacacctttgctgtctgcacaaagcaccgtggggtccttttgcaggccctcaatgacaaagacatgaacgactggttgtatgccttcaacccacttctagctggcacaatacggtcaaagctttcccgcagatgcccgagccagtcgaaatactaagtgactctgccgagtgccctcactcgccttcgagagataaagaaagcgttacctctcatttctctttgtgattcttgacggtgactcttgtatgtaatcctgtggcttaactacttctccctccttgtccagcacttttctagctctcccgttccccatctccattgctctgtactcttttcttttttcttgtgctgagaatctcgttagtagcatgtggcctaacaaaaggaaaaaatgtttttaaacacacacacacacacacacacacacacacacatacacagacaaaaacacaaaaactctgaggggatctggtgaatctccaaattattgtgggtgtactttggcttccttttgtatgataggtccccatcatgaccacctctgatgtctgtgctgctgtcaccaggcacctttgtttttcaagacaacatactttttttttcttttctctgtttgtgatatcactttaatttttcttgggtggcttagagactaagggaggagacatctggcctttttagaacctgagaggaaaaaaagagtctttttttcccctctgtctctttttgccatggctaatccctgcatttccattcagggaaaaggtggtagtgagcatagaactgcaacagttatattctgagtcaaagttggggctttttacggcataattatggaatttttatttactggtagagaggagacgagaggctttttcagtgggcctgggacagtggctgctcttgactttgtgtgaagggaaatgccaaggatgcttctggtggacttcaggggaccccagggtttggccgtgggccgtgatggcagcaggcggtgggatgcttgtagctcctcacagcaggattcctgcccactgttttttctctgttgggagggaagctcttttctaggagtgtctcagttctgcttttggcattagtgatggtggtggtacagttggaattagtgccatgtcatacacaaatgttccacaaggcgggagtgtttcactttctggtgataaacttgatggtcattgttatgattaagataatgccgggcaggccgggcacagtggctcacgcctgtaatccaagcacttggggaggccgaggcgggcagatcacgagatcaggagttcaagaccagcctggccaatatgatgaaaccccgtctctactaaaaatacaaaattagtcgggtatggtggcacatgcctgtaattccagctgcttgggagcctgaggcaggagaactgcttgaacccaggaggcagaggttgcagtgagccaagatcgcgctattgcactccagcctgggtgacagagcaagactctgcctcagaaaaaaaaaaaaaaataataatgctgggtagtgaccttgtgattgttacagctccctttgatcaaagaaatatagctttcaggcataaacctggaagtctccctctgaatccagcagttgttttcattgatgcttgtcaggttgaagatgctttcagtgatgctctctatactcataaataagcaaatgtggcaggctttgctttctggatcccaggattaaaactaaccgtgaccactactccaaacaaaacacaatatgcctaggggcacggatgaacgtccagggagcccgggccccaggctttgttgcgtgttccctgctcctctccatctggtgtggaaacactgcccagggagaaaggaggaagctcactgtggacagtcttctttccttctgacagaccaggtcatctggcttccgagatcatcagagaagataagtctgtctctttcagctgccagtaagttttccaggatgagaggggaaaaagaaagcctccagtgacttcagttgctttgccagttgtcttgggattgttttacaccatcctttacttcccttgctcagacctctctgtttcaccattgctcaggcattcaggaaagtatctgctcactcccacttggtgagtcctcggccttgaggttgctgactctcaggcgttaggcagctggatgacttcccgcttcacgcagcaaaggccaggggcttgcgcgcctctgcagagttgttgctagggagacttgtgtcatcatccacaaccttgtttctcacttcctggttgggctcatctctgaagaacaggtctcccagcttcgctccttatcactgcattgtgaagaggaggaaaagtgaatcacggagagagaaaggaaaggatagaatcacaggctgcgtctgcacctgaaaagtgacccgcggaaactctatggcggattttttttttaactttcttcttcctgttaaaacataggtcactaactgtgatgttatttgttttctaagtggtatgtgagattttctaatgtagttagaagtttcattgtctgatggacacaatatgcccttccggttctattcaaaccagcaggatctgtcggtgcttagagatggctgcctggactggaatcaaatctaatttcagggaaatgaagatggaatttgaaggtcacttttaaaattaagtcattgatgctgctgttacagagtgtgacagaggatccatgtctgtgacacaggacggtgggaagcctgagagagagtgaaattatgtgatacactgaaatgacttttgtttttcttctaactcatacaaaactggtttggaaagtctttgctttggaagcgtcagacattagaacaggccaaactggactgtctgttcatagcgtgcctgaataagaaggcctcttagggagccagagggagcagagtggtcgtgtcctgcgtgctcttcaccctctggggcgcccctgctgcggctggcaggtgcagacagcctttgctggtccccagcacgtccagggtgggtgctcccttgcccgacagaaccatccccactgtgaggctgtgagagatttgtggcaggaactgtttatgaggctctagttgttgctgttgtggcgggaaagttaagaaacatagcccttaaggaaaccacctttatgtattttcttaaagcacgcctttaaataagcaaaaactttaaaaggcaggaaagagaattcttaggcaaattcagagaaataagtgctagttaatactaatcacctcctcctctgtctctcatcctcctttctcccatcaaagcaaaatatggcctcaccaccagccccaaatcagtgctcagaccctctctgtgtctgtgtgccctcctgggagtcagtcagcgctcaggccaggactgtgcagggccagccagcccatgcgctagtcaggagcacaggcaaggggtgcttgtggcagtggccgggcacctgagccccagctcgttgttaaacgtgctgacggcaaggggcaatggagtgagtttcccaactaagaaaccactattatatattttttcccttcagtcacatagacttcagacaactctcctattttttatggatttttcagctcatttcagatgaaggaactaagtcattgtgaactgtctcttgagatctaaaaacaagatgacttttcctggcacatattccaaagcaaagactttgttgcctgctgcttattgtctaatttacagggatatttaattttgtcaggtctatgtatatttatccagctatacttacttgcacagtggattggagagaaaggattctccagtgtgcacactcatcggtactctttctgcatttccctcgtgctgtgtcccgctcgggttccaatggacagtatcagggcttgtttgacttaggtctttcagttttcctttcggttcccttttaaaaatgtgattgttaacctgcctcttgaaagattcaaccgggtgtggtggctcacgcctgtaatcccagcacattgggaggccaaggcaggtggatcacctgaggtcagaagtttgagaccagcctggccaacatggtgaaaccccgtctctactaaaaatacaaaaagtagccaggcgtggtggcgtgtgcctgtagtcccagctacttgggaggctgaggcaggagaatagcttgaacctgggaggtggaggctgcagtgagttgagactgcaccattgcactccagcctgggtgacaaagcaggactccgtctcaaaaaaaaagaaaagattcatgatgctgctgctcccagaaggtttgctggatgtgtttacataggactctaacttgtgtgcactacagttgttcaccagggccagtgattcaccccagtgtgtggccagaccatgactgtgtagcaggaatgttttaatttgtgcttccttagtaaattgaaatatcagctgagagattatttgctgctgttattcaaaaggccatttatgaagttagtatttgagccccataagatctttaaaaagcctccaatcatttaaaggaagaaatcagagttgctataaaattcagtaaaaagctcatagccaaacggctgtgctcagatggaaagtctgagctgaggttggtctcttgccaaaccgtggctgttgtgtgttgttcttcatgtcttcgagttcattttttttcattctgcctattctggcatcagctcacttgaggagtccctcagccttcttgtatttaaggcatcgtcttagactttgtggctctaaagtacctgtctgttgagatttcaagtctcttgtcaccatcctcacacatgacaacaaaacccataatgcataagtggcctttttgaaccaagactttgcaaactgatctctcccccgtgaaggagttgagcacattagcaacaatgtacattaattttggattttcattttcatgttttattttgtaaatattatctgatgtttggagcttgagtatacagactgtaaatatagttcttgtatttgtactaattctgattcttttgctgtatagccttagatgtgcaatgcagacactatctaactgtgtgtggtaaccttgcgtcacggagctgttagtgaacgaggtaaaaataataaaggtacagccagtgcatcagaaaaaaacga

SEQ ID NO: 360325 - DNA, 7652 bp, Homo sapiens
tatcttctgtgtgtcgagacctgtgggaaaacgcttgctgtctgggggagagaggcatataaatacattattacagtgaaatcattgctattaaggaaaaaaacattactagtaatgtgggaacacaaagctgccagggtaagtcaggaaagactgcctggaagaggtgacatttgaatccacaacagactcttatgtaactatgccatccacaggctctcgcactaactgtggaagcttgagtctgctaaattttgtctgtacaaaatgacattgtttttatttttagtaaaaagcttttacaaaggaagaggagttaattgaatgtacttcttcactctctctaaagcattcttgcatatacctccatatagctaagtgatcagggtcagttaatttttcagtcatttttgaaataaaatctaaaatgccctctgtgcaatatggaaaaggttcttgacaaggaaagtaaataacttaaagaatctgcttaagtggaatgcttctttctgtaggatccacattgggctcttgaaagagattctgataaaaccgtttaatgcattgttcacgagtctttttattttttttatgaagctttttgcatcgccatgatgaagcattctccacggagcccctcaaaaacaatggcagaggaagtcccctggccttttatcatgtgcagaatattgcagtggagatcactgaatcatttgtggattacatcaaaaccaagcctattgtatttgaagtctttgggcattatcagcagcacccacttcatctgcaaggacaggagcttaacagtccgcctcagccgtgccgccgattcttccctccacccatgccactgtccaagccagttccagccaccaagttaaacacgatgagcaaaaccagccttggccagagcatgagcaagtatgacctcctggtttggtttgagatcagtgaactggagcctacaggagagtatatcccagctgtggttgaccacacagcaggcttgccttgccaggggacatttttgcttcatcagggcatccagcgaaggatcacagtgaccattatccatgagaaggggagcgagctccattggaaagatgttcgtgaactggtggtaggtcgtattcggaataagcctgaggtggatgaagctgcagttgatgccatcctctccctaaatattatttctgccaagtacctgaagtcttcccacaactctagcaggaccttctaccgctttgaggctgtgtgggatagctctctgcataactcccttcttctgaaccgagtgacaccctatggagaaaagatctacatgaccttgtcggcctacctagagctggatcattgcatccagccggctgtcatcaccaaggatgtgtgcatggtcttctactcccgagatgccaagatctcaccaccacgctctctgcgtagcctctttggcagcggctactcaaagtcaccagattcgaatcgagtcactggcatttacgaactcagcttatgcaaaatgtcagacacaggtagtccaggtatgcagagaaggagaagaaaaatcttagatacgtcagtggcatatgtgcggggagaagagaacttagcaggctggcggccccgtggagacagcctcatccttgagcaccagtgggagctggagaagctggagctcctacatgaggtggaaaaaacccgccactttttgctgctgcgtgagagacttggtgacagcatccccaaatccctgagcgactcgttatcccccagcctcagcagtgggaccctcagcacctccaccagtatctcctctcagatctcaaccactacctttgaaagcgccatcacacctagcgagagcagtggctatgattcaggagacatcgaaagcctggtggaccgagagaaagagctggctaccaagtgcctgcaacttctcacccacactttcaacagagaattcagccaggtgcacggcagcgtcagtgactgtaagttgtctgatatctctccaattggacgggatccctctgagtccagtttcagcagtgccaccctcactccctcctccacctgtccctctctggtagactctaggagcaactctctggatcagaagaccccagaagccaattcccgggcctctagtccctgcccagaatttgaacagtttcagattgtcccagctgtggaaacaccatatttggcccgagcaggaaaaaacgaatttctcaatcttgttccagatattgaagaaattagaccaagctcagtggtctctaagaaaggataccttcatttcaaggagcctctttacagtaactgggctaaacattttgttgtcgtccgtcggccttatgtcttcatctataacagtgacaaagaccctgtggagcgtggaatcattaacctgtccacagcacaggtggagtacagtgaggaccagcaggccatggtgaagacaccaaacacctttgctgtctgcacaaagcaccgtggggtccttttgcaggccctcaatgacaaagacatgaacgactggttgtatgccttcaacccacttctagctggcacaatacggtcaaagctttcccgcagatgcccgagccagtcgaaatactaagtgactctgccgagtgccctcactcgccttcgagagataaagaaagcgttacctctcatttctctttgtgattcttgacggtgactcttgtatgtaatcctgtggcttaactacttctccctccttgtccagcacttttctagctctcccgttccccatctccattgctctgtactcttttcttttttcttgtgctgagaatctcgttagtagcatgtggcctaacaaaaggaaaaaatgtttttaaacacacacacacacacacacacacacacacacatacacagacaaaaacacaaaaactctgaggggatctggtgaatctccaaattattgtgggtgtactttggcttccttttgtatgataggtccccatcatgaccacctctgatgtctgtgctgctgtcaccaggcacctttgtttttcaagacaacatactttttttttcttttctctgtttgtgatatcactttaatttttcttgggtggcttagagactaagggaggagacatctggcctttttagaacctgagaggaaaaaaagagtctttttttcccctctgtctctttttgccatggctaatccctgcatttccattcagggaaaaggtggtagtgagcatagaactgcaacagttatattctgagtcaaagttggggctttttacggcataattatggaatttttatttactggtagagaggagacgagaggctttttcagtgggcctgggacagtggctgctcttgactttgtgtgaagggaaatgccaaggatgcttctggtggacttcaggggaccccagggtttggccgtgggccgtgatggcagcaggcggtgggatgcttgtagctcctcacagcaggattcctgcccactgttttttctctgttgggagggaagctcttttctaggagtgtctcagttctgcttttggcattagtgatggtggtggtacagttggaattagtgccatgtcatacacaaatgttccacaaggcgggagtgtttcactttctggtgataaacttgatggtcattgttatgattaagataatgccgggcaggccgggcacagtggctcacgcctgtaatccaagcacttggggaggccgaggcgggcagatcacgagatcaggagttcaagaccagcctggccaatatgatgaaaccccgtctctactaaaaatacaaaattagtcgggtatggtggcacatgcctgtaattccagctgcttgggagcctgaggcaggagaactgcttgaacccaggaggcagaggttgcagtgagccaagatcgcgctattgcactccagcctgggtgacagagcaagactctgcctcagaaaaaaaaaaaaaaataataatgctgggtagtgaccttgtgattgttacagctccctttgatcaaagaaatatagctttcaggcataaacctggaagtctccctctgaatccagcagttgttttcattgatgcttgtcaggttgaagatgctttcagtgatgctctctatactcataaataagcaaatgtggcaggctttgctttctggatcccaggattaaaactaaccgtgaccactactccaaacaaaacacaatatgcctaggggcacggatgaacgtccagggagcccgggccccaggctttgttgcgtgttccctgctcctctccatctggtgtggaaacactgcccagggagaaaggaggaagctcactgtggacagtcttctttccttctgacagaccaggtcatctggcttccgagatcatcagagaagataagtctgtctctttcagctgccagtaagttttccaggatgagaggggaaaaagaaagcctccagtgacttcagttgctttgccagttgtcttgggattgttttacaccatcctttacttcccttgctcagacctctctgtttcaccattgctcaggcattcaggaaagtatctgctcactcccacttggtgagtcctcggccttgaggttgctgactctcaggcgttaggcagctggatgacttcccgcttcacgcagcaaaggccaggggcttgcgcgcctctgcagagttgttgctagggagacttgtgtcatcatccacaaccttgtttctcacttcctggttgggctcatctctgaagaacaggtctcccagcttcgctccttatcactgcattgtgaagaggaggaaaagtgaatcacggagagagaaaggaaaggatagaatcacaggctgcgtctgcacctgaaaagtgacccgcggaaactctatggcggattttttttttaactttcttcttcctgttaaaacataggtcactaactgtgatgttatttgttttctaagtggtatgtgagattttctaatgtagttagaagtttcattgtctgatggacacaatatgcccttccggttctattcaaaccagcaggatctgtcggtgcttagagatggctgcctggactggaatcaaatctaatttcagggaaatgaagatggaatttgaaggtcacttttaaaattaagtcattgatgctgctgttacagagtgtgacagaggatccatgtctgtgacacaggacggtgggaagcctgagagagagtgaaattatgtgatacactgaaatgacttttgtttttcttctaactcatacaaaactggtttggaaagtctttgctttggaagcgtcagacattagaacaggccaaactggactgtctgttcatagcgtgcctgaataagaaggcctcttagggagccagagggagcagagtggtcgtgtcctgcgtgctcttcaccctctggggcgcccctgctgcggctggcaggtgcagacagcctttgctggtccccagcacgtccagggtgggtgctcccttgcccgacagaaccatccccactgtgaggctgtgagagatttgtggcaggaactgtttatgaggctctagttgttgctgttgtggcgggaaagttaagaaacatagcccttaaggaaaccacctttatgtattttcttaaagcacgcctttaaataagcaaaaactttaaaaggcaggaaagagaattcttaggcaaattcagagaaataagtgctagttaatactaatcacctcctcctctgtctctcatcctcctttctcccatcaaagcaaaatatggcctcaccaccagccccaaatcagtgctcagaccctctctgtgtctgtgtgccctcctgggagtcagtcagcgctcaggccaggactgtgcagggccagccagcccatgcgctagtcaggagcacaggcaaggggtgcttgtggcagtggccgggcacctgagccccagctcgttgttaaacgtgctgacggcaaggggcaatggagtgagtttcccaactaagaaaccactattatatattttttcccttcagtcacatagacttcagacaactctcctattttttatggatttttcagctcatttcagatgaaggaactaagtcattgtgaactgtctcttgagatctaaaaacaagatgacttttcctggcacatattccaaagcaaagactttgttgcctgctgcttattgtctaatttacagggatatttaattttgtcaggtctatgtatatttatccagctatacttacttgcacagtggattggagagaaaggattctccagtgtgcacactcatcggtactctttctgcatttccctcgtgctgtgtcccgctcgggttccaatggacagtatcagggcttgtttgacttaggtctttcagttttcctttcggttcccttttaaaaatgtgattgttaacctgcctcttgaaagattcaaccgggtgtggtggctcacgcctgtaatcccagcacattgggaggccaaggcaggtggatcacctgaggtcagaagtttgagaccagcctggccaacatggtgaaaccccgtctctactaaaaatacaaaaagtagccaggcgtggtggcgtgtgcctgtagtcccagctacttgggaggctgaggcaggagaatagcttgaacctgggaggtggaggctgcagtgagttgagactgcaccattgcactccagcctgggtgacaaagcaggactccgtctcaaaaaaaaagaaaagattcatgatgctgctgctcccagaaggtttgctggatgtgtttacataggactctaacttgtgtgcactacagttgttcaccagggccagtgattcaccccagtgtgtggccagaccatgactgtgtagcaggaatgttttaatttgtgcttccttagtaaattgaaatatcagctgagagattatttgctgctgttattcaaaaggccatttatgaagttagtatttgagccccataagatctttaaaaagcctccaatcatttaaaggaagaaatcagagttgctataaaattcagtaaaaagctcatagccaaacggctgtgctcagatggaaagtctgagctgaggttggtctcttgccaaaccgtggctgttgtgtgttgttcttcatgtcttcgagttcattttttttcattctgcctattctggcatcagctcacttgaggagtccctcagccttcttgtatttaaggcatcgtcttagactttgtggctctaaagtacctgtctgttgagatttcaagtctcttgtcaccatcctcacacatgacaacaaaacccataatgcataagtggcctttttgaaccaagactttgcaaactgatctctcccccgtgaaggagttgagcacattagcaacaatgtacattaattttggattttcattttcatgttttattttgtaaatattatctgatgtttggagcttgagtatacagactgtaaatatagttcttgtatttgtactaattctgattcttttgctgtatagccttagatgtgcaatgcagacactatctaactgtgtgtggtaaccttgcgtcacggagctgttagtgaacgaggtaaaaataataaaggtacagccagtgcatcagaaaaaaacga

SEQ ID NO: 360326 - DNA, 6000 bp, Homo sapiens
gcggagtttcgcgagggccgaagcggggcagtgtgacggcagcggtcctgggaggcgcccgcgcgcgtcggagcagctccccgtcctccgcagccgtcaccgccggccgtcgccgcgccctggcctcccgcactcgcgcactcctgtccgccgcccaccgcccacctcccacctcgatgcggtgccgggctgctgcgtgatggggctgcggagcggcgccctgcggctcgcggcggccgctgctcgcgctgaggtgcgtcggtgcccggccccccgcgcccccgcgcgccgcggctcctgttgacccggtccgcccgtcggtctgcagcgcggctgaggaaacttggctgtaacttcaaaagaagatttgattctttatttctggactgcatatatatatataacaaggccattaaaatgtcgggagcctcagtgaaggtggctgtccgggtaaggcccttcaattctcgagagaccagcaaggaatccaaatgcatcattcagatgcaaggcaactcgaccagtattattaacccaaagaatccaaaggaagctccaaagtccttcagcttcgactattcctactggtctcatacctcacccgaagatccctgttttgcatctcaaaaccgtgtgtacaatgacattggcaaggaaatgctcttacacgcctttgagggatataatgtctgtatttttgcctatgggcagactggtgctggaaaatcttatacaatgatgggtaaacaagaagaaagccaggctggcatcattccacagttatgtgaagaactttttgagaaaatcaatgacaactgtaatgaagaaatgtcttactctgtagaggtgagctacatggaaatttactgtgaaagagtacgagatttgctgaatccaaaaaacaagggtaatttgcgtgtgcgtgaacacccacttcttggaccctatgtggaggatctgtccaagttggcagttacttcctacacagacattgctgacctcatggatgctgggaacaaagccaggacagtggcagctacaaacatgaatgaaacaagtagccgttcccacgctgtgtttacgattgttttcacccagaagaaacacgataatgagaccaacctttccactgagaaggtcagtaaaatcagcttggtggatctagcaggaagtgaacgagctgattcaactggtgccaaagggactcgattaaaggaaggagcaaatattaataagtctcttacaactttgggcaaagtcatttcagccttggccgaggtgagtaaaaagaagaagaaaacagattttattccctacagggattctgtacttacttggctccttcgagaaaatttaggtggcaattctcggactgcaatggttgctgctctgagccccgcggatatcaactacgatgagactttgagcactctgagatatgcagatcgtgcaaaacaaattaaatgcaatgctgttatcaatgaggaccccaatgccaaactggttcgtgaattaaaggaggaggtgacacggctgaaggaccttcttcgtgctcagggcctgggagatattattgatacatccatggggtccctcacttcatccccatcttcctgctcactcagtagtcaggtgggcttgacgtctgtgaccagtattcaagagaggatcatgtctacacctggaggagaggaagctattgaacgtttaaaggaatcagagaagatcattgctgagttgaatgaaacttgggaagagaagcttcgtaaaacagaggccatcagaatggagagagaggctttgttggctgagatgggagttgccattcgggaagatggaggaaccctaggggttttctcacctaaaaagaccccacatcttgttaacctcaatgaagacccactaatgtctgagtgcctactttattacatcaaagatggaattacaagggttggccaagcagatgctgagcggcgccaggacatagtgctgagcggggctcacattaaagaagagcattgtatcttccggagtgagagaagcaacagcggggaagttatcgtgaccttagagccctgtgagcgctcagaaacctacgtaaatggcaagagggtgtcccagcctgttcagctgcgctcaggaaaccgtatcatcatgggtaaaaaccatgttttccgctttaaccacccggaacaagcacgagctgagcgagagaagactccttctgctgagaccccctctgagcctgtggactggacatttgcccagagggagcttctggaaaaacaaggaattgatatgaaacaagagatggagaaaaggctacaggaaatggagatcttatacaaaaaggagaaggaagaagcagatcttcttttggagcagcagagactggacgcggattctgatagcggggacgattctgacaagaggtcgtgtgaagagagctggaaactgattacttctctgagagaaaagctacctcccagcaagttgcaaaccattgttaaaaaatgtggcctcccaagcagtgggaagaaacgtgaaccaattaaaatgtatcagataccccaaagaaggcgcttgagtaaagattccaagtgggtcacaatctcagatcttaaaattcaggctgtcaaagagatttgctatgaggttgctctcaatgacttcaggcacagtcggcaggagattgaagccctggccattgtcaagatgaaggagctttgtgccatgtatggcaagaaagaccccaatgagcgggactcctggagggcagtggccagggacgtctgggataccgtcggtgttggggatgagaagatcgaagacgtcatggccactgggaaaggcagcactgatgtagatgacctcaaggttcatatagacaagctggaagatattttgcaagaagtcaaaaagcaaaataacatgaaagacgaggagataaaagtcttaagaaataaaatgctcaaaatggaaaaagtcttgccactgatcggatctcaggaacagaaaagcccaggaagccacaaagcaaaggagcctgttggtgctggtgttagtagcacctctgagaataatgtaagtaaaggagacaatggagaacttgcaaaagaagaacgtgtttcccagctgatgaatggggatccagcttttagacgtggacgtctgcgctggatgaggcaagagcaaattcggtttaagaacttgcaacagcaggagataacaaagcagcttcgtcggcagaatgtacctcataggttcatccctcctgagaaccggaagccccgcttcccctttaagagcaaccctaaacacagaaactcttggagtcctgggacacatatcatcataacagaagatgaggttatagagcttaggattccaaaagacgatgaagcaaggaaagggaataaagaagagagccaagaaaaagggggtaaaggagcttttaaggatccccagtttccatggggctctcaaggaatgagaagtcaagatcacatccaagttagcaagcagcacattaataatcagcaacagccacctcaactacgttggagaagcaattctctcaataatggccagccgaaaagtacgcgctgccaggcatctgcctccgcggagtcattaaactcccacagtggtcaccccactgctgatgtacagactttccaggcaaagcgccatattcatcaacaccgtcagtcttactgtaattataacactggaggtcagttagagggcaatgcagccacttcctatcagaagcagactgacaaacccagccactgtagccagtttgtgacacctccgcggatgaggagacagttctcagcacccaatctcaaagctggtcgagaaaccacagtataaatcagttactggacaaacttgaaatcatggtggaagaaacagacagtgttagctcatgatttgatttggttctacctttggccttgagttcttattatttacattataaatattaactggttttatattgttaagacaaaacactggtaaaagtttcaacacctcccttttgcttgtataccataaatgggcagtttctgaaattttggataaagcatcaagaactcctttttctgaaacgttcctccttttttagtgcctaattaatatacttacttacacagacttgtcccatcttgatgtaagtttgttatgtttttataatgcctataaattaatctgacatccagaaagacctgcctcttagtttatgcagacattcaaaaggagaatttgataagcagaattaaatgtctgttattcataaatgttagaaattggtttaaaaataataacatgcaactgggtgggcacagctttggatttctcatccacgtctgttcccttctttaaatatgattagaattttcgtaagccaaaactaaaggtcttcaaacatatcttgcaatacatagctttgcatcttccacacaacttccacgtcttcttttattctgtattttacaaaaaactcatataatggttttttcttttgaatgtatcagaatatgtatgaaatttgtcatatcagaatctataaattggcactgtgtctgggattctgtttgtggtttgcattttgaagttcaatgtatcatttgacacacatgcacacaaagtgaactattcaccaaaatcatgccaacagaaataccaacaaaaaacttgtgtagcttgtaaggaggttatttggcttgagagggaagaggtgggacagacatgggggacaaagctacagcatatggctctgtggtgctgcttttttccaatagttgatgaaatagtgaaataaaagttaactttggttgggcttggaataaaggagatgatacataataaactattctttggttagcattagtaatgcttgtagacactcaaacaaggaaggcgaagtcctgatgatgatttattgtatcaatacctcattttatttggttgtggtctcagtttgcctcactggagaatccactaagaaagatggattttaatgggaagaaaagaattattttctacatcgttcctcatctcttgagtttgtcaaaaagttttctaagaggcagtgtgaagagccagagatgtccgaaattgcctgacttcatgttttggaagattcctaagtcacatgaaatcatctatcaaacacttgtcttccaaacggtgtgaaaaactacagccaagatagcagttagcattcaaggaagccttaaagattgtgattatgtttttttttcctttgcgtgtgggcactatgctttattagaacacattatttttaatcatagtattttttctttgcctctaagaaaatactttcttaatgctcagaaagttgcttccaattaatgtttttttccccttaaaaagagaagctttgagagatatttttgctttcatagctagaacagttgaagtcttcaactgaggttttatagcagattagacatgggtaaatgatgtctgtaatgggttgagttactgagatgacaatctcctgtgccatttggtttgaatgtacttgataggctgcttcaaatcagtcacttcaatgcattttgtgtaaacccagttgtccttttttattcctctttagacataaatgtgctaactattcctttctatacacaatttattttctaagattaaaaataataattgctaggtttggtggcacatgcgtacagccccagctacttaggaggctgaagcaggaggatccctagagcccaggagttctgggctgtggtacactatgccagttgggtgtaagtttggcatcaatatggtgatgtccctgaagcaggaaaccacaaacttgcatcaggacgggtgaacccagcccaggttggaaatggagcaggccaaaactcccaggctgatcagtaatgggatcttgcctatgaatagccagtgcactgcagccaggacaacagagtgagaacctgtctttaaaaaaaaaaa

SEQ ID NO: 360327 - DNA, 5907 bp, Homo sapiens
gcggagtttcgcgagggccgaagcggggcagtgtgacggcagcggtcctgggaggcgcccgcgcgcgtcggagcagctccccgtcctccgcagccgtcaccgccggccgtcgccgcgccctggcctcccgcactcgcgcactcctgtccgccgcccaccgcccacctcccacctcgatgcggtgccgggctgctgcgtgatggggctgcggagcggcgccctgcggctcgcggcggccgctgctcgcgctgaggtgcgtcggtgcccggccccccgcgcccccgcgcgccgcggctcctgttgacccggtccgcccgtcggtctgcagcgcggctgaggaaacttggctgtaacttcaaaagaagatttgattctttatttctggactgcatatatatatataacaaggccattaaaatgtcgggagcctcagtgaaggtggctgtccgggtaaggcccttcaattctcgagagaccagcaaggaatccaaatgcatcattcagatgcaaggcaactcgaccagtattattaacccaaagaatccaaaggaagctccaaagtccttcagcttcgactattcctactggtctcatacctcacccgaagatccctgttttgcatctcaaaaccgtgtgtacaatgacattggcaaggaaatgctcttacacgcctttgagggatataatgtctgtatttttgcctatgggcagactggtgctggaaaatcttatacaatgatgggtaaacaagaagaaagccaggctggcatcattccacagttatgtgaagaactttttgagaaaatcaatgacaactgtaatgaagaaatgtcttactctgtagaggtgagctacatggaaatttactgtgaaagagtacgagatttgctgaatccaaaaaacaagggtaatttgcgtgtgcgtgaacacccacttcttggaccctatgtggaggatctgtccaagttggcagttacttcctacacagacattgctgacctcatggatgctgggaacaaagccaggacagtggcagctacaaacatgaatgaaacaagtagccgttcccacgctgtgtttacgattgttttcacccagaagaaacacgataatgagaccaacctttccactgagaaggtcagtaaaatcagcttggtggatctagcaggaagtgaacgagctgattcaactggtgccaaagggactcgattaaaggaaggagcaaatattaataagtctcttacaactttgggcaaagtcatttcagccttggccgaggtgagtaaaaagaagaagaaaacagattttattccctacagggattctgtacttacttggctccttcgagaaaatttaggtggcaattctcggactgcaatggttgctgctctgagccccgcggatatcaactacgatgagactttgagcactctgagatatgcagatcgtgcaaaacaaattaaatgcaatgctgttatcaatgaggaccccaatgccaaactggttcgtgaattaaaggaggaggtgacacggctgaaggaccttcttcgtgctcagggcctgggagatattattgatattgatccattgatcgatgattactctggaagtggaagcaaatatctgaaagattttcagaacaataagcatagatacttgctagcctctgagaatcaacgccctggccatttttccacagcatccatggggtccctcacttcatccccatcttcctgctcactcagtagtcaggtgggcttgacgtctgtgaccagtattcaagagaggatcatgtctacacctggaggagaggaagctattgaacgtttaaaggaatcagagaagatcattgctgagttgaatgaaacttgggaagagaagcttcgtaaaacagaggccatcagaatggagagagaggctttgttggctgagatgggagttgccattcgggaagatggaggaaccctaggggttttctcacctaaaaagaccccacatcttgttaacctcaatgaagacccactaatgtctgagtgcctactttattacatcaaagatggaattacaagggttggccaagcagatgctgagcggcgccaggacatagtgctgagcggggctcacattaaagaagagcattgtatcttccggagtgagagaagcaacagcggggaagttatcgtgaccttagagccctgtgagcgctcagaaacctacgtaaatggcaagagggtgtcccagcctgttcagctgcgctcaggaaaccgtatcatcatgggtaaaaaccatgttttccgctttaaccacccggaacaagcacgagctgagcgagagaagactccttctgctgagaccccctctgagcctgtggactggacatttgcccagagggagcttctggaaaaacaaggaattgatatgaaacaagagatggagaaaaggctacaggaaatggagatcttatacaaaaaggagaaggaagaagcagatcttcttttggagcagcagagactggactatgagagtaaattgcaggccttgcagaagcaggttgaaacccgatctctggctgcagaaacaactgaagaggaggaagaagaggaagaagttccttggacacagcatgaatttgagttggcccaatgggccttccggaaatggaagtctcatcagtttacttcattacgggacttactctggggcaatgccgtgtacctaaaggaggccaatgccatcagtgtggaactgaaaaagaaggtgcagtttcagtttgttctgctgactgacacactgtactcccctttgcctcctgaattacttcccactgagatggaaaaaactcatgaggacaggcctttccctcgcacagtggtagcagtagaagtccaggatttgaagaatggagcaacacactattggtctttggagaaactcaagcagaggctggatttgatgcgagagatgtatgatagggcaggggagatggcctccagtgcccaagacgaaagcgaaaccactgtgactggcagcgatcccttctatgatcggttccactggttcaaacttgtggggagctcccccattttccacggctgtgtgaacgagcgccttgccgaccgcacaccctcccccactttttccacggccgattccgacatcactgagctggctgacgagcagcaagatgagatggaggattttgatgatgaggcattcgtggatgacgccggctctgacgcagggacggaggagggatcagatctcttcagtgacgggcatgacccgttttacgaccgatccccttggttcattttagtgggaagggcatttgtttacctgagcaatctgctgtatcccgtgcccctgatccacagggtggccatcgtcagtgagaaaggtgaagtgcggggatttctgcgtgtggctgtacaggccatcgcagcggatgaagaagctcctgattatggctctggaattcgacagtcaggaacagctaaaatatcttttgataatgaatactttaatcagagtgacttttcgtctgttgcaatgactcgttctggtctgtccttggaggagttgaggattgtggaaggacagggtcagagttctgaggtcatcactcctccagaagaaatcagtcgaattaatgacttggatttgaagtcaagcactttgctggatggtaagatggtaatggaagggttttctgaagagattggcaaccacctgaaactgggcagtgccttcactttccgagtaacagtgttgcaggccagtggaatcctcccagagtatgcagatatcttctgtcagttcaactttttgcatcgccatgatgaagcattctccacggagcccctcaaaaacaatggcagaggaagtcccctggccttttatcatgtgcagaatattgcagtggagatcactgaatcatttgtggattacatcaaaaccaagcctattgtatttgaagtctttgggcattatcagcagcacccacttcatctgcaaggacaggagcttaacagtccgcctcagccgtgccgccgattcttccctccacccatgccactgtccaagccagttccagccaccaagttaaacacgatgagcaaaaccagccttggccagagcatgagcaagtatgacctcctggtttggtttgagatcagtgaactggagcctacaggagagtatatcccagctgtggttgaccacacagcaggcttgccttgccaggggacatttttgcttcatcagggcatccagcgaaggatcacagtgaccattatccatgagaaggggagcgagctccattggaaagatgttcgtgaactggtggtaggtcgtattcggaataagcctgaggtggatgaagctgcagttgatgccatcctctccctaaatattatttctgccaagtacctgaagtcttcccacaactctagcaggaccttctaccgctttgaggctgtgtgggatagctctctgcataactcccttcttctgaaccgagtgacaccctatggagaaaagatctacatgaccttgtcggcctacctagagctggatcattgcatccagccggctgtcatcaccaaggatgtgtgcatggtcttctactcccgagatgccaagatctcaccaccacgctctctgcgtagcctctttggcagcggctactcaaagtcaccagattcgaatcgagtcactggcatttacgaactcagcttatgcaaaatgtcagacacaggtagtccaggtatgcagagaaggagaagaaaaatcttagatacgtcagtggcatatgtgcggggagaagagaacttagcaggctggcggccccgtggagacagcctcatccttgagcaccagtgggagctggagaagctggagctcctacatgaggtggaaaaaacccgccactttttgctgctgcgtgagagacttggtgacagcatccccaaatccctgagcgactcgttatcccccagcctcagcagtgggaccctcagcacctccaccagtatctcctctcagatctcaaccactacctttgaaagcgccatcacacctagcgagagcagtggctatgattcaggagacatcgaaagcctggtggaccgagagaaagagctggctaccaagtgcctgcaacttctcacccacactttcaacagagaattcagccaggtgcacggcagcgtcagtgactgtaagttgtctgatatctctccaattggacgggatccctctgagtccagtttcagcagtgccaccctcactccctcctccacctgtccctctctggtagactctaggagcaactctctggatcagaagaccccagaagccaattcccgggcctctagtccctgcccagaatttgaacagtttcagattgtcccagctgtggaaacaccatatttggcccgagcaggaaaaaacgaatttctcaatcttgttccagatattgaagaaattagaccaagctcagtggtctctaagaaaggataccttcatttcaaggagcctctttacagtaactgggctaaacattttgttgtcgtccgtcggccttatgtcttcatctataacagtgacaaagaccctgtggagcgtggaatcattaacctgtccacagcacaggtggagtacagtgaggaccagcaggccatggtgaagacaccaaacacctttgctgtctgcacaaagcaccgtggggtccttttgcaggccctcaatgacaaagacatgaacgactggttgtatgccttcaacccacttctagctggcacaatacggtcaaagctttcccgcagatgcccgagccagtcgaaatactaagtgactctgccgagtgccctcactcgccttcgagagataaagaaagcgttacctctc

SEQ ID NO: 360328 - DNA, 3784 bp, Homo sapiens
gcggagtttcgcgagggccgaagcggggcagtgtgacggcagcggtcctgggaggcgcccgcgcgcgtcggagcagctccccgtcctccgcagccgtcaccgccggccgtcgccgcgccctggcctcccgcactcgcgcactcctgtccgccgcccaccgcccacctcccacctcgatgcggtgccgggctgctgcgtgatggggctgcggagcggcgccctgcggctcgcggcggccgctgctcgcgctgaggtgcgtcggtgcccggccccccgcgcccccgcgcgccgcggctcctgttgacccggtccgcccgtcggtctgcagcgcggctgaggaaacttggctgtaacttcaaaagaagatttgattctttatttctggactgcatatatatatataacaaggccattaaaatgtcgggagcctcagtgaaggtggctgtccgggtaaggcccttcaattctcgagagaccagcaaggaatccaaatgcatcattcagatgcaaggcaactcgaccagtattattaacccaaagaatccaaaggaagctccaaagtccttcagcttcgactattcctactggtctcatacctcacccgaagatccctgttttgcatctcaaaaccgtgtgtacaatgacattggcaaggaaatgctcttacacgcctttgagggatataatgtctgtatttttgcctatgggcagactggtgctggaaaatcttatacaatgatgggtaaacaagaagaaagccaggctggcatcattccacagttatgtgaagaactttttgagaaaatcaatgacaactgtaatgaagaaatgtcttactctgtagaggtgagctacatggaaatttactgtgaaagagtacgagatttgctgaatccaaaaaacaagggtaatttgcgtgtgcgtgaacacccacttcttggaccctatgtggaggatctgtccaagttggcagttacttcctacacagacattgctgacctcatggatgctgggaacaaagccaggacagtggcagctacaaacatgaatgaaacaagtagccgttcccacgctgtgtttacgattgttttcacccagaagaaacacgataatgagaccaacctttccactgagaaggtcagtaaaatcagcttggtggatctagcaggaagtgaacgagctgattcaactggtgccaaagggactcgattaaaggaaggagcaaatattaataagtctcttacaactttgggcaaagtcatttcagccttggccgaggtgagtaaaaagaagaagaaaacagattttattccctacagggattctgtacttacttggctccttcgagaaaatttaggtggcaattctcggactgcaatggttgctgctctgagccccgcggatatcaactacgatgagactttgagcactctgagatatgcagatcgtgcaaaacaaattaaatgcaatgctgttatcaatgaggaccccaatgccaaactggttcgtgaattaaaggaggaggtgacacggctgaaggaccttcttcgtgctcagggcctgggagatattattgatattgatccattgatcgatgattactctggaagtggaagcaaatatctgaaagattttcagaacaataagcatagatacttgctagcctctgagaatcaacgccctggccatttttccacagcatccatggggtccctcacttcatccccatcttcctgctcactcagtagtcaggtgggcttgacgtctgtgaccagtattcaagagaggatcatgtctacacctggaggagaggaagctattgaacgtttaaaggaatcagagaagatcattgctgagttgaatgaaacttgggaagagaagcttcgtaaaacagaggccatcagaatggagagagaggctttgttggctgagatgggagttgccattcgggaagatggaggaaccctaggggttttctcacctaaaaagaccccacatcttgttaacctcaatgaagacccactaatgtctgagtgcctactttattacatcaaagatggaattacaagggttggccaagcagatgctgagcggcgccaggacatagtgctgagcggggctcacattaaagaagagcattgtatcttccggagtgagagaagcaacagcggggaagttatcgtgaccttagagccctgtgagcgctcagaaacctacgtaaatggcaagagggtgtcccagcctgttcagctgcgctcaggaaaccgtatcatcatgggtaaaaaccatgttttccgctttaaccacccggaacaagcacgagctgagcgagagaagactccttctgctgagaccccctctgagcctgtggactggacatttgcccagagggagcttctggaaaaacaaggaattgatatgaaacaagagatggagaaaaggctacaggaaatggagatcttatacaaaaaggagaaggaagaagcagatcttcttttggagcagcagagactggactatgagagtaaattgcaggccttgcagaagcaggttgaaacccgatctctggctgcagaaacaactgaagaggaggaagaagaggaagaagttccttggacacagcatgaatttgagttggcccaatgggccttccggaaatggaagtctcatcagtttacttcattacgggacttactctggggcaatgccgtgtacctaaaggaggccaatgccatcagtgtggaactgaaaaagaaggtgcagtttcagtttgttctgctgactgacacactgtactcccctttgcctcctgaattacttcccactgagatggaaaaaactcatgaggacaggcctttccctcgcacagtggtagcagtagaagtccaggatttgaagaatggagcaacacactattggtctttggagaaactcaagcagaggctggatttgatgcgagagatgtatgatagggcaggggagatggcctccagtgcccaagacgaaagcgaaaccactgtgactggcagcgatcccttctatgatcggttccactggttcaaacttgtggggagctcccccattttccacggctgtgtgaacgagcgccttgccgaccgcacaccctcccccactttttccacggccgattccgacatcactgagctggctgacgagcagcaagatgagatggaggattttgatgatgaggcattcgtggatgacgccggctctgacgcagggacggaggagggatcagatctcttcagtgacgggcatgacccgttttacgaccgatccccttggttcattttagtgggaagggcatttgtttacctgagcaatctgctgtatcccgtgcccctgatccacagggtggccatcgtcagtgagaaaggtgaagtgcggggatttctgcgtgtggctgtacaggccatcgcagcggatgaagaagctccttcccgtgggttcttggtctcactgacttcaagaatgaagccgtggacccttgcggtgagttgttacagttcttaaatatggtgtgtacggagtgagtcccttcagatgttccgagtttcttccttctggtgggtacgtggtcttgctgacttcaggagtgaagctgcagacttacacagtgagtgtaacagctcttaagggtggcacgcaggttgttcggccctcccggtgggttcatggtctcgctgacttcaggaatgaagccgcagaccttcgcggggagtgttacagctcataaaggtagtgcgggacccatagagtggtg

SEQ ID NO: 360329 - DNA, 280 bp, Homo sapiens
agaaaggataccttcatttcaaggagcctctttacagtaactgggctaaacattttgttgtcgtccgtcggccttatgtcttcatctataacagtgacaaagaccctgtggagcgtggaatcattaacctgtccacagcacaggtggagtacagtgaggaccagcaggccatggtgaaggtccgtcctgccctgccttggtttcttattgccacgtgtgcccttctcttttgatttctgcactctctgttacgtggtgtgaaatttccctattctctctg

SEQ ID NO: 360330 - DNA, 150 bp, Homo sapiens
aatttattaagcacatgcagtagatggttttccatcctatagttaatgtgtctcagattcatggcagagaaccatgggtccttggactgtcagagaagggtggggacagtttctctcttcttatgaatgaatgaacaagtgcttgggtct

SEQ ID NO: 360331 - DNA, 1813 bp, Homo sapiens
  misc_feature (1)..(3): n is a, c, g, or t
nnntctttaaatcttattttagtagctaatgcatgtttgaaataagatgtgttagaaattatatgactatattaaggttgtgtttatattaggtgaaaaattgcatgcaattggtgaatcatgcagctttggggacatttacactgccactcacacacaggctctgtctcaatccgtatgcatgattcacgtcctttcaaaagtcccttttcaacatttggtaaagtgaaaatgttattcatagtgctaatgagccaataaacaatgctgcgtttcttttttctaactgcagcatattgtggtaaattttctcccaaaactttatttttggagttattgttggcaataaatacaacaaattatttgttggcaagtgatacaatttactgtataacaacttaatagtacaaagcatgaagatgtgaaaatatcatcttaaccagtttcattctatgaacataatattctggcagctttttctataactgagaatggtatatctttttatacactgcctaaatcagtactactgccagtcacctgaggtcaggtctgcacaacactaaattgggcaataacatagaacatctaggcagtcttgacagtcaaccagtgtaatcactaggggaagaaaaagtaggcctacccttttacttattaacttaagtaataaaaattgtataaaaatatgaatgttggctgcagaggagcctttacatgcagataatttgaagcagtctttgaaaataacaaaaattattccatttaatgaagggtttgttttgtttagcttttctcttttattcagaaaacatacctgtgcttttgaaagggcttaatcccaaacaggtaatatgtgtggatcaatcatctctcctcccatgaaattaatcattcatggtaatatattaaggctggaacgtagctcttagtgacttaaaacatgacagtaagcatttacactgttggaaggtaatttcattgctatgttattaaaatgatgggaatcctatttatacatttatttatttatttatttacagaagattggttccttccagttcaatttaacagcttcagtgaagttagtataatgataagaaaaattgactgtagctattattccaagtgaaaatcatgcagctgagtcctgctgcatcctgggagcaaagcattaattcaaatgaggagtagtcagtcctagcactgtagacgccgactttaccaaccaagatattgtatgtgtgtgacattcagctaacattgatctaggcacttagtttgctaccacattgttcccttcattgattgaaactgtaaataacataacactttaaggcagctaagcaaatattttaataagccatgaaaggcaagatgccagagaaaatctgtatattcagctatttggagaactcgtgttttccacaaattaaactggagatgtcatttgaaattttcttcccttaaacatgctgtcacaacatggattccttctcatggatgtctttctaggcttataaatatatggtgtgattgctataattttgtgaaattttattcagcaattaatagtgatttcagcaatatgtactaagattccaaggcagaaataaatgtataaaggatttgagcctgtatgtgtaagaagaaactctctcttcagtcatatttcctaaattcagtgtaagtacctcgctgatttagcactggagttattccttgaatgtgtaaataatgatgttctattctgacctaatgaattcctgtaatgtgaatatttaaaataaaagaattcaatttaaatgtatac

SEQ ID NO: 360332 - DNA, 1783 bp, Homo sapiens
attccacgtacactgttggcctactggatttcctcctttccaagagagggctgagggagcagggttgagcaactggtgcagacagcctagctggactttgggtgaggcggttcagccatgaggctggctgtgcttttctcgggggccctgctggggctactggcagcccaggggacagggaatgactgtcctcacaaaaaatcagctactttgctgccatccttcacggtgacacccacggttacagagagcactggaacaaccagccacaggactaccaagagccacaaaaccaccactcacaggacaaccaccacaggcaccaccagccacggacccacgactgccactcacaaccccaccaccaccagccatggaaacgtcacagttcatccaacaagcaatagcactgccaccagccagggaccctcaactgccactcacagtcctgccaccactagtcatggaaatgccacggttcatccaacaagcaacagcactgccaccagcccaggattcaccagttctgcccacccagaaccacctccaccctctccgagtcctagcccaacctccaaggagaccattggagactacacgtggaccaatggttcccagccctgtgtccacctccaagcccagattcagattcgagtcatgtacacaacccagggtggaggagaggcctggggcatctctgtactgaaccccaacaaaaccaaggtccagggaagctgtgagggtgcccatccccacctgcttctctcattcccctatggacacctcagctttggattcatgcaggacctccagcagaaggttgtctacctgagctacatggcggtggagtacaatgtgtccttcccccacgcagcacagtggacattctcggctcagaatgcatcccttcgagatctccaagcacccctggggcagagcttcagttgcagcaactcgagcatcattctttcaccagctgtccacctcgacctgctctccctgaggctccaggctgctcagctgccccacacaggggtctttgggcaaagtttctcctgccccagtgaccggtccatcttgctgcctctcatcatcggcctgatccttcttggcctcctcgccctggtgcttattgctttctgcatcatccggagacgcccatccgcctaccaggccctctgagcatttgcttcaaaccccagggcactgagggggttggggtgtggtgggggggtacccttatttcctcgacacgcaactggctcaaagacaatgttattttccttccctttcttgaagaacaaaaagaaagccgggcatgacggctcatgcctgtaatcccagcactttgggaggctgaggcaggtggatcactggaggtcaggagtttgagaccagcctggccaacatggtgaaaccctgtctctactaaaaatacaattagccaggtgtggcggcgtaatcccagctggcctgtaatcccagctacttgggaggctgaggcagaactgcttgaacccaggaggtggaggttgcagtgagccgtcatcgcgccactgagccaagatcgcgccactgcactccagcctgggcgacagagccagactgtctcaaataaataaatatgagataatgcagtcgggagaagggagggagagaattttattaaatgtgacgaactgcccccccccccccccccagcaggagagcagcaaaatttatgcaaatctttgacggggttttccttgtcctgccaggattaaaagccatgagtttcttgtca

SEQ ID NO: 360333 - DNA, 743 bp, Homo sapiens
attccacgtacactgttggcctactggatttcctcctttccaagagagggctgagggagcagggttgagcaactggtgcagacagcctagctggactttgggtgaggcggttcagccatgaggctggctgtgcttttctcgggggccctgctggggctactggcagcccaggggacagggaatgactgtcctcacaaaaaatcagctactttgctgccatccttcacggtgacacccacggttacagagagcactggaacaaccagccacaggactaccaagagccacaaaaccaccactcacaggacaaccaccacaggcaccaccagccacggacccacgactgccactcacaaccccaccaccaccagccatggaaacgtcacagttcatccaacaagcaatagcactgccaccagccagggaccctcaactgccactcacagtcctgccaccactagtcatggaaatgccacggttcatccaacaagcaacagcactgccaccagcccaggattcaccagttctgcccacccagaaccacctccaccctctccgagtcctagcccaacctccaaggagaccattggagactacacgtggaccaatggttcccagccctgtgtccacctccaagcccagattcagattcgagtcatgtacacaacccagggtggaggagaggcctggggcatctctgtactgaaccctatacggaacacaacttaacactggcgacagtc

SEQ ID NO: 360334 - DNA, 1702 bp, Homo sapiens
attccacgtacactgttggcctactggatttcctcctttccaagagagggctgagggagcagggttgagcaactggtgcagacagcctagctggactttgggtgaggcggttcagccatgaggctggctgtgcttttctcgggggccctgctggggctactggcagagagcactggaacaaccagccacaggactaccaagagccacaaaaccaccactcacaggacaaccaccacaggcaccaccagccacggacccacgactgccactcacaaccccaccaccaccagccatggaaacgtcacagttcatccaacaagcaatagcactgccaccagccagggaccctcaactgccactcacagtcctgccaccactagtcatggaaatgccacggttcatccaacaagcaacagcactgccaccagcccaggattcaccagttctgcccacccagaaccacctccaccctctccgagtcctagcccaacctccaaggagaccattggagactacacgtggaccaatggttcccagccctgtgtccacctccaagcccagattcagattcgagtcatgtacacaacccagggtggaggagaggcctggggcatctctgtactgaaccccaacaaaaccaaggtccagggaagctgtgagggtgcccatccccacctgcttctctcattcccctatggacacctcagctttggattcatgcaggacctccagcagaaggttgtctacctgagctacatggcggtggagtacaatgtgtccttcccccacgcagcacagtggacattctcggctcagaatgcatcccttcgagatctccaagcacccctggggcagagcttcagttgcagcaactcgagcatcattctttcaccagctgtccacctcgacctgctctccctgaggctccaggctgctcagctgccccacacaggggtctttgggcaaagtttctcctgccccagtgaccggtccatcttgctgcctctcatcatcggcctgatccttcttggcctcctcgccctggtgcttattgctttctgcatcatccggagacgcccatccgcctaccaggccctctgagcatttgcttcaaaccccagggcactgagggggttggggtgtggtgggggggtacccttatttcctcgacacgcaactggctcaaagacaatgttattttccttccctttcttgaagaacaaaaagaaagccgggcatgacggctcatgcctgtaatcccagcactttgggaggctgaggcaggtggatcactggaggtcaggagtttgagaccagcctggccaacatggtgaaaccctgtctctactaaaaatacaattagccaggtgtggcggcgtaatcccagctggcctgtaatcccagctacttgggaggctgaggcagaactgcttgaacccaggaggtggaggttgcagtgagccgtcatcgcgccactgagccaagatcgcgccactgcactccagcctgggcgacagagccagactgtctcaaataaataaatatgagataatgcagtcgggagaagggagggagagaattttattaaatgtgacgaactgcccccccccccccccccagcaggagagcagcaaaatttatgcaaatctttgacggggttttccttgtcctgccaggattaaaagccatgagtttcttgtca

SEQ ID NO: 360335 - DNA, 1866 bp, Homo sapiens
attccacgtacactgttggcctactggatttcctcctttccaagagagggctgagggagcagggttgagcaactggtgcagacagcctagctggactttgggtgaggcggttcagccatgaggctggctgtgcttttctcgggggccctgctggggctactggcaggtaaggaggaaggaggctgaggggagggggcccctgggagggagcctgccctgggttgctaaccatctcctctctgccaaaagcccaggggacagggaatgactgtcctcacaaaaaatcagctactttgctgccatccttcacggtgacacccacggttacagagagcactggaacaaccagccacaggactaccaagagccacaaaaccaccactcacaggacaaccaccacaggcaccaccagccacggacccacgactgccactcacaaccccaccaccaccagccatggaaacgtcacagttcatccaacaagcaatagcactgccaccagccagggaccctcaactgccactcacagtcctgccaccactagtcatggaaatgccacggttcatccaacaagcaacagcactgccaccagcccaggattcaccagttctgcccacccagaaccacctccaccctctccgagtcctagcccaacctccaaggagaccattggagactacacgtggaccaatggttcccagccctgtgtccacctccaagcccagattcagattcgagtcatgtacacaacccagggtggaggagaggcctggggcatctctgtactgaaccccaacaaaaccaaggtccagggaagctgtgagggtgcccatccccacctgcttctctcattcccctatggacacctcagctttggattcatgcaggacctccagcagaaggttgtctacctgagctacatggcggtggagtacaatgtgtccttcccccacgcagcacagtggacattctcggctcagaatgcatcccttcgagatctccaagcacccctggggcagagcttcagttgcagcaactcgagcatcattctttcaccagctgtccacctcgacctgctctccctgaggctccaggctgctcagctgccccacacaggggtctttgggcaaagtttctcctgccccagtgaccggtccatcttgctgcctctcatcatcggcctgatccttcttggcctcctcgccctggtgcttattgctttctgcatcatccggagacgcccatccgcctaccaggccctctgagcatttgcttcaaaccccagggcactgagggggttggggtgtggtgggggggtacccttatttcctcgacacgcaactggctcaaagacaatgttattttccttccctttcttgaagaacaaaaagaaagccgggcatgacggctcatgcctgtaatcccagcactttgggaggctgaggcaggtggatcactggaggtcaggagtttgagaccagcctggccaacatggtgaaaccctgtctctactaaaaatacaattagccaggtgtggcggcgtaatcccagctggcctgtaatcccagctacttgggaggctgaggcagaactgcttgaacccaggaggtggaggttgcagtgagccgtcatcgcgccactgagccaagatcgcgccactgcactccagcctgggcgacagagccagactgtctcaaataaataaatatgagataatgcagtcgggagaagggagggagagaattttattaaatgtgacgaactgcccccccccccccccccagcaggagagcagcaaaatttatgcaaatctttgacggggttttccttgtcctgccaggattaaaagccatgagtttcttgtca

SEQ ID NO: 360336 - DNA, 1115 bp, Homo sapiens
attccacgtacactgttggcctactggatttcctcctttccaagagagggctgagggagcagggttgagcaactggtgcagacagcctagctggactttgggtgaggcggttcagccatgaggctggctgtgcttttctcgggggccctgctggggctactggcagcccaggggacagggaatgactgtcctcacaaaaaatcagctactttgctgccatccttcacggtgacacccacggttacagagagcactggaacaaccagccacaggactaccaagagccacaaaaccaccactcacaggacaaccaccacaggcaccaccagccacggacccacgactgccactcacaaccccaccaccaccagccatggaaacgtcacagttcatccaacaagcaatagcactgccaccagccagggaccctcaactgccactcacagtcctgccaccactagtcatggaaatgccacggttcatccaacaagcaacagcactgccaccagcccaggattcaccagttctgcccacccagaaccacctccaccctctccgagtcctagcccaacctccaaggagaccattggagactacacgtggaccaatggttcccagccctgtgtccacctccaagcccagattcagattcgagtcatgtacacaacccagggtggaggagaggcctggggcatctctgtactgaaccccaacaaaaccaaggtccagggaagctgtgagggtgcccatccccacctgcttctctcattcccctatggacacctcagctttggattcatgcaggacctccagcagaagagtatgtactacacttgacgctacactgcgcggatgtgagctaccaatgtgataccttatcaccacacatcgaacaatagtacaaaatgtcaaccaatttactcatggaatcccagaaacttcgccctatccccatttccgcaacaccttctcccccaacagaaaacaccccataactacctcacacacagtactatacaaccatccgccaacaccaacattactgacaccactctccattccctacatcacccaacgcaatgtcacacgactttcacacacctcgctatactcac

SEQ ID NO: 360337 - DNA, 507 bp, Homo sapiens
attccacgtacactgttggcctactggatttcctcctttccaagagagggctgagggagcagggttgagcaactggtgcagacagcctagctggactttgggtgaggcggttcagccatgaggctggctgtgcttttctcgggggccctgctggggctactggcagcccaggggacagggaatgactgtcctcacaaaaaatcagctactttgctgccatccttcacggtgacacccacggttacagagagcactggaacaaccagccacaggactaccaagagccacaaaaccaccactcacaggacaaccaccacaggcaccaccagccacggacccacgactgccactcacaaccccaccaccaccagccatggaaacgtcacagttcatccaacaagcaatagcactgccaccagccagggaccctccaccgccatgtagctcaggtagacaacctgctgctggaggtcctgcatgaatccaaagctgagggtccatagggga

SEQ ID NO: 360338 - DNA, 1438 bp, Homo sapiens
cgcaagatatgtatgaggtacagagcgcgggtgtaagtcacagttcatccaacaagcaatagcactgccaccagccagggaccctcaactgccactcacagtcctgccaccactagtcatggaaatgccacggttcatccaacaagcaacagcactgccaccagcccaggattcaccagttctgcccacccagaaccacctccaccctctccgagtcctagcccaacctccaaggagaccattggagactacacgtggaccaatggttcccagccctgtgtccacctccaagcccagattcagattcgagtcatgtacacaacccagggtggaggagaggcctggggcatctctgtactgaaccccaacaaaaccaaggtccagggaagctgtgagggtgcccatccccacctgcttctctcattcccctatggacacctcagctttggattcatgcaggacctccagcagaaggttgtctacctgagctacatggcggtggagtacaatgtgtccttcccccacgcagcacagtggacattctcggctcagaatgcatcccttcgagatctccaagcacccctggggcagagcttcagttgcagcaactcgagcatcattctttcaccagctgtccacctcgacctgctctccctgaggctccaggctgctcagctgccccacacaggggtctttgggcaaagtttctcctgccccagtgaccggtccatcttgctgcctctcatcatcggcctgatccttcttggcctcctcgccctggtgcttattgctttctgcatcatccggagacgcccatccgcctaccaggccctctgagcatttgcttcaaaccccagggcactgagggggttggggtgtggtgggggggtacccttatttcctcgacacgcaactggctcaaagacaatgttattttccttccctttcttgaagaacaaaaagaaagccgggcatgacggctcatgcctgtaatcccagcactttgggaggctgaggcaggtggatcactggaggtcaggagtttgagaccagcctggccaacatggtgaaaccctgtctctactaaaaatacaattagccaggtgtggcggcgtaatcccagctggcctgtaatcccagctacttgggaggctgaggcagaactgcttgaacccaggaggtggaggttgcagtgagccgtcatcgcgccactgagccaagatcgcgccactgcactccagcctgggcgacagagccagactgtctcaaataaataaatatgagataatgcagtcgggagaagggagggagagaattttattaaatgtgacgaactgcccccccccccccccccagcaggagagcagcaaaatttatgcaaatctttgacggggttttccttgtcctgccaggattaaaagccatgagtttcttgtca

SEQ ID NO: 360339 - DNA, 1776 bp, Homo sapiens
attccacgtacactgttggcctactggatttcctcctttccaagagagggctgagggagcagggttgagcaactggtgcagacagcctagctggactttgggtgaggcggttcagccatgaggctggctgtgcttttctcgggggccctgctggggctactggcaggtaaggaggaaggaggctgaggggagggggcccctgggagggagcctgccctgggttgctaaccatctcctctctgccaaaagcccaggggacagggaatgactgtcctcacaaaaaatcagctactttgctgccatccttcacggtgacacccacggttacagagagcactggaacaaccagccacaggactaccaagagccacaaaaccaccactcacaggacaaccaccacaggcaccaccagccacggaccctcaactgccactcacagtcctgccaccactagtcatggaaatgccacggttcatccaacaagcaacagcactgccaccagcccaggattcaccagttctgcccacccagaaccacctccaccctctccgagtcctagcccaacctccaaggagaccattggagactacacgtggaccaatggttcccagccctgtgtccacctccaagcccagattcagattcgagtcatgtacacaacccagggtggaggagaggcctggggcatctctgtactgaaccccaacaaaaccaaggtccagggaagctgtgagggtgcccatccccacctgcttctctcattcccctatggacacctcagctttggattcatgcaggacctccagcagaaggttgtctacctgagctacatggcggtggagtacaatgtgtccttcccccacgcagcacagtggacattctcggctcagaatgcatcccttcgagatctccaagcacccctggggcagagcttcagttgcagcaactcgagcatcattctttcaccagctgtccacctcgacctgctctccctgaggctccaggctgctcagctgccccacacaggggtctttgggcaaagtttctcctgccccagtgaccggtccatcttgctgcctctcatcatcggcctgatccttcttggcctcctcgccctggtgcttattgctttctgcatcatccggagacgcccatccgcctaccaggccctctgagcatttgcttcaaaccccagggcactgagggggttggggtgtggtgggggggtacccttatttcctcgacacgcaactggctcaaagacaatgttattttccttccctttcttgaagaacaaaaagaaagccgggcatgacggctcatgcctgtaatcccagcactttgggaggctgaggcaggtggatcactggaggtcaggagtttgagaccagcctggccaacatggtgaaaccctgtctctactaaaaatacaattagccaggtgtggcggcgtaatcccagctggcctgtaatcccagctacttgggaggctgaggcagaactgcttgaacccaggaggtggaggttgcagtgagccgtcatcgcgccactgagccaagatcgcgccactgcactccagcctgggcgacagagccagactgtctcaaataaataaatatgagataatgcagtcgggagaagggagggagagaattttattaaatgtgacgaactgcccccccccccccccccagcaggagagcagcaaaatttatgcaaatctttgacggggttttccttgtcctgccaggattaaaagccatgagtttcttgtca

SEQ ID NO: 360340 - DNA, 616 bp, Homo sapiens
ccaaatttcaatagtgggacaggcatagaatagactttcccattacaaaatggagaagttgggaggaagagaggagtaacatgtccaaatcaagttcaaaacctagcaaacaaatgccattagatcttgaggctcaagaataattctttttagtttgatgctctgtctttgagacccatgtcctgcaaggcttttttgggtgggggttgtgccctcaaagctctgcaatgtgagagtcacatccacccccaaggctcagctgagtgaattctcattctccaggctccaggctgccactgtctagcctgttgaaaccaaggcaatggctctctcccccattgaaaaccaaggagacagacctgatgacctctgaattgccctcaggattactgcttttcttatcttcaagagtagtacacatctgcagctaaatagcttgatgttctggtactgtgggctgtaagaagtcctgtagcttctttctattgaaactgtttccattgtctttagctctgtcaatctgaaataatcaaaagaatcagaattcagtcttgaagaatttattctagcaaaaagtttggaatgatcattagagaaacattggctccagaaaatg

SEQ ID NO: 360341 - DNA, 325 bp, Homo sapiens
aacatttaaaaatttattatactctgagctagtcctgaagaataagaacgagaccatcactactttaggtattttttttctcaaaacatattaaaatatgacttgttgaaggataatatattttagttaaacaattgccccttaattcacagactgtaattatatatatttttacctgctgaatgcattttgtttttagtctgatgttttagaattctttttgaaatgctgaagctctttcggctgtttctcaggcattccaagtctttctgtgtctttggttgccatccagtggcagcagccatatacttcagttgagtaacag

SEQ ID NO: 360342 - DNA, 346 bp, Homo sapiens
gagctcatagtctagtgagagaaatgctaatccagtgatttcttaaatgaacagaagagcttgagtattaagtgctaagaaggagatgaaggtacgcaatgctgtgagtgcctgtgataaatctgagccttctcagggttaggctgtgcctattgagatttggaggcacggtgagtattgactgggggcattatcatcccatgtatcaccttctcagtgtcctttaatggctgagactctttcccctgcttccttaatgtaacatactccaagctcatttctggtccttgtaaatccattttgttattctacatttcttgaggtcttatccactaatctcacaagg

SEQ ID NO: 360343 - DNA, 529 bp, Homo sapiens
ggagacagagtcttgggagtcttgctctgtcacccaggatggagtgcagtggcacgatcttggctcactgcaacctccgcttcccaggttcaagcaattctcctgcctcagcctccccagtagctgggattacaggcgcacgccaccatgcctggctaatttttgcatttttagtagagatggggtttcaccatgttggccaggctggtctggaactcctgaccacaatgatccacctaccttggcctcccaaagtactgggattacaggcgtgagccaccgcactcagctggttttctaaacttttagatttctcttcttcttcaaatgccacaggtgtttgagttttttttgtgatttttgtttttttaagctcatcagctattgttagtgttagtgcattttatgtgtggcccaagacaattcgttttccaatatggcccagggaaatccaaatgattgtatacccctgcaaaccaatggtggagattctcttggagtagagcaaaaagattaagggtaatgactc

SEQ ID NO: 360344 - DNA, 673 bp, Homo sapiens
agcgggtcgtctaaagcaacttccgtgggtgccaggttgtgggctgggggcggtgctgaccttgagagagcggaggaggcgcaggcgcagcacagtttaaacttgattttgtgaggggacgaacagcgtgacaattaaaagaagatctgggaatcatccaatgtgataatttatgtgaaatctttctgcaaactatacagtatgataaaaatataaggtagtttcactggaaacaacagaagactagaagctgatgtgacgtggcaatatcaaccaggaatacccatctcgagttctggatatgtgctctgagaaggtgcccatgtcaccgaccacactggaggccaatgcagatactgggggaaggttccatggtagctaagtgtggacaagctaatcactgaagttccctgatgcagagttgataatctctctagagttggatgaaagactgtgctgccttgaagctctgagagatgccatgccaattcaaggcagggtctttattgttgaaactcttgcgtaatgacatctttattcaggtgaaaatacaggatgaatttcaactatatgatattgtttatgttcctcagacatgttatttgtctttacaaagattggtttcaataaactgtgtgactgatattaaataaacatggaattttacacattc

SEQ ID NO: 360345 - DNA, 1043 bp, Homo sapiens
gggatcgtggtggctgcgcttgcgaggaccctgaggtagattgggtggtttcaacaggaacgcatccactgtctgagagtttaaacttgattttgtgaggggacgaacagcgtgacaattaaaagaagatctgggaatcatccaatgtgataatttatgtgaaatctttctgcaaactatacagtatgataaaaatataaggtagtttcactggaaacaacagaagactagaagctgatgtgacgtggcaatatcaaccaggaatacccatctcgagttctggatatgtgctctgagaaggtgcccatgtcaccgaccacactggaggccaatgcagatactgggggaaggttccatggtagctaagtgtggacaagctaatcactgaagttccctgatgcagagttgataatctctctagagttggatgaaagactgtgctgccttgaagctctgagagatgccatgccaattcaaggcagggtctttattgttgaaactcttgcgtaatgacatctttattcaggtgaaaatacaggatgaatttcaactatatgatattgtttatgttcctcagacatgttatttgtctttacaaagattggtttcaataaactgtgtgactgatattaaataaacatggaattttacacattcataatatttggtttcttgtgattttgatgaactatactttcaagcattgtcagttcatcctcatttacaaggaaacatttgctgtagcagagtgatgtagtgacttgctttacttaagataagccaacttttctattcaatgtttaatgtgaaactgacttaaaaattttcttttaggccacatttacatttctgtttgtataacatgcattatactattttaacttaatactatggctatataaactaaagacatcctacttctgtttttaatttattgttttgcaagataaataatctttaatgccctaatgaagctaaggagttcatattaaaagacatgttatatgacctactgaagttgagctatggaaattgactatctt

SEQ ID NO: 360346 - DNA, 697 bp, Homo sapiens
cgcggtgggcgtggccgcggtaggctgccagccaggctgggaaagcggtggtagctggttgggttgctggggctcggttgttgtagtcgcgatgttcttctccgaggccagagccaggtcgcggacgtgggaagccagtccctcggaacacaggaagtgggtggaagtatttaaagcatgtgatgaagatcacaaaggatatctcagcagagaggactttaaaactgctgttgtaatgctgtttgggtacaagccctccaagatagaagtggattctgtgatgtcttcaataaatccaaatacttctggtatattactcgaggggtttttaaatattgtcaggaaaaagaaggaagctcaacgatatcggaacgaagtaagacacatcttcacagcctttgacacctactatcgtggatttttaactttggaagatttcaaaaaagcatttaggcaggtggctcccaaattaccggaaaggactgttcttgaggtattcagggaagtagatcgagattcagatggtcacgtcagctttagagactttgaatatgccctgaactatggacagaaggaagcctaactattgtgaactacttttggtaactctggggagatcaatagattgtaatgtcagcagactctactctactaatgatgtcatgctactgacttgtgattaaacatttaaaaattt

SEQ ID NO: 360347 - DNA, 983 bp, Homo sapiens
cgcggtgggcgtggccgcggtaggctgccagccaggctgggaaagcggtggtagctggttgggttgctggggctcggttgttgtagtcgcgatgttcttctccgaggccagagccaggtcgcggacgtgggaagccagtccctcggaacacaggaagtgggtggaagtatttaaagcatgtgatgaagatcacaaaggatatctcagcagagaggactttaaaactgctgttgtaatgctgtttgggtacaagccctccaagatagaagtggattctgtgatgtcttcaataaatccaaatacttctggtatattactcgaggggtttttaaatattgtcaggaaaaagaaggaagctcaacgatatcggaacgaagtaagacacatcttcacagcctttgacacctactatcgtggatttttaactttggaagatttcaaaaaagcatttaggcaggtggctcccaaattaccggaaaggactgttcttgaggtattcagaggcattttcagtgcatgatttaacttcggctgtcatcaggaagctgacttaaagttctttcttgactttgcctgccatcaacaccctgtggtatttctggctggcatttttctctgcatggatatgtttacttctccatgcctaggaaccttctccatctcattgtaagcactgctatttgtacattcccaccacctgtcagttggcaaaaagctctgggaagctgcttttgcttcccagtcatgagatgaaactgtgaatgtgcataaggtccatgccctgacccagcgtccaagatcctgagtgcacaggcagattgccacatgatgatgtaaagtggcaatatcgaggcaccaaatgctcccatcatgactggagacgtttaaagttatatcctgatatttttggtgtaagaatccctttcttcatattacacaagggaaggtcaaaggacataggacatctaactctccttttttga

SEQ ID NO: 360348 - DNA, 701 bp, Homo sapiens
cgcggtgggcgtggccgcggtaggctgccagccaggctgggaaagcggtggtagctggttgggttgctggggctcggttgttgtagtcgcgatgttcttctccgaggccagagccaggtcgcggacgtgggaagccagtccctcggaacacaggaagtgggtggaagtatttaaagcatgtgatgaagatcacaaaggatatctcagcagagaggactttaaaactgctgttgtaatgctgtttgggtacaagccctccaagatagaagtggattctgtgatgtcttcaataaatccaaatacttctggtatattactcgaggggtttttaaatattgtcaggaaaaagaaggaagctcaacgatatcggaacgaagtaagacacatcttcacagcctttgacacctactatcgtggatttttaactttggaagatttcaaaaaagcatttaggcaggtggctcccaaattaccggaaaggactgttcttgaggtattcaggagccttcacgtaaatgggtccagtcatgcctcccagtaagaagccagaaagctcaggaattagtgtctccagtggactgagtcagtgttacgggggcagcggtttctccaaggcccttcaggaagacgatgacctcgacttttctctgcctgacatccgattagaagagggggccatggaagatgaagagctgaccaac

SEQ ID NO: 360349 - DNA, 432 bp, Homo sapiens
tgcatgaacagctcaggtgggttcagagtggctcagctatgaggggctgcctagttactgagaagcttattatggagctcagagaagtagtcagggctgactcttagaaatggcagctctcctgtttacctgtaatcatttcagttggaattacaaagcaggtcagctgaaaagagtcagcctgtgaagcattgtatttaacttggattcacctggaaagatagaagtggattctgtgatgtcttcaataaatccaaatacttctggtttattgcagtttctaagttgagctcactgtgatagccagatgctagactccttcattttcaagaggatttctctgtgtgcactgaccctgaagcttagaactgtgaaccacaaaaaactatacttaatggaactttcaagtaaaaaatttatatagttttgtta

SEQ ID NO: 360350 - DNA, 2660 bp, Homo sapiens
  misc_feature (1231)..(1231): n is a, c, g, or t
  misc_feature (1635)..(1635): n is a, c, g, or t
  misc_feature (1749)..(1749): n is a, c, g, or t
cgcggtgggcgtggccgcggtaggctgccagccaggctgggaaagcggtggtagctggttgggttgctggggctcggttgttgtagtcgcgatgttcttctccgaggccagagccaggtcgcggacgtgggaagccagtccctcggaacacaggaagtgggtggaagtatttaaagcatgtgatgaagatcacaaaggatatctcagcagagaggactttaaaactgctgttgtaatgctgtttgggtacaagccctccaagatagaagtggattctgtgatgtcttcaataaatccaaatacttctggtatattactcgaggggtttttaaatattgtcaggaaaaagaaggaagctcaacgatatcggaacgaagtaagacacatcttcacagcctttgacacctactatcgtggatttttaactttggaagatttcaaaaaagcatttaggcaggtggctcccaaattaccggaaaggactgttcttgaggtattcagggaagtagatcgagattcagatggtcacgtcagctttagagactttgaatatgccctgaactatggacagaaggaagcctaactattgtgaactacttttggtaactctggggagatcaatagattgtaatgtcagcagactctactctactaatgatgtcatgctactgacttgtgattaaacatttaaaaatttttaatttttgtgggtacatagtaggtgcatatgtatacatacacacacatatatgggttacgggagatattttggcacaggcatgcaataagtaattgactaaatttttaatcataatttttggatgctgatgatagacttgcatctcagaatcctagagatggttgctgccgggggtctccttctgtgtggccagcagccctgagtcaggccgccattgctagagctggggctagggatggcactggtggtcctcctcctcctcactcttcttgccccctaccctctccacactgcaggccacggtgctctactcactcacttcattgtcctcaccatcccaccctgaatctcatcatctcctaatatctgcagaggggcagacttttcctgccaatggtgccagtttccttcatttgctcaacattggttgaacaaataatagcacctacacatacagaatacttactatgttccaagcaatcagccaggccttgggaagcataggcttaagacttctctaagataggctcntgcctacaatcccagcactttgggaggccaaagcaggaggatcacttgagcctaggaattggagactagcctgggcaacataccgagaccccatccctaccaaaaaattaataataaaaaattatctggatttagtggtgtgtacctgtagtcccagctacttgggaggctgaggtggaaggatcatttgagcccaggggtttgaagcttcagtgagccatgattgcactgtcgcactccagcctggatgatagagcaagaccctgtctctaaaaaaacactttcaattaaaaaaaaacatataaagacttctctaagataatgtccctgagtccaaatcatcactgtaaagtggtcccagggcactgtctgtgcaagacaaagaaatcggcttgggctaacangagcaagccctctcgggctatatacagaggaagaacagggtgatgagggtactgggggcaagagacatgtttgcagaaccctttaggatggtctaggcttgggagtctcactgnggagaagcaagccttgagctgctcagctgccctctgctccataccccctggtttctagcagtcacgtcctgcacccagacacttagccatgtgtgttcacgttccccatgccttgcctgtcctgctgggctccagtaactgctatactggagcaagaacagcaatgctggacactcagcatttagtgaaggtaattccaaaatactggtatcagtactcttatttataagtgtacggaatgcataacatgaacattagtcaaagaacttttaatataattcactttttaagtgttaaaatttaaaggtcaagtaaaattgtaaatttgtaatatggaaacattaagcgtcattatcatacaaattattagcagataaccttaataaaaataaacgtttgcgggttttttttgagacagagtctcgctttgtcacctaagctggagtgcagtgcgcgatctcggctcactgcaacttccgcctcgctgaggcaggagaatagcatggacctgggaggcggagcttgcagtgagctgaaatggtgccactgcactccagtctgggcaacagagcgagactccctctcaaaaaaaaaaaaaaaaaaaaaaaaaaagacattaagtagaaacaaatcaagcatggactttagctaataataatgtatcactattggttcattaattgtaacaaatgtatcctactcatatataatgttaatagtaggggaaactgggtgaggtatatgggaaccctctactattttcacaatttttctataaatctaaaactattctaaaattaaaaattcatttaaaaaataaagtcttattcaaaacctgttaaactaaactttatctaaaatgaagaaaacattgaaaatcaagtaaaaataaaatcttatttcaaatacaa

SEQ ID NO: 360351 - DNA, 2618 bp, Homo sapiens
  misc_feature (1189)..(1189): n is a, c, g, or t
  misc_feature (1593)..(1593): n is a, c, g, or t
  misc_feature (1707)..(1707): n is a, c, g, or t
tgcatgaacagctcaggtgggttcagagtggctcagctatgaggggctgcctagttactgagaagcttattatggagctcagagaagtagtcagggctgactcttagaaatggcagctctcctgtttacctgtaatcatttcagttggaattacaaagcaggtcagctgaaaagagtcagcctgtgaagcattgtatttaacttggattcacctggaaagatagaagtggattctgtgatgtcttcaataaatccaaatacttctggtatattactcgaggggtttttaaatattgtcaggaaaaagaaggaagctcaacgatatcggaacgaagtaagacacatcttcacagcctttgacacctactatcgtggatttttaactttggaagatttcaaaaaagcatttaggcaggtggctcccaaattaccggaaaggactgttcttgaggtattcagggaagtagatcgagattcagatggtcacgtcagctttagagactttgaatatgccctgaactatggacagaaggaagcctaactattgtgaactacttttggtaactctggggagatcaatagattgtaatgtcagcagactctactctactaatgatgtcatgctactgacttgtgattaaacatttaaaaatttttaatttttgtgggtacatagtaggtgcatatgtatacatacacacacatatatgggttacgggagatattttggcacaggcatgcaataagtaattgactaaatttttaatcataatttttggatgctgatgatagacttgcatctcagaatcctagagatggttgctgccgggggtctccttctgtgtggccagcagccctgagtcaggccgccattgctagagctggggctagggatggcactggtggtcctcctcctcctcactcttcttgccccctaccctctccacactgcaggccacggtgctctactcactcacttcattgtcctcaccatcccaccctgaatctcatcatctcctaatatctgcagaggggcagacttttcctgccaatggtgccagtttccttcatttgctcaacattggttgaacaaataatagcacctacacatacagaatacttactatgttccaagcaatcagccaggccttgggaagcataggcttaagacttctctaagataggctcntgcctacaatcccagcactttgggaggccaaagcaggaggatcacttgagcctaggaattggagactagcctgggcaacataccgagaccccatccctaccaaaaaattaataataaaaaattatctggatttagtggtgtgtacctgtagtcccagctacttgggaggctgaggtggaaggatcatttgagcccaggggtttgaagcttcagtgagccatgattgcactgtcgcactccagcctggatgatagagcaagaccctgtctctaaaaaaacactttcaattaaaaaaaaacatataaagacttctctaagataatgtccctgagtccaaatcatcactgtaaagtggtcccagggcactgtctgtgcaagacaaagaaatcggcttgggctaacangagcaagccctctcgggctatatacagaggaagaacagggtgatgagggtactgggggcaagagacatgtttgcagaaccctttaggatggtctaggcttgggagtctcactgnggagaagcaagccttgagctgctcagctgccctctgctccataccccctggtttctagcagtcacgtcctgcacccagacacttagccatgtgtgttcacgttccccatgccttgcctgtcctgctgggctccagtaactgctatactggagcaagaacagcaatgctggacactcagcatttagtgaaggtaattccaaaatactggtatcagtactcttatttataagtgtacggaatgcataacatgaacattagtcaaagaacttttaatataattcactttttaagtgttaaaatttaaaggtcaagtaaaattgtaaatttgtaatatggaaacattaagcgtcattatcatacaaattattagcagataaccttaataaaaataaacgtttgcgggttttttttgagacagagtctcgctttgtcacctaagctggagtgcagtgcgcgatctcggctcactgcaacttccgcctcgctgaggcaggagaatagcatggacctgggaggcggagcttgcagtgagctgaaatggtgccactgcactccagtctgggcaacagagcgagactccctctcaaaaaaaaaaaaaaaaaaaaaaaaaaagacattaagtagaaacaaatcaagcatggactttagctaataataatgtatcactattggttcattaattgtaacaaatgtatcctactcatatataatgttaatagtaggggaaactgggtgaggtatatgggaaccctctactattttcacaatttttctataaatctaaaactattctaaaattaaaaattcatttaaaaaataaagtcttattcaaaacctgttaaactaaactttatctaaaatgaagaaaacattgaaaatcaagtaaaaataaaatcttatttcaaatacaa

SEQ ID NO: 360352 - DNA, 2298 bp, Homo sapiens
  misc_feature (13)..(13): n is a, c, g, or t
  misc_feature (17)..(18): n is a, c, g, or t
  misc_feature (20)..(20): n is a, c, g, or t
  misc_feature (24)..(24): n is a, c, g, or t
  misc_feature (869)..(869): n is a, c, g, or t
  misc_feature (1273)..(1273): n is a, c, g, or t
  misc_feature (1387)..(1387): n is a, c, g, or t
aaaaaaaaaaaanaaannanaaanagaagaaaaaaaaaagaaaaaaaaaatttcagctgttggccagggtctactctctggccctggtggatgcccatattccttttcatgtgatcctctgcatcttcaagcaacaatgggaagtagatcgagattcagatggtcacgtcagctttagagactttgaatatgccctgaactatggacagaaggaagcctaactattgtgaactacttttggtaactctggggagatcaatagattgtaatgtcagcagactctactctactaatgatgtcatgctactgacttgtgattaaacatttaaaaatttttaatttttgtgggtacatagtaggtgcatatgtatacatacacacacatatatgggttacgggagatattttggcacaggcatgcaataagtaattgactaaatttttaatcataatttttggatgctgatgatagacttgcatctcagaatcctagagatggttgctgccgggggtctccttctgtgtggccagcagccctgagtcaggccgccattgctagagctggggctagggatggcactggtggtcctcctcctcctcactcttcttgccccctaccctctccacactgcaggccacggtgctctactcactcacttcattgtcctcaccatcccaccctgaatctcatcatctcctaatatctgcagaggggcagacttttcctgccaatggtgccagtttccttcatttgctcaacattggttgaacaaataatagcacctacacatacagaatacttactatgttccaagcaatcagccaggccttgggaagcataggcttaagacttctctaagataggctcntgcctacaatcccagcactttgggaggccaaagcaggaggatcacttgagcctaggaattggagactagcctgggcaacataccgagaccccatccctaccaaaaaattaataataaaaaattatctggatttagtggtgtgtacctgtagtcccagctacttgggaggctgaggtggaaggatcatttgagcccaggggtttgaagcttcagtgagccatgattgcactgtcgcactccagcctggatgatagagcaagaccctgtctctaaaaaaacactttcaattaaaaaaaaacatataaagacttctctaagataatgtccctgagtccaaatcatcactgtaaagtggtcccagggcactgtctgtgcaagacaaagaaatcggcttgggctaacangagcaagccctctcgggctatatacagaggaagaacagggtgatgagggtactgggggcaagagacatgtttgcagaaccctttaggatggtctaggcttgggagtctcactgnggagaagcaagccttgagctgctcagctgccctctgctccataccccctggtttctagcagtcacgtcctgcacccagacacttagccatgtgtgttcacgttccccatgccttgcctgtcctgctgggctccagtaactgctatactggagcaagaacagcaatgctggacactcagcatttagtgaaggtaattccaaaatactggtatcagtactcttatttataagtgtacggaatgcataacatgaacattagtcaaagaacttttaatataattcactttttaagtgttaaaatttaaaggtcaagtaaaattgtaaatttgtaatatggaaacattaagcgtcattatcatacaaattattagcagataaccttaataaaaataaacgtttgcgggttttttttgagacagagtctcgctttgtcacctaagctggagtgcagtgcgcgatctcggctcactgcaacttccgcctcgctgaggcaggagaatagcatggacctgggaggcggagcttgcagtgagctgaaatggtgccactgcactccagtctgggcaacagagcgagactccctctcaaaaaaaaaaaaaaaaaaaaaaaaaaagacattaagtagaaacaaatcaagcatggactttagctaataataatgtatcactattggttcattaattgtaacaaatgtatcctactcatatataatgttaatagtaggggaaactgggtgaggtatatgggaaccctctactattttcacaatttttctataaatctaaaactattctaaaattaaaaattcatttaaaaaataaagtcttattcaaaacctgttaaactaaactttatctaaaatgaagaaaacattgaaaatcaagtaaaaataaaatcttatttcaaatacaa

SEQ ID NO: 360353 - DNA, 846 bp, Homo sapiens
  misc_feature (107)..(107): n is a, c, g, or t
  misc_feature (131)..(131): n is a, c, g, or t
cgctcgagtaatataccagaagtatttggatttattgaagacatcacagaatccacttctatcttggagggcttgtacccaaacagcattacaacagcagttttaangtcctctctgctgagatatccttngtgatcttcatcacatgctttaaataccgcggccacgcccaccgcggttcaggaaaaagaaggaagctcaacgatatcggaacgaagtaagacacatcttcacagcctttgacacctactatcgtggatttttaactttggaagatttcaaaaaagcatttaggcaggtggctcccaaattaccggaaaggactgttcttgaggtattcagaggcattttcagtgcatgatttaacttcggctgtcatcaggaagctgacttaaagttctttcttgactttgcctgccatcaacaccctgtggtatttctggctggcatttttctctgcatggatatgtttacttctccatgcctaggaaccttctccatctcattccagtcactaattctacccacggtacatcttctctgtcacagtgatttgagtgtgggtgctatgagaccttccttcttcagaataattctgtctgcaatgaaaaacagtatttgttagcttttaaaatgatagctctgaacttgaatttcctctgcactctccgtgagatgaccagacctgcttgtatatatgcgatgacgacgaaaagtcagaagacattaagtatttcagcatgtctcatttgaaatatgaatttaaaatgatgatgccctgccattcattatgtgaataaaatgccaccccacacgttatgaataaactttccagttttaacagtg

SEQ ID NO: 360354 - DNA, 223 bp, Homo sapiens
agttttaaactgtcaaataagaggagcctaacaagatgtgacaactaaatgtcatttggtatcctggatgagatcacggaataaaaaataaacattggccggacacagtgactcagcctgtaatcccagcacttcgggaggccgaggcgggtggatcacgaggtcgggagatcgagaccatcctggctaacacggtgaaaccccgtctctactaaaaatacaa

SEQ ID NO: 360355 - DNA, 2810 bp, Homo sapiens
  misc_feature (1231)..(1231): n is a, c, g, or t
  misc_feature (1635)..(1635): n is a, c, g, or t
  misc_feature (1749)..(1749): n is a, c, g, or t
  misc_feature (2364)..(2364): n is a, c, g, or t
cgcggtgggcgtggccgcggtaggctgccagccaggctgggaaagcggtggtagctggttgggttgctggggctcggttgttgtagtcgcgatgttcttctccgaggccagagccaggtcgcggacgtgggaagccagtccctcggaacacaggaagtgggtggaagtatttaaagcatgtgatgaagatcacaaaggatatctcagcagagaggactttaaaactgctgttgtaatgctgtttgggtacaagccctccaagatagaagtggattctgtgatgtcttcaataaatccaaatacttctggtatattactcgaggggtttttaaatattgtcaggaaaaagaaggaagctcaacgatatcggaacgaagtaagacacatcttcacagcctttgacacctactatcgtggatttttaactttggaagatttcaaaaaagcatttaggcaggtggctcccaaattaccggaaaggactgttcttgaggtattcagggaagtagatcgagattcagatggtcacgtcagctttagagactttgaatatgccctgaactatggacagaaggaagcctaactattgtgaactacttttggtaactctggggagatcaatagattgtaatgtcagcagactctactctactaatgatgtcatgctactgacttgtgattaaacatttaaaaatttttaatttttgtgggtacatagtaggtgcatatgtatacatacacacacatatatgggttacgggagatattttggcacaggcatgcaataagtaattgactaaatttttaatcataatttttggatgctgatgatagacttgcatctcagaatcctagagatggttgctgccgggggtctccttctgtgtggccagcagccctgagtcaggccgccattgctagagctggggctagggatggcactggtggtcctcctcctcctcactcttcttgccccctaccctctccacactgcaggccacggtgctctactcactcacttcattgtcctcaccatcccaccctgaatctcatcatctcctaatatctgcagaggggcagacttttcctgccaatggtgccagtttccttcatttgctcaacattggttgaacaaataatagcacctacacatacagaatacttactatgttccaagcaatcagccaggccttgggaagcataggcttaagacttctctaagataggctcntgcctacaatcccagcactttgggaggccaaagcaggaggatcacttgagcctaggaattggagactagcctgggcaacataccgagaccccatccctaccaaaaaattaataataaaaaattatctggatttagtggtgtgtacctgtagtcccagctacttgggaggctgaggtggaaggatcatttgagcccaggggtttgaagcttcagtgagccatgattgcactgtcgcactccagcctggatgatagagcaagaccctgtctctaaaaaaacactttcaattaaaaaaaaacatataaagacttctctaagataatgtccctgagtccaaatcatcactgtaaagtggtcccagggcactgtctgtgcaagacaaagaaatcggcttgggctaacangagcaagccctctcgggctatatacagaggaagaacagggtgatgagggtactgggggcaagagacatgtttgcagaaccctttaggatggtctaggcttgggagtctcactgnggagaagcaagccttgagctgctcagctgccctctgctccataccccctggtttctagcagtcacgtcctgcacccagacacttagccatgtgtgttcacgttccccatgccttgcctgtcctgctgggctccagtaactgctatactggagcaagaacagcaatgctggacactcagcatttagtgaaggtaattccaaaatactggtatcagtactcttatttataagtgtacggaatgcataacatgaacattagtcaaagaacttttaatataattcactttttaagtgttaaaatttaaaggtcaagtaaaattgtaaatttgtaatatggaaacattaagcgtcattatcatacaaattattagcagataaccttaataaaaataaacgtttgcgggttttttttgagacagagtctcgctttgtcacctaagctggagtgcagtgcgcgatctcggctcactgcaacttccgcctcctgggatcaagtgattctcctgccttagcctcctgagtatctgggtttacaggtgtgtaccgccacacccgtctctactaaaaatacaaaaaacaaaaaaagattagctgggcgtggtggcaggtgcctgtngtcccagctgctcgggaggctgaggcaggagaatagcatggacctgggaggcggagcttgcagtgagctgaaatggtgccactgcactccagtctgggcaacagagcgagactccctctcaaaaaaaaaaaaaaaaaaaaaaaaaaagacattaagtagaaacaaatcaagcatggactttagctaataataatgtatcactattggttcattaattgtaacaaatgtatcctactcatatataatgttaatagtaggggaaactgggtgaggtatatgggaaccctctactattttcacaatttttctataaatctaaaactattctaaaattaaaaattcatttaaaaaataaagtcttattcaaaacctgttaaactaaactttatctaaaatgaagaaaacattgaaaatcaagtaaaaataaaatcttatttcaaatacaa

SEQ ID NO: 360356 - DNA, 735 bp, Homo sapiens
cggacttcagcttggcctgggcctctcgcttcctctcccgtgtctgggtctcactctgccgggtgtgcagataagacctgggctgcctgtccaaagggtcgtggttaatgactgatcctggagctgcagggctcctggctccccgtccaggactacggctacctccaagttccatctcctttctctctatatagtctattaatggtatttaaagcatgtgatgaagatcacaaaggatatctcagcagagaggactttaaaactgctgttgtaatgctgtttgggtacaagccctccaagatagaagtggattctgtgatgtcttcaataaatccaaatacttctggtatattactcgaggggtttttaaatattgtcaggaaaaagaaggaagctcaacgatatcggaacgaagtaagacacatcttcacagcctttgacacctactatcgtggatttttaactttggaagatttcaaaaaagcatttaggcaggtggctcccaaattaccggaaaggactgttcttgaggtattcagggaagtagatcgagattcagatggtcacgtcagctttagagactttgaatatgccctgaactatggacagaaggaagcctaactattgtgaactacttttggtaactctggggagatcaatagattgtaatgtcagcagactctactctactaatgatgtcatgctactgacttgtgattaaacatttaaaaattt

SEQ ID NO: 360357 - DNA, 691 bp, Homo sapiens
cgcggtgggcgtggccgcggtaggctgccagccaggctgggaaagcggtggtagctggttgggttgctggggctcggttgttgtagtcgcgatgttcttctccgaggccagagccaggtcgcggacgtgggaagccagtccctcggaacacaggaagtgggtggaagtatttaaagcatgtgatgaagatcacaaaggatatctcagcagagaggactttaaaactgctgttgtaatgctgtttgggtacaagccctccaagatagaagtggattctgtgatgtcttcaataaatccaaatacttctggtatattactcgaggggtttttaaatattgtcaggaaaaagaaggaagctcaacgatatcggaacgaagtaagacacatcttcacagcctttgacacctactatcgtggatttttaactttggaagatttcaaaaaagcatttaggcaggtggctcccaaattaccggaaaggactgttcttgaggtattcagaaacctggaagtcatcccaagttcctttctttttcttaccctccacatccaagctgtcaacaaatctcgactctgaccacctctcagcacctccactgtgtcacccagtgcaaacctccaccaccatctcagcctcttacccagctccaggattctgcctttgcccccatcaatctacttcaggtctctt

SEQ ID NO: 360358 - DNA, 2501 bp, Homo sapiens
  misc_feature (107)..(107): n is a, c, g, or t
  misc_feature (131)..(131): n is a, c, g, or t
  misc_feature (1072)..(1072): n is a, c, g, or t
  misc_feature (1476)..(1476): n is a, c, g, or t
  misc_feature (1590)..(1590): n is a, c, g, or t
cgctcgagtaatataccagaagtatttggatttattgaagacatcacagaatccacttctatcttggagggcttgtacccaaacagcattacaacagcagttttaangtcctctctgctgagatatccttngtgatcttcatcacatgctttaaataccgcggccacgcccaccgcggttcaggaaaaagaaggaagctcaacgatatcggaacgaagtaagacacatcttcacagcctttgacacctactatcgtggatttttaactttggaagatttcaaaaaagcatttaggcaggtggctcccaaattaccggaaaggactgttcttgaggtattcagggaagtagatcgagattcagatggtcacgtcagctttagagactttgaatatgccctgaactatggacagaaggaagcctaactattgtgaactacttttggtaactctggggagatcaatagattgtaatgtcagcagactctactctactaatgatgtcatgctactgacttgtgattaaacatttaaaaatttttaatttttgtgggtacatagtaggtgcatatgtatacatacacacacatatatgggttacgggagatattttggcacaggcatgcaataagtaattgactaaatttttaatcataatttttggatgctgatgatagacttgcatctcagaatcctagagatggttgctgccgggggtctccttctgtgtggccagcagccctgagtcaggccgccattgctagagctggggctagggatggcactggtggtcctcctcctcctcactcttcttgccccctaccctctccacactgcaggccacggtgctctactcactcacttcattgtcctcaccatcccaccctgaatctcatcatctcctaatatctgcagaggggcagacttttcctgccaatggtgccagtttccttcatttgctcaacattggttgaacaaataatagcacctacacatacagaatacttactatgttccaagcaatcagccaggccttgggaagcataggcttaagacttctctaagataggctcntgcctacaatcccagcactttgggaggccaaagcaggaggatcacttgagcctaggaattggagactagcctgggcaacataccgagaccccatccctaccaaaaaattaataataaaaaattatctggatttagtggtgtgtacctgtagtcccagctacttgggaggctgaggtggaaggatcatttgagcccaggggtttgaagcttcagtgagccatgattgcactgtcgcactccagcctggatgatagagcaagaccctgtctctaaaaaaacactttcaattaaaaaaaaacatataaagacttctctaagataatgtccctgagtccaaatcatcactgtaaagtggtcccagggcactgtctgtgcaagacaaagaaatcggcttgggctaacangagcaagccctctcgggctatatacagaggaagaacagggtgatgagggtactgggggcaagagacatgtttgcagaaccctttaggatggtctaggcttgggagtctcactgnggagaagcaagccttgagctgctcagctgccctctgctccataccccctggtttctagcagtcacgtcctgcacccagacacttagccatgtgtgttcacgttccccatgccttgcctgtcctgctgggctccagtaactgctatactggagcaagaacagcaatgctggacactcagcatttagtgaaggtaattccaaaatactggtatcagtactcttatttataagtgtacggaatgcataacatgaacattagtcaaagaacttttaatataattcactttttaagtgttaaaatttaaaggtcaagtaaaattgtaaatttgtaatatggaaacattaagcgtcattatcatacaaattattagcagataaccttaataaaaataaacgtttgcgggttttttttgagacagagtctcgctttgtcacctaagctggagtgcagtgcgcgatctcggctcactgcaacttccgcctcgctgaggcaggagaatagcatggacctgggaggcggagcttgcagtgagctgaaatggtgccactgcactccagtctgggcaacagagcgagactccctctcaaaaaaaaaaaaaaaaaaaaaaaaaaagacattaagtagaaacaaatcaagcatggactttagctaataataatgtatcactattggttcattaattgtaacaaatgtatcctactcatatataatgttaatagtaggggaaactgggtgaggtatatgggaaccctctactattttcacaatttttctataaatctaaaactattctaaaattaaaaattcatttaaaaaataaagtcttattcaaaacctgttaaactaaactttatctaaaatgaagaaaacattgaaaatcaagtaaaaataaaatcttatttcaaatacaa

SEQ ID NO: 360359 - DNA, 586 bp, Homo sapiens
cgcggtgggcgtggccgcggtaggctgccagccaggctgggaaagcggtggtagctggttgggttgctggggctcggttgttgtagtcgcgatgttcttctccgaggccagagccaggtcgcggacgtgggaagccagtccctcggaacacaggaagtgggtggaagtatttaaagcatgtgatgaagatcacaaaggatatctcagcagagaggactttaaaactgctgttgtaatgctgtttgggtacaagccctccaagatagaagtggattctgtgatgtcttcaataaatccaaatacttctggtatattactcgaggggtttttaaatattgtcaggaaaaagaaggaagctcaacgatatcggaacgaagtaagacacatcttcacagcctttgacacctactatcgtggatttttaactttggaagatttcaaaaaagcatttaggcaggtggctcccaaattaccggaaaggactgttcttgaggtattcagtgatttataagacgttgaaatgcattaccaagagcagttattgaatcttccttcagagataattaacgaaaagactgttattaaa

SEQ ID NO: 360360 - DNA, 382 bp, Homo sapiens
gatcacttcacactggggcaaggttccttagagcaggaaggccaggagacattcagtgccttctctgcaccttgtgatgaataggatctacttatgacagactaactctgtcctcaacctcaaccaggcagcggctcctagcctggttaactttcaaatgtgctagtgagggacaaaggcacaaaaccaaatggaaagtattgcacacattcagtgagagaggtggatgcagtcagccaattaggggagacgtggaacagatgactcctgacacggctggagaaggcggggagttttctaatacatattggattccgttttcaccaaaggtcagctttaatcaagttcccaatgtaaatattaccaatataaaccaagtaat

SEQ ID NO: 360361 - DNA, 792 bp, Homo sapiens
atacagtatggtacacaattttaatggaaggaaccacaggtatgttgaaagaacatcagtacagctggagacagggagggaccatatgatatataactcctaaaagccggaaggagttattatcacataatttctgggcgctacagaagtttttcatcactcactagtattacataatttgctagggatctattaagaaacttcgagtagcctgattagaagaaaagacattaggaaaagcaagtctcaagagttggaaagaggaaaggaacatggcatcagcaaatccggagtggctggcagtgggggcagagggttgctagagaggactgcaggtggagaaggaggtactgaggtactgaggtactgaggtaacatactgactgtatcctcttccaggaaggcaaggttcagaagtaagagctggagaaagagggccacatgcaaattccaaaatagaaccctgagggcaccctctagatattcaaaatatccccatgctcccctatgatcataagcaatgataatccatataaatcatttccatttccagtgttgtatgtaatacagggatatagaattcagattcaaagcctatgcttttttctcatgatgccataacactgcatgagccttgagtttgaaattaatttggatttgaagtaataaaaataaatttaggtataatgtactcattaccataatgtaatgggtgcactaaaatctcagaattcaccactatataatgtattcatgtaacaaaaaaaacacttgtacctcaaaagctattga

SEQ ID NO: 360362 - DNA, 426 bp, Homo sapiens
ctcttgctttacagtcaattgatgagatctttggatggtttgcatcattttttaatcctatataaatatttgtttctttcatttgcctattttggctttctttagaaaatggtcttagtttattgaaattatcgccagtgctttaaagagtatgacttccagtcaattcagttccacagttttattgagcaaatatcatggattcaaaattagcgcacactctaacccaaggtcatatagagtggtataaaggactttacagactcagcagggggagggtgcgaggtagcatagagataaaaaattgcatattaggtataatgtactcattaccataatgtaatgggtgcactaaaatctcagaattcaccactatataatgtattcatgtaacaaaaaaaacacttgtacctcaaaagctattga

SEQ ID NO: 360363 - DNA, 909 bp, Homo sapiens
ctttttttcagtgttttataattcattactgaccttttcatgctcaaatttttccagaattggttagtgagcattccttcaaaccacccttgtgtccttttgacatgtgcttataacttttttggaggacttactttcagacacaggatcttccattatctccagggcagcttggtctcaaggagaattttagtaggaaagaaaaacagcaactaaaactataataccaaaagcctgaacagatgagatgaagtagatagttgacaaagtttcctgctttttagttgatataactcttgtagcttatgttgtcaaccctgttttgttgaatgctttttagttgcctgtaggtgtgctgagacagacattgccagcagggttttgaacacagggatagagatgtgtctgaatgtacgttacggtggtgagagtgagaaaggagacctctcctgagaaggtgaaaagcagctgttgaaaaagcaagaggcagtaaactgctcttgtatttcaagccttcccaccaccatttctctagtccagggggctcttccttttaacattaaaatgtgtgtcttctaatttcccagtgatccctccaagtctgtgggatggcctggaatgtaaaaacacttagcaaatacttagtgattaaaagaaaacaatggcggaagctttaagaattgaaaaatcaaaataataagtagagaatttgtccaaacctccccctgccgacattcccccatccccagaaaggaagaaaatgtatgtagataaaaggacagagaaagacagggaaagctgtggtacggaaagaaagagtgtggccacgagcttccagtatgctcactgccaaggaatcctgacacgttctgtttctctgtataaaatcatgaacaaataaaaaaaaaa

SEQ ID NO: 360364 - DNA, 96 bp, Homo sapiens
gtactgcatatgttaatcagctcaatgtagccattccacaatatatatatattttaaaacatcatgttgtacatgataaatatgtacaacttttat

SEQ ID NO: 360365 - DNA, 412 bp, Homo sapiens
gtgatccacaatcaattcagaacctggtcttctatggtggctcacagttcctgcaccctacaatatcgtgaattttcttcctcttcatctaatgacatgaatatgctccagtggatcctaggatatctttcacatgaggttacccttgccctttggatgtcaggtggaacaaagggatggaagattttttgtactgggacattcagtaaacccctaggcctacctattgtctagtcagagttagagaagcaaatgatgtctgtgagggcctacaaggcacaagaggatgaaagtttaacttaaagtttagatgctgatattctagctagtaataatgtatgattgcctcatgtactactctttttttatatttctctcctaatgtataaagatggatttcaaaagataggca

SEQ ID NO: 360366 - DNA, 1206 bp, Homo sapiens
  misc_feature (27)..(28): n is a, c, g, or t
tacggctaggtagcgaggcctgggtgnngcacagaacagagtagaggcggcggcggcggcggccggacccagactggtagtgaggctttggaccccgagccgctgcaatgccgctggagctggagctgtgtcccgggcgctgggtgggcgggcaacacccgtgcttcatcattgccgagatcggccagaaccaccagggcgacctggacgtagccaagcgcatgatccgcatggccaaggagtgtggggctgattgtgccaagttccagaagagtgagctagaattcaagtttaatcggaaagccttggagaggccatacacctcgaagcattcctgggggaagacgtacggggagcacaaacgacatctggagttcagccatgaccagtacagggagctgcagaggtacgccgaggaggttgggatcttcttcactgcctctggcatggatgagatggcagttgaattcctgcatgaactgaatgttccatttttcaaagttggatctggagacactaataattttccttatctggaaaagacagccaaaaaaggtcgcccaatggtgatctccagtgggatgcagtcaatggacaccatgaagcaagtttatcagatcgtgaagcccctcaaccccaacttctgcttcttgcagtgtaccagcgcatacccgctccagcctgaggacgtcaacctgcgggtcatctcggaatatcagaagctctttcctgacattcccatagggtattctgggcatgaaacaggcatagcgatatctgtggccgcagtggctctgggggccaaggtgttggaacgtcacataactttggacaagacctggaaggggagtgaccactcggcctcgctggagcctggagaactggccgagctggtgcggtcagtgcgtcttgtggagcgtgccctgggctccccaaccaagcagctgctgccctgtgagatggcctgcaatgagaagctgggcaagtctgtggtggccaaagtgaaaattccggaaggcaccattctaacaatggacatgctcaccgtgaaggtgggtgagcccaaaggctatcctcctgaagacatctttaatctagtgggcaagaaggtcctggtcactgttgaagaggatgacaccatcatggaagaattggtagataatcatggcaaaaaaatcaagtcttaaaaataaagtgccattctct

SEQ ID NO: 360367 - DNA, 554 bp, Homo sapiens
ggctaatggatgggtggatgcaaatgaatgtttgcatttgaatgaaatgactgagaacaaatctttgcctgctttcaagttgctgagcgtccctctactgcctaagatgaggggtttttctacttgtatgttattccttgcctgtcataacaacagtgtttttggacaatggtgaaaaggagctccctctttgatttttgtagatggcagttgaattcctgcatgaactgaatgttccatttttcaaagttggatctggagacactaataattttccttatctggaaaagacagccaaaaaaggtaagtgtctaatttttgacttaaaatcgaagggagtccaaaccttcatatttttactcccctcatggtggcccactttcagcagatttcatgaagacaaattttagcctcttttcatttttttaaatagagatagggtctcgctgtgttggccaggttggtcttgaactcctggcctaaagcaatcctcccatctcgacctcccaaagtgctaggattacaggcatgagccactgtgccctgccagaaac

SEQ ID NO: 360368 - DNA, 1223 bp, Homo sapiens
gcgggctgacgtggcggggctggcgtgtgggtctcgcagcgttgctcacagaacagagtagaggcggcggcggcggcggccggacccagactggtagtgaggctttggaccccgagccgctgcaatgccgctggagctggagctgtgtcccgggcgctgggtgggcgggcaacacccgtgcttcatcattgccgagatcggccagaaccaccagggcgacctggacgtagccaagcgcatgatccgcatggccaaggagtgtggggctgattgtgccaagttccagaagagtgagctagaattcaagtttaatcggaaagccttggagaggccatacacctcgaagcattcctgggggaagacgtacggggagcacaaacgacatctggagttcagccatgaccagtacagggagctgcagaggtacgccgaggaggttgggatcttcttcactgcctctggcatggatgagatggcagttgaattcctgcatgaactgaatgttccatttttcaaagttggatctggagacactaataattttccttatctggaaaagacagccaaaaaaggtcgcccaatggtgatctccagtgggatgcagtcaatggacaccatgaagcaagtttatcagatcgtgaagcccctcaaccccaacttctgcttcttgcagtgtaccagcgcatacccgctccagcctgaggacgtcaacctgcgggtcatctcggaatatcagaagctctttcctgacattcccatagggtattctgggcatgaaacaggcatagcgatatctgtggccgcagtggctctgggggccaaggtgttggaacgtcacataactttggacaagacctggaaggggagtgaccactcggcctcgctggagcctggagaactggccgagctggtgcggtcagtgcgtcttgtggagcgtgccctgggctccccaaccaagcagctgctgccctgtgagatggcctgcaatgagaagctgggcaagtctgtggtggccaaagtgaaaattccggaaggcaccattctaacaatggacatgctcaccgtgaaggtgggtgagcccaaaggctatcctcctgaagacatctttaatctagtgggcaagaaggtcctggtcactgttgaagaggatgacaccatcatggaagaattggtagataatcatggcaaaaaaatcaagtcttaaaaataaagtgccattctct

SEQ ID NO: 360369 - DNA, 3166 bp, Homo sapiens
gcgggctgacgtggcggggctggcgtgtgggtctcgcagcgttgctcacagaacagagtagaggcggcggcggcggcggccggacccagactggtagtgaggctttggaccccgagccgctgcaatgccgctggagctggagctgtgtcccgggcgctgggtgggcgggcaacacccgtgcttcatcattgccgagatcggccagaaccaccagggcgacctggacgtagccaagcgcatgatccgcatggccaaggagtgtggggctgattgtgccaagttccagaagagtgagctagaattcaagtttaatcggaaagccttggagaggccatacacctcgaagcattcctgggggaagacgtacggggagcacaaacgacatctggagttcagccatgaccagtacagggagctgcagaggtacgccgaggaggttgggatcttcttcactgcctctggcatggatgagatggcagttgaattcctgcatgaactgaatgttccatttttcaaagttggatctggagacactaataattttccttatctggaaaagacagccaaaaaaggtcgcccaatggtgatctccagtgggatgcagtcaatggacaccatgaagcaagtttatcagatcgtgaagcccctcaaccccaacttctgcttcttgcagtgtaccagcgcatacccgctccagcctgaggacgtcaacctgcgggtcatctcggaatatcagaagctctttcctgacattcccatagggtattctgggcatgaaacaggcatagcgatatctgtggccgcagtggctctgggggccaaggtgttggaacgtcacataactttggacaagacctggaaggggagtgaccactcggcctcgctggagcctggagaactggccgagctggtgcggtcagtgcgtcttgtggagcgtgccctgggctccccaaccaagcagctgctgccctgtgagatggcctgcaatgagaaggtgtgtcctgccggactctactcggttctgctgccgtgtgtggaaaaaggatgggctggcctgagagggatggtcaggaccagccctccctgagccaggctgatgaaatgatcagtgaatgtgctcccacccgtgtcagcttcttcaggcttctcttcagtaatgcatgtcactctggcctgtagcagcagcaggagacacatgttatctaactttagcagtttctctggccacctagggtcacattagagtcttccactaattctctgaagcccatggccccagtactcctagactccagaatatgtaacaggagtgaggccctggaataagtcaagtctgggctcccttggagcaggtaagccctgagaaacatttaggcacggtgttccctgaggtaccagaagagcctgtggcatttcctaagccagggtggcactggtgggaagggcagtgagtcgttgcagaggtgggtgggtgatgatgcagctattccttgtgcaacagtgaccttcagacagaggaactggtgggcctagaagcactgcctggcatgctgactatcagggcttcctggaagccgtggcctggaccttcttgccttctgagtcatagagccaggcaggcatcctggggctgccaggcacacacacacctaacctgtaggctgtcggggtcaaggcaaagaccaaacaccaggcatgcctgggactgttgtcaccttttattctagtggggcctacctgcttccccaaatcaaagatgcatctataccaggaaattaaaataaagtaaaaagaaatagtttctttatagaggaaacaggagagaattagaccagaaaccagagtaagatttataacagctgagcacttaatttggctctctgagcagacagtaaaacataacaggatgcatgattatcacttgacattttttcctggcaccacattccaagcagaattgattccttgtactcttacgtggaggatatagagtaataaaacacgtaatttatttgaaagcatttatagagaagacaaacactggtcatgagcttcaggtacccttcattccctcatctgcctgtattatctgccccttcctcgggggctccttttcttgccatctgcataacagccacattcaccatcttatgagtccttcatatttctattttaccaaacaaagtggcggtaaggtgtgtgccctggagaacggtgtgtcaggagttaagaatctcatccctatgttatgtttcatcttggctgtctgcaaccctggccaagtcacccaccctgtatgggcctcagtttccccatgtttacaatgagatactgagctgaatggtaaccaaaagaatcagagtttgcatgtattgagagcattctatgttccacgtacattctgtaatatcaccaatccttacagtcatctgacaggataagtttccatttgacagagaaactaaaacgtggcctataccccacagactgggatttgaacctggctccgcctacatagcctcagccctttcctttgcactttgttgtaaaggctcctcctctgagtctctgaattcaatctatactggttgaattcctgccatgtatgagatattctgagcagtgtagggggcaacagagtgcctgctcccaaggtactgcctggggaagactgatcagggaccttgagtgtaaagtaaagtagtgtgcactagttacttctgtgaagctggcactgaatgttcattttgtccacagctgggcaagtctgtggtggccaaagtgaaaattccggaaggcaccattctaacaatggacatgctcaccgtgaaggtgggtgagcccaaaggctatcctcctgaagacatctttaatctagtgggcaagaaggtcctggtcactgttgaagaggatgacaccatcatggaagaattggtagataatcatggcaaaaaaatcaagtcttaaaaataaagtgccattctctgaattctcagttcccttgctgatgctgtcaggtgtgtttgagtgaggcgagggcaggaatggcggtctccagggacctggctgtcatccacctccacctgctccttagacagcagatgtttctgggctaggccctgtgtcagcccactggagacagaaaaagatccagtgatgcaatctc

SEQ ID NO: 360370 - DNA, 1084 bp, Homo sapiens
gcgggctgacgtggcggggctggcgtgtgggtctcgcagcgttgctcacagaacagagtagaggcggcggcggcggcggccggacccagactggtagtgaggctttggaccccgagccgctgcaatgccgctggagctggagctgtgtcccgggcgctgggtgggcgggcaacacccgtgcttcatcattgccgagatcggccagaaccaccagggcgacctggacgtagccaagcgcatgatccgcatggccaaggagtgtggggctgattgtgccaagttccagaagagtgagctagaattcaagtttaatcggaaagccttggagaggccatacacctcgaagcattcctgggggaagacgtacggggagcacaaacgacatctggagttcagccatgaccagtacagggagctgcagaggtacgccgaggaggttgggatcttcttcactgcctctggcatggatgagatggcagttgaattcctgcatgaactgaatgttccatttttcaaagttggatctggagacactaataattttccttatctggaaaagacagccaaaaaaggtcgcccaatggtgatctccagtgggatgcagtcaatggacaccatgaagcaagtttatcagatcgtgaagcccctcaaccccaacttctgcttcttgcagtgtaccagcgcatacccgctccagcctgaggacgtcaacctgcgggtcatctcggaatatcagaagctctttcctgacattcccatagggtattctgggcatgaaacaggcatagcgatatctgtggccgcagtggctctgggggccaaggtgttggaacgtcacataactttggacaagacctggaaggggagtgaccactcggcctcgctggagcctggagaactggccgagctggtgcggtcagtgcgtcttgtggagcgtgccccaaaggctatcctcctgaagacatctttaatctagtgggcaagaaggtcctggtcactgttgaagaggatgacaccatcatggaagaattggtagataatcatggcaaaaaaatcaagtcttaaaaataaagtgccattctct

SEQ ID NO: 360371 - DNA, 927 bp, Homo sapiens
cattttcctcttggcagtgtgaaattcctctgcctctttaattcagttccttttgctcaagaacactgtcggggggcagaggggagcccacctttcctgtggccgagggcaggaacccaacaagctcctctctgttcccccacaggggctggcacagtgttttaagagatgtctgtggagttcagttgaatgatgagaccagcagttgggatgtgttggggagagtcagaacctctaaagagaaagtgctgatggtgttggtgctggattactcaggtcgcccaatggtgatctccagtgggatgcagtcaatggacaccatgaagcaagtttatcagatcgtgaagcccctcaaccccaacttctgcttcttgcagtgtaccagcgcatacccgctccagcctgaggacgtcaacctgcgggtcatctcggaatatcagaagctctttcctgacattcccatagggtattctgggcatgaaacaggcatagcgatatctgtggccgcagtggctctgggggccaaggtgttggaacgtcacataactttggacaagacctggaaggggagtgaccactcggcctcgctggagcctggagaactggccgagctggtgcggtcagtgcgtcttgtggagcgtgccctgggctccccaaccaagcagctgctgccctgtgagatggcctgcaatgagaagctgggcaagtctgtggtggccaaagtgaaaattccggaaggcaccattctaacaatggacatgctcaccgtgaaggtgggtgagcccaaaggctatcctcctgaagacatctttaatctagtgggcaagaaggtcctggtcactgttgaagaggatgacaccatcatggaagaattggtagataatcatggcaaaaaaatcaagtcttaaaaataaagtgccattctct

SEQ ID NO: 360372 - DNA, 651 bp, Homo sapiens
gcgggctgacgtggcggggctggcgtgtgggtctcgcagcgttgctcacagaacagagtagaggcggcggcggcggcggccggacccagactggtagtgaggctttggaccccgagccgctgcaatgccgctggagctggagctgtgtcccgggcgctgggtgggcgggcaacacccgtgcttcatcattgccgagatcggccagaaccaccagggcgacctggacgtagccaagcgcatgatccgcatggccaaggagtgtggggctgattgtgccaagttccagaagagtgagctagaattcaagtttaatcggaaagccttggagaggccatacacctcgaagcattcctgggggaagacgtacggggagcacaaacgacatctggagttcagccatgaccagtacagggagctgcagaggtacgccgaggaggttgggatcttcttcactgcctctggcatggatgagatggcagttgaattcctgcatgaactgaatgttccatttttcaaagttggatctggagacactaataattttccttatctggaaaagacagccaaaaaaggtcgcccaatggtgatctccagtgggatgcaataatcatggcaaaaaaatcaagtcttaaaaataaagtgccattctct

SEQ ID NO: 360373 - DNA, 690 bp, Homo sapiens
  misc_feature (27)..(28): n is a, c, g, or t
tacggctaggtagcgaggcctgggtgnngcacagaacagagtagaggcggcggcggcggcggccggacccagactggtagtgaggctttggaccccgagccgctgcaatgccgctggagctggagctgtgtcccgggcgctgggtgggcgggcaacacccgtgcttcatcattgccgagatcggccagaaccaccagggcgacctggacgtagccaagcgcatgatccgcatggccaaggagtgtggggctgattgtgccaagttccagaagagtgagctagaattcaagtttaatcggaaagccttggagaggccatacacctcgaagcattcctgggggaagacgtacggggagcacaaacgacatctggagttcagccatgaccagtacagggagctgcagaggtacgccgaggaggttgggatcttcttcactgcctctggcatggatgaggtgagtcctctgctgctctgtcatttgtcactttagcagaccaagggtcagcaggcagcctggtgacttccggcttagggccacctccagcccttgctcatcctttctgttcccagctactggagaggctagcaggcgccaaagcccagtgagaatctgtgggaaggatgccattgttttaaaaacacattgtctctggccgggcttgatggctcacacctgtaatcccggcact

SEQ ID NO: 360374 - DNA, 568 bp, Homo sapiens
cattttcctcttggcagtgtgaaattcctctgcctctttaattcagttccttttgctcaagaacactgtcggggggcagaggggagcccacctttcctgtggccgagggcaggaacccaacaagctcctctctgttcccccacaggggctggcacagtgttttaagagatgtctgtggagttcagttgaatgatgagaccagcagttgggatgtgttggggagagtcagaacctctaaagagaaagtgctgatggtgttggtgctggattactcaggtcgcccaatggtgatctccagtgggatgcagtcaatggacaccatgaagcaagtttatcagatcgtgaagcccctcaaccccaacttctgcttcttgcagtgtaccagcgcatacccgctccagcctgaggacgtcaacctgcgggtcatctcggtgagcaggagggagggggttcccttcttgggccatttactatggggaaggcgtagtcttttttataaccaaaattctaacaaacatggcatactttataatttgaacatcctttgacagtcttgctgttaccaaat

SEQ ID NO: 360375 - DNA, 1239 bp, Homo sapiens
gcgggctgacgtggcggggctggcgtgtgggtctcgcagcgttgctcacagaacagagtagaggcggcggcggcggcggccggacccagactggtagtgaggctttggaccccgagccgctgcaatgccgctggagctggagctgtgtcccgggcgctgggtgggcgggcaacacccgtgcttcatcattgccgagatcggccagaaccaccagggcgacctggacgtagccaagcgcatgatccgcatggccaaggagtgtggggctgattgtgccaagttccagaagagtgagctagaattcaagtttaatcggaaagccttggagaggccatacacctcgaagcattcctgggggaagacgtacggggagcacaaacgacatctggagttcagccatgaccagtacagggagctgcagaggtacgccgaggaggttgggatcttcttcactgcctctggcatggatgagatggcagttgaattcctgcatgaactgaatgttccatttttcaaagttggatctggagacactaataattttccttatctggaaaagacagccaaaaaaggtcgcccaatggtgatctccagtgggatgcagtcaatggacaccatgaagcaagtttatcagatcgtgaagcccctcaaccccaacttctgcttcttgcagtgtaccagcgcatacccgctccagcctgaggacgtcaacctgcgggtcatctcggaatatcagaagctctttcctgacattcccatagggtattctgggcatgaaacaggcatagcgatatctgtggccgcagtggctctgggggccaaggtgttggaacgtcacataactttggacaagacctggaaggggagtgaccactcggcctcgctggagcctggagaactggccgagctggtgcggtcagtgcgtcttgtggagcgtgccctgggctccccaaccaagcagctgctgccctgtgagatggcctgcaatgagaagctgggcaagtctgtggtggccaaagtgaaaattccggaaggcaccattctaacaatggacatgctcaccgtgaaggtgggtgagcccaaaggctatcctcctgaagacatctttaatctagtgggcaagaaggtcctggtcactgttgaagaggatgacaccatcatggaagaattggtagataatcatggcacttgatttttaagacttgatttttttgccatgtcgacccgccgcgaatttag

SEQ ID NO: 360376 - DNA, 954 bp, Homo sapiens
ggctaatggatgggtggatgcaaatgaatgtttgcatttgaatgaaatgactgagaacaaatctttgcctgctttcaagttgctgagcgtccctctactgcctaagatgaggggtttttctacttgtatgttattccttgcctgtcataacaacagtgtttttggacaatggtgaaaaggagctccctctttgatttttgtagatggcagttgaattcctgcatgaactgaatgttccatttttcaaagttggatctggagacactaataattttccttatctggaaaagacagccaaaaaaggtcgcccaatggtgatctccagtgggatgcagtcaatggacaccatgaagcaagtttatcagatcgtgaagcccctcaaccccaacttctgcttcttgcagtgtaccagcgcatacccgctccagcctgaggacgtcaacctgcgggtcatctcggaatatcagaagctctttcctgacattcccatagggtattctgggcatgaaacaggcatagcgatatctgtggccgcagtggctctgggggccaaggtgttggaacgtcacataactttggacaagacctggaaggggagtgaccactcggcctcgctggagcctggagaactggccgagctggtgcggtcagtgcgtcttgtggagcgtgccctgggctccccaaccaagcagctgctgccctgtgagatggcctgcaatgagaagctgggcaagtctgtggtggccaaagtgaaaattccggaaggcaccattctaacaatggacatgctcaccgtgaaggtgggtgagcccaaaggctatcctcctgaagacatctttaatctagtgggcaagaaggtcctggtcactgttgaagaggatgacaccatcatggaagaattggtagataatcatggcaaaaaaatcaagtcttaaaaataaagtgccattctct

SEQ ID NO: 360377 - DNA, 951 bp, Homo sapiens
  misc_feature (27)..(28): n is a, c, g, or t
tacggctaggtagcgaggcctgggtgnngcacagaacagagtagaggcggcggcggcggcggccggacccagactggtagtgaggctttggaccccgagccgctgcaatgccgctggagctggagctgtgtcccgggcgctgggtgggcgggcaacacccgtgcttcatcattgccgagatcggccagaaccaccagggcgacctggacgtagccaagcgcatgatccgcatggccaaggagtgtggggctgattgtgccaagttccagaagagtgagctagaattcaagtttaatcggaaagccttggagaggccatacacctcgaagcattcctgggggaagacgtacggggagcacaaacgacatctggagttcagccatgaccagtacagggagctgcagaggtacgccgaggaggttgggatcttcttcactgcctctggcatggatgaggaatatcagaagctctttcctgacattcccatagggtattctgggcatgaaacaggcatagcgatatctgtggccgcagtggctctgggggccaaggtgttggaacgtcacataactttggacaagacctggaaggggagtgaccactcggcctcgctggagcctggagaactggccgagctggtgcggtcagtgcgtcttgtggagcgtgccctgggctccccaaccaagcagctgctgccctgtgagatggcctgcaatgagaagctgggcaagtctgtggtggccaaagtgaaaattccggaaggcaccattctaacaatggacatgctcaccgtgaaggtgggtgagcccaaaggctatcctcctgaagacatctttaatctagtgggcaagaaggtcctggtcactgttgaagaggatgacaccatcatggaagaattggtagataatcatggcaaaaaaatcaagtcttaaaaataaagtgccattctct

SEQ ID NO: 360378 - DNA, 269 bp, Homo sapiens
tgagagagcagtcttctgtcagctcctcccctcccgtttcttctgttctcattcgatgttagttggttgacaagagtgttaaaactcttctgttttgcttttcctagcggtttctttgggttgtactcagaaaaaaaacaagcaatgtagaaataaaatctccttggtcctttagaacagtgattttcaaccaaggggctttttcaaactacattccttagctcccttgctactatttttttttttttttttttgagatggtgtcttgc

SEQ ID NO: 360379 - DNA, 2435 bp, Homo sapiens
ccgcgctgccgatcgccgggaggacccccgcctcgccgaagacgggcggggcaagccgagcctcacggggtccccggagctgggccgggcctccagatggagaaggcgcaacggggagttcttgagtaagccagagcggtgtccagcgcggtgtagccgcagccgccgctgtcaggcgcagcaacgggcaaccccgtagaagtcggtcggcaggtcctctccaacccgccgctaccgcgccgctgtgggagagaccccagcaggagcccaaaggcagctacgggggcgcgaaggccgctggcgccgcctcggccagcccttcccgcgcggttccactgccttaaggatgacagtcgtagggaaccctcgaagttggagctgccagtggttgccaatcctgatactgttgctgggcacaggccatgggccaggggtggaaggcgtgacacactacaaggccggcgaccctgttattctgtatgtcaacaaagtgggaccctaccataaccctcaggaaacttaccactactatcagcttccagtctgctgccctgagaagatacgtcacaaaagccttagcctgggtgaagtgctggatggggaccgaatggctgagtctttgtatgagatccgctttcgggaaaacgtggagaagagaattctgtgccacatgcagctcagttctgcacaggtggagcagctgcgccaggccattgaagaactgtactactttgaatttgtggtagatgacttgccaatccggggctttgtgggctacatggaggagagtggtttcctgccacacagccacaagataggactctggacccatttggacttccacctagaattccatggagaccgaattatatttgccaatgtttcagtgcgggacgtcaagccccacagcttggatgggttacgacctgacgagttcctaggccttacccacacttatagcgtgcgctggtctgagacttcagtggagcgtcggagtgacaggcgccgtggtgacgatggtggtttctttcctcgaacactggaaatccattggttgtccatcatcaactccatggtgcttgtgtttttactggtgggttttgtggctgtcattctaatgcgtgtgcttcggaatgacctggctcggtacaacttagatgaggagaccacctctgcaggttctggtgatgactttgaccagggtgacaatggctggaaaattatccatacagatgtcttccgcttccccccataccgtggtctgctctgtgctgtgcttggcgtgggtgcccagttcctggcccttggcactggcattattgtcatggcactgctgggcatgttcaatgtgcaccgtcatggggccattaactcagcagccatcttgttgtatgccctgacctgctgcatctctggctacgtgtccagccacttctaccggcagattggaggcgagcgttgggtgtggaacatcattctcaccaccagtctcttctctgtgcctttcttcctgacgtggagtgtggtgaactcagtgcattgggccaatggttcgacacaggctctgccagccacaaccatcctgctgcttctgacggtttggctgctggtgggctttcccctcactgtcattggaggcatctttgggaagaacaacgccagcccctttgatgcaccctgtcgcaccaagaacatcgcccgggagattccaccccagccctggtacaagtctactgtcatccacatgactgttggaggcttcctgcctttcagtgccatctctgtggagctgtactacatctttgccacagtatggggtcgggagcagtacactttgtacggcatcctcttctttgtcttcgccatcctgctgagtgtgggggcttgcatctccattgcactcacctacttccagttgtctggggaggattaccgctggtggtggcgatctgtgctgagtgttggctccaccggcctcttcatcttcctctactcagttttctattatgcccggcgctccaacatgtctggggcagtacagacagtagagttcttcggctactccttactcactggttatgtcttcttcctcatgctgggcaccatctcctttttttcttccctaaagttcatccggtatatctatgttaacctcaagatggactgagttctgtatggcagaactattgctgttctctccctttcttcatgccctgttgaactctcctaccagcttctcttctgattgactgaattgtgtgatggcattgttgccttcccttttgccctttgggcattccttccccagagagggcctggaaattataaatctctatcacataaggattatatatttgaactttttaagttgcctttagttttggtcctgatttttctttttacaattaccaaaataaaatttattaagaaaaagg

SEQ ID NO: 360380 - DNA, 2472 bp, Homo sapiens
ccgcgctgccgatcgccgggaggacccccgcctcgccgaagacgggcggggcaagccgagcctcacggggtccccggagctgggccgggcctccagatggagaaggcgcaacggggagttcttgagtaagccagagcggtgtccagcgcggtgtagccgcagccgccgctgtcaggcgcagcaacgggcaaccccgtagaagtcggtcggcaggtcctctccaacccgccgctaccgcgccgctgtgggagagaccccagcaggagcccaaaggcagctacgggggcgcgaaggccgctggcgccgcctcggccagcccttcccgcgcggtgaggaccccggggctgtggcgggaagggacccgaggttccactgccttaaggatgacagtcgtagggaaccctcgaagttggagctgccagtggttgccaatcctgatactgttgctgggcacaggccatgggccaggggtggaaggcgtgacacactacaaggccggcgaccctgttattctgtatgtcaacaaagtgggaccctaccataaccctcaggaaacttaccactactatcagcttccagtctgctgccctgagaagatacgtcacaaaagccttagcctgggtgaagtgctggatggggaccgaatggctgagtctttgtatgagatccgctttcgggaaaacgtggagaagagaattctgtgccacatgcagctcagttctgcacaggtggagcagctgcgccaggccattgaagaactgtactactttgaatttgtggtagatgacttgccaatccggggctttgtgggctacatggaggagagtggtttcctgccacacagccacaagataggactctggacccatttggacttccacctagaattccatggagaccgaattatatttgccaatgtttcagtgcgggacgtcaagccccacagcttggatgggttacgacctgacgagttcctaggccttacccacacttatagcgtgcgctggtctgagacttcagtggagcgtcggagtgacaggcgccgtggtgacgatggtggtttctttcctcgaacactggaaatccattggttgtccatcatcaactccatggtgcttgtgtttttactggtgggttttgtggctgtcattctaatgcgtgtgcttcggaatgacctggctcggtacaacttagatgaggagaccacctctgcaggttctggtgatgactttgaccagggtgacaatggctggaaaattatccatacagatgtcttccgcttccccccataccgtggtctgctctgtgctgtgcttggcgtgggtgcccagttcctggcccttggcactggcattattgtcatggcactgctgggcatgttcaatgtgcaccgtcatggggccattaactcagcagccatcttgttgtatgccctgacctgctgcatctctggctacgtgtccagccacttctaccggcagattggaggcgagcgttgggtgtggaacatcattctcaccaccagtctcttctctgtgcctttcttcctgacgtggagtgtggtgaactcagtgcattgggccaatggttcgacacaggctctgccagccacaaccatcctgctgcttctgacggtttggctgctggtgggctttcccctcactgtcattggaggcatctttgggaagaacaacgccagcccctttgatgcaccctgtcgcaccaagaacatcgcccgggagattccaccccagccctggtacaagtctactgtcatccacatgactgttggaggcttcctgcctttcagtgccatctctgtggagctgtactacatctttgccacagtatggggtcgggagcagtacactttgtacggcatcctcttctttgtcttcgccatcctgctgagtgtgggggcttgcatctccattgcactcacctacttccagttgtctggggaggattaccgctggtggtggcgatctgtgctgagtgttggctccaccggcctcttcatcttcctctactcagttttctattatgcccggcgctccaacatgtctggggcagtacagacagtagagttcttcggctactccttactcactggttatgtcttcttcctcatgctgggcaccatctcctttttttcttccctaaagttcatccggtatatctatgttaacctcaagatggactgagttctgtatggcagaactattgctgttctctccctttcttcatgccctgttgaactctcctaccagcttctcttctgattgactgaattgtgtgatggcattgttgccttcccttttgccctttgggcattccttccccagagagggcctggaaattataaatctctatcacataaggattatatatttgaactttttaagttgcctttagttttggtcctgatttttctttttacaattaccaaaataaaatttattaagaaaaagg

SEQ ID NO: 360381 - DNA, 3006 bp, Homo sapiens
ccgcgctgccgatcgccgggaggacccccgcctcgccgaagacgggcggggcaagccgagcctcacggggtccccggagctgggccgggcctccagatggagaaggcgcaacggggagttcttgagtaagccagagcggtgtccagcgcggtgtagccgcagccgccgctgtcaggcgcagcaacgggcaaccccgtagaagtcggtcggcaggtcctctccaacccgccgctaccgcgccgctgtgggagagaccccagcaggagcccaaaggcagctacgggggcgcgaaggccgctggcgccgcctcggccagcccttcccgcgcggttccactgccttaaggatgacagtcgtagggaaccctcgaagttggagctgccagtggttgccaatcctgatactgttgctgggcacaggccatgggccaggggtggaaggcgtgacacactacaaggccggcgaccctgttattctgtatgtcaacaaagtgggaccctaccataaccctcaggaaacttaccactactatcagcttccagtctgctgccctgagaagatacgtcacaaaagccttagcctgggtgaagtgctggatggggaccgaatggctgagtctttgtatgagatccgctttcgggaaaacgtggagaagagaattctgtgccacatgcagctcagttctgcacaggtggagcagctgcgccaggccattgaagaactgtactactttgaatttgtggtagatgacttgccaatccggggctttgtgggctacatggaggagagtggtttcctgccacacagccacaagataggactctggacccatttggacttccacctagaattccatggagaccgaattatatttgccaatgtttcagtgcgggacgtcaagccccacagcttggatgggttacgacctgacgagttcctaggccttacccacacttatagcgtgcgctggtctgagacttcagtggagcgtcggagtgacaggcgccgtggtgacgatggtggtttctttcctcgaacactggaaatccattggttgtccatcatcaactccatggtgcttgtgtttttactggtgggttttgtggctgtcattctaatgcgtgtgcttcggaatgacctggctcggtacaacttagatgaggagaccacctctgcaggttctggtgatgactttgaccagggtgacaatggctggaaaattatccatacagatgtcttccgcttccccccataccgtggtctgctctgtgctgtgcttggcgtgggtgcccagttcctggcccttggcactggcattattgtcatggcactgctgggcatgttcaatgtgcaccgtcatggggccattaactcagcagccatcttgttgtatgccctgacctgctgcatctctggctacgtgtccagccacttctaccggcagattggaggcgagcgttgggtgtggaacatcattctcaccaccagtctcttctctgtgcctttcttcctgacgtggagtgtggtgaactcagtgcattgggccaatggttcgacacaggctctgccagccacaaccatcctgctgcttctgacggtttggctgctggtgggctttcccctcactgtcattggaggcatctttgggaagaacaacgccagcccctttgatgcaccctgtcgcaccaagaacatcgcccgggagattccaccccagccctggtacaagtctactgtcatccacatgactgttggaggcttcctgcctttcaggtatcctccctttattccatggctattactgtcaggttcctgacctcaatttttcctgtccctactcatccagtaccctaacccaacccgttgatccctggttcagtggtaccattcagagatcattaaatggttcctcctatccccaagcaggactgagcttgaatgatatgagagtgtctcacttataaagctctccggagacatttcccccttcaccttcctggtttctgactttaatgcctatggacatcatgtggggtttaaagcccatttgatgacccatttactttgttgaatacctctttgtgccaggcaaagaataaagtggaataaaatggacaagatccctgccctcaatctattagggaagatattcttgaagtgagagcggctaatcataggcaaaaaatccccatgaagccaggagatctggggcagagagtggagtgaactcacttttcacaatgacccagcaacatgggagagggtgggggctggatttcagcccagccactgtgctgatggtgcacagccctttaatgctgtgtatcatctcttttcttcacagtgccatctctgtggagctgtactacatctttgccacagtatggggtcgggagcagtacactttgtacggcatcctcttctttgtcttcgccatcctgctgagtgtgggggcttgcatctccattgcactcacctacttccagttgtctggggaggattaccgctggtggtggcgatctgtgctgagtgttggctccaccggcctcttcatcttcctctactcagttttctattatgcccggcgctccaacatgtctggggcagtacagacagtagagttcttcggctactccttactcactggttatgtcttcttcctcatgctgggcaccatctcctttttttcttccctaaagttcatccggtatatctatgttaacctcaagatggactgagttctgtatggcagaactattgctgttctctccctttcttcatgccctgttgaactctcctaccagcttctcttctgattgactgaattgtgtgatggcattgttgccttcccttttgccctttgggcattccttccccagagagggcctggaaattataaatctctatcacataaggattatatatttgaactttttaagttgcctttagttttggtcctgatttttctttttacaattaccaaaataaaatttattaagaaaaagg

SEQ ID NO: 360382 - DNA, 2065 bp, Homo sapiens
cataggtagtacgaggctggtttgaatcggccgagggttgtgggcacaggccatgggccaggggtggaaggcgtgacacactacaaggccggcgaccctgttattctgtatgtcaacaaagtgggaccctaccataaccctcaggaaacttaccactactatcagcttccagtctgctgccctgagaagatacgtcacaaaagccttagcctgggtgaagtgctggatggggaccgaatggctgagtctttgtatgagatccgctttcgggaaaacgtggagaagagaattctgtgccacatgcagctcagttctgcacaggtggagcagctgcgccaggccattgaagaactgtactactttgaatttgtggtagatgacttgccaatccggggctttgtgggctacatggaggagagtggtttcctgccacacagccacaagataggactctggacccatttggacttccacctagaattccatggagaccgaattatatttgccaatgtttcagtgcgggacgtcaagccccacagcttggatgggttacgacctgacgagttcctaggccttacccacacttatagcgtgcgctggtctgagacttcagtggagcgtcggagtgacaggcgccgtggtgacgatggtggtttctttcctcgaacactggaaatccattggttgtccatcatcaactccatggtgcttgtgtttttactggtgggttttgtggctgtcattctaatgcgtgtgcttcggaatgacctggctcggtacaacttagatgaggagaccacctctgcaggttctggtgatgactttgaccagggtgacaatggctggaaaattatccatacagatgtcttccgcttccccccataccgtggtctgctctgtgctgtgcttggcgtgggtgcccagttcctggcccttggcactggcattattgtcatggcactgctgggcatgttcaatgtgcaccgtcatggggccattaactcagcagccatcttgttgtatgccctgacctgctgcatctctggctacgtgtccagccacttctaccggcagattggaggcgagcgttgggtgtggaacatcattctcaccaccagtctcttctctgtgcctttcttcctgacgtggagtgtggtgaactcagtgcattgggccaatggttcgacacaggctctgccagccacaaccatcctgctgcttctgacggtttggctgctggtgggctttcccctcactgtcattggaggcatctttgggaagaacaacgccagcccctttgatgcaccctgtcgcaccaagaacatcgcccgggagattccaccccagccctggtacaagtctactgtcatccacatgactgttggaggcttcctgcctttcagtgccatctctgtggagctgtactacatctttgccacagtatggggtcgggagcagtacactttgtacggcatcctcttctttgtcttcgccatcctgctgagtgtgggggcttgcatctccattgcactcacctacttccagttgtctggggaggattaccgctggtggtggcgatctgtgctgagtgttggctccaccggcctcttcatcttcctctactcagttttctattatgcccggcgctccaacatgtctggggcagtacagacagtagagttcttcggctactccttactcactggttatgtcttcttcctcatgctgggcaccatctcctttttttcttccctaaagttcatccggtatatctatgttaacctcaagatggactgagttctgtatggcagaactattgctgttctctccctttcttcatgccctgttgaactctcctaccagcttctcttctgattgactgaattgtgtgatggcattgttgccttcccttttgccctttgggcattccttccccagagagggcctggaaattataaatctctatcacataaggattatatatttgaactttttaagttgcctttagttttggtcctgatttttctttttacaattaccaaaataaaatttattaagaaaaagg

SEQ ID NO: 360383 - DNA, 2515 bp, Homo sapiens
  misc_feature (2446)..(2446): n is a, c, g, or t
  misc_feature (2452)..(2452): n is a, c, g, or t
ccgcgctgccgatcgccgggaggacccccgcctcgccgaagacgggcggggcaagccgagcctcacggggtccccggagctgggccgggcctccagatggagaaggcgcaacggggagttcttgagtaagccagagcggtgtccagcgcggtgtagccgcagccgccgctgtcaggcgcagcaacgggcaaccccgtagaagtcggtcggcaggtcctctccaacccgccgctaccgcgccgctgtgggagagaccccagcaggagcccaaaggcagctacgggggcgcgaaggccgctggcgccgcctcggccagcccttcccgcgcggttccactgccttaaggatgacagtcgtagggaaccctcgaagttggagctgccagtggttgccaatcctgatactgttgctgggcacaggccatgggccaggggtggaaggcgtgacacactacaaggccggcgaccctgttattctgtatgtcaacaaagtgggaccctaccataaccctcaggaaacttaccactactatcagcttccagtctgctgccctgagaagatacgtcacaaaagccttagcctgggtgaagtgctggatggggaccgaatggctgagtctttgtatgagatccgctttcgggaaaacgtggagaagagaattctgtgccacatgcagctcagttctgcacaggtggagcagctgcgccaggccattgaagaactgtactactttgaatttgtggtagatgacttgccaatccggggctttgtgggctacatggaggagagtggtttcctgccacacagccacaagataggactctggacccatttggacttccacctagaattccatggagaccgaattatatttgccaatgtttcagtgcgggacgtcaagccccacagcttggatgggttacgacctgacgagttcctaggccttacccacacttatagcgtgcgctggtctgagacttcagtggagcgtcggagtgacaggcgccgtggtgacgatggtggtttctttcctcgaacactggaaatccattggttgtccatcatcaactccatggtgcttgtgtttttactggtgggttttgtggctgtcattctaatgcgtgtgcttcggaatgacctggctcggtacaacttagatgaggagaccacctctgcaggttctggtgatgactttgaccagggtgacaatggctggaaaattatccatacagatgtcttccgcttccccccataccgtggtctgctctgtgctgtgcttggcgtgggtgcccagttcctggcccttggcactggcattattgtcatggcactgctgggcatgttcaatgtgcaccgtcatggggccattaactcagcagccatcttgttgtatgccctgacctgctgcatctctggctacgtgtccagccacttctaccggcagattggaggcgagcgttgggtgtggaacatcattctcaccaccagtctcttctctgtgcctttcttcctgacgtggagtgtggtgaactcagtgcattgggccaatggttcgacacaggctctgccagccacaaccatcctgctgcttctgacggtttggctgctggtgggctttcccctcactgtcattggaggcatctttgggaagaacaacgccagcccctttgatgcaccctgtcgcaccaagaacatcgcccgggagattccaccccagccctggtacaagtctactgtcatccacatgactgttggaggcttcctgcctttcagtgccatctctgtggagctgtactacatctttgccacagtatggggtcgggagcagtacactttgtacggcatcctcttctttgtcttcgccatcctgctgagtgtgggggcttgcatctccattgcactcacctacttccagttgtctggggaggattaccgctggtggtggcgatctgtgctgagtgttggctccaccggcctcttcatcttcctctactcagttttctattatgcccggcgctccaacatgtctggggcagtacagacagtagagttcttcggctactccttactcactggttatgtcttcttcctcatgctgggcaccatctcctttttttcttccctaaagttcatccggtatatctatgttaacctcaagatggactgagttctgtatggcagaactattgctgttctctccctttcttcatgccctgttgaactctcctaccagcttctcttctgattgactgaattgtgtgatggcattgttgccttcccttttgccctttgggcattccttccccagagagggcctggaaattataaatctctatcacataaggattatatatttgaactttttaagttgcctttagttttggtcctgatttttctttttacaattaccaaaataaaatttattaagaaaaaggttttttggaanaaaagnggaaaggattttttatggtttaaaaataatataatcttgagggggggcgccggtccccaattt

SEQ ID NO: 360384 - DNA, 3418 bp, Homo sapiens
  misc_feature (3241)..(3241): n is a, c, g, or t
ccgcgctgccgatcgccgggaggacccccgcctcgccgaagacgggcggggcaagccgagcctcacggggtccccggagctgggccgggcctccagatggagaaggcgcaacggggagttcttgagtaagccagagcggtgtccagcgcggtgtagccgcagccgccgctgtcaggcgcagcaacgggcaaccccgtagaagtcggtcggcaggtcctctccaacccgccgctaccgcgccgctgtgggagagaccccagcaggagcccaaaggcagctacgggggcgcgaaggccgctggcgccgcctcggccagcccttcccgcgcggttccactgccttaaggatgacagtcgtagggaaccctcgaagttggagctgccagtggttgccaatcctgatactgttgctgggcacaggccatgggccaggggtggaaggcgtgacacactacaaggccggcgaccctgttattctgtatgtcaacaaagtgggaccctaccataaccctcaggaaacttaccactactatcagcttccagtctgctgccctgagaagatacgtcacaaaagccttagcctgggtgaagtgctggatggggaccgaatggctgagtctttgtatgagatccgctttcgggaaaacgtggagaagagaattctgtgccacatgcagctcagttctgcacaggtggagcagctgcgccaggccattgaagaactgtactactttgaatttgtggtagatgacttgccaatccggggctttgtgggctacatggaggagagtggtttcctgccacacagccacaagataggactctggacccatttggacttccacctagaattccatggagaccgaattatatttgccaatgtttcagtgcgggacgtcaagccccacagcttggatgggttacgacctgacgagttcctaggccttacccacacttatagcgtgcgctggtctgagacttcagtggagcgtcggagtgacaggcgccgtggtgacgatggtggtttctttcctcgaacactggaaatccattggttgtccatcatcaactccatggtgcttgtgtttttactggtgggttttgtggctgtcattctaatgcgtgtgcttcggaatgacctggctcggtacaacttagatgaggagaccacctctgcaggttctggtgatgactttgaccagggtgacaatggctggaaaattatccatacagatgtcttccgcttccccccataccgtggtctgctctgtgctgtgcttggcgtgggtgcccagttcctggcccttggcactggcattattgtcatggcactgctgggcatgttcaatgtgcaccgtcatggggccattaactcagcagccatcttgttgtatgccctgacctgctgcatctctggctacgtgtccagccacttctaccggcagattggaggcgagcgttgggtgtggaacatcattctcaccaccagtctcttctctgtgcctttcttcctgacgtggagtgtggtgaactcagtgcattgggccaatggttcgacacaggctctgccagccacaaccatcctgctgcttctgacggtttggctgctggtgggctttcccctcactgtcattggaggcatctttgggaagaacaacgccagcccctttgatgcaccctgtcgcaccaagaacatcgcccgggagattccaccccagccctggtacaagtctactgtcatccacatgactgttggaggcttcctgcctttcaggtatcctccctttattccatggctattactgtcaggttcctgacctcaatttttcctgtccctactcatccagtaccctaacccaacccgttgatccctggttcagtggtaccattcagagatcattaaatggttcctcctatccccaagcaggactgagcttgaatgatatgagagtgtctcacttataaagctctccggagacatttcccccttcaccttcctggtttctgactttaatgcctatggacatcatgtggggtttaaagcccatttgatgacccatttactttgttgaatacctctttgtgccaggcaaagaataaagtggaataaaatggacaagatccctgccctcaatctattagggaagatattcttgaagtgagagcggctaatcataggcaaaaaatccccatgaagccaggagatctggggcagagagtggagtgaactcacttttcacaatgacccagcaacatgggagagggtgggggctggatttcagcccagccactgtgctgatggtgcacagccctttaatgctgtgtatcatctcttttcttcacagtgccatctctgtggagctgtactacatctttgccacagtatggggtcgggagcagtacactttgtacggcatcctcttctttgtcttcgccatcctgctgagtgtgggggcttgcatctccattgcactcacctacttccagttgtctggggaggattaccgctggtggtggcgatctgtgctgagtgttggctccaccggcctcttcatcttcctctactcagttttctattatgcccggcgctccaacatgtctggggcagtacagacagtagagttcttcggctactccttactcactggttatgtcttcttcctcatgctgggcaccatctcctttttttcttccctaaagttcatccggtatatctatgttaacctcaagatggactgagttctgtatggcagaactattgctgttctctccctttcttcatgccctgttgaactctcctaccagcttctcttctgattgactgaattgtgtgatggcattgttgccttcccttttgccctttgggcattccttccccagagagggcctggaaattataaatctctatcacataaggattatatatttgaactttttaagttgcctttagttttggtcctgatttttctttttacaattaccaaaataaaatttattaagaaaaaggaaaaaaaaaaaaaaaaaaaaaaaaaaaaaaaaaaaaaaaaaaaacgcgggggaatttttgggggggggaaaaaagggtaaaaaaggggcatgggacacataccgggttgtccagcgaccgccactttttgtgttacacaaggggggaaaatctggggggggccccccaaataagagaggcggaatatatattgcagaaagccggagtatccctgttttatgactgtgcgcacaancgcagagcagaccacgacaggagcgacatgatgacgagaggccgcacgacagaactgaaacggagagacagcagcagcgaaagcagaacgtacaacgttaacacgagagagagacctgaaggtaggcgcagagcaacagagattgagtcagagcccaaatacgacgactgcatactg

SEQ ID NO: 360385 - DNA, 1549 bp, Homo sapiens
ccgcgctgccgatcgccgggaggacccccgcctcgccgaagacgggcggggcaagccgagcctcacggggtccccggagctgggccgggcctccagatggagaaggcgcaacggggagttcttgagtaagccagagcggtgtccagcgcggtgtagccgcagccgccgctgtcaggcgcagcaacgggcaaccccgtagaagtcggtcggcaggtcctctccaacccgccgctaccgcgccgctgtgggagagaccccagcaggagcccaaaggcagctacgggggcgcgaaggccgctggcgccgcctcggccagcccttcccgcgcggtgaggaccccggggctgtggcgggaagggacccgaggttccactgccttaaggatgacagtcgtagggaaccctcgaagttggagctgccagtggttgccaatcctgatactgttgcctgggcatgttcaatgtgcaccgtcatggggccattaactcagcagccatcttgttgtatgccctgacctgctgcatctctggctacgtgtccagccacttctaccggcagattggaggcgagcgttgggtgtggaacatcattctcaccaccagtctcttctctgtgcctttcttcctgacgtggagtgtggtgaactcagtgcattgggccaatggttcgacacaggctctgccagccacaaccatcctgctgcttctgacggtttggctgctggtgggctttcccctcactgtcattggaggcatctttgggaagaacaacgccagcccctttgatgcaccctgtcgcaccaagaacatcgcccgggagattccaccccagccctggtacaagtctactgtcatccacatgactgttggaggcttcctgcctttcagtgccatctctgtggagctgtactacatctttgccacagtatggggtcgggagcagtacactttgtacggcatcctcttctttgtcttcgccatcctgctgagtgtgggggcttgcatctccattgcactcacctacttccagttgtctggggaggattaccgctggtggtggcgatctgtgctgagtgttggctccaccggcctcttcatcttcctctactcagttttctattatgcccggcgctccaacatgtctggggcagtacagacagtagagttcttcggctactccttactcactggttatgtcttcttcctcatgctgggcaccatctcctttttttcttccctaaagttcatccggtatatctatgttaacctcaagatggactgagttctgtatggcagaactattgctgttctctccctttcttcatgccctgttgaactctcctaccagcttctcttctgattgactgaattgtgtgatggcattgttgccttcccttttgccctttgggcattccttccccagagagggcctggaaattataaatctctatcacataaggattatatatttgaactttttaagttgcctttagttttggtcctgatttttctttttacaattaccaaaataaaatttattaagaaaaagg

SEQ ID NO: 360386 - DNA, 2792 bp, Homo sapiens
ccgcgctgccgatcgccgggaggacccccgcctcgccgaagacgggcggggcaagccgagcctcacggggtccccggagctgggccgggcctccagatggagaaggcgcaacggggagttcttgagtaagccagagcggtgtccagcgcggtgtagccgcagccgccgctgtcaggcgcagcaacgggcaaccccgtagaagtcggtcggcaggtcctctccaacccgccgctaccgcgccgctgtgggagagaccccagcaggagcccaaaggcagctacgggggcgcgaaggccgctggcgccgcctcggccagcccttcccgcgcggttccactgccttaaggatgacagtcgtagggaaccctcgaagttggagctgccagtggttgccaatcctgatactgttgctgggcacaggccatgggccaggggtggaaggcgtgacacactacaaggccggcgaccctgttattctgtatgtcaacaaagtgggaccctaccataaccctcaggaaacttaccactactatcagcttccagtctgctgccctgagaagatacgtcacaaaagccttagcctgggtgaagtgctggatggggaccgaatggctgagtctttgtatgagatccgctttcgggaaaacgtggagaagagaattctgtgccacatgcagctcagttctgcacaggtggagcagctgcgccaggccattgaagaactgtactactttgaatttgtggtagatgacttgccaatccggggctttgtgggctacatggaggagagtggtttcctgccacacagccacaagataggactctggacccatttggacttccacctagaattccatggagaccgaattatatttgccaatgtttcagtgcgggacgtcaagccccacagcttggatgggttacgacctgacgagttcctaggccttacccacacttatagcgtgcgctggtctgagacttcagtggagcgtcggagtgacaggcgccgtggtgacgatggtggtttctttcctcgaacactggaaatccattggttgtccatcatcaactccatggtgcttgtgtttttactggtgggttttgtggctgtcattctaatgcgtgtgcttcggaatgacctggctcggtacaacttagatgaggagaccacctctgcaggttctggtgatgactttgaccagggtgacaatggctggaaaattatccatacagatgtcttccgcttccccccataccgtggtctgctctgtgctgtgcttggcgtgggtgcccagttcctggcccttggcactggcattattgtcatggcactgctgggcatgttcaatgtgcaccgtcatggggccattaactcagcagccatcttgttgtatgccctgacctgctgcatctctggctacgtgtccagccacttctaccggcagattggaggcgagcgttgggtgtggaacatcattctcaccaccagtctcttctctggtgaggactttcctttccctggtgggcctttctggacttaggaatgaagaacacattgtggctggtcacagtggctcacacctgtaatcctagcactttgggagaccgaggccggaggatcacttgagcccaaaagtttgagacaagcctagacaacatagtgagaccctctctctataacaaaaaattagccgggcatggtaggttcacatctgtaatcccagctacttgggaggctgacccaggaggattgcttgagcctggggagccagggaggttgaggctacagtgagccatgattgcaccactgcactctagctgggctgacagagtgagactgtctcaaaaaaaaaaaaaagaacacatcatagaacttgggatagagtcaggatgaggcttgaagggaaggaatattgtaaaagaaagaagaaaaccaaaaaaaaacaagaatgcatttcttttgaatagtttaaaattactaagccctcaaaatgtcctaggcagtgtggaaagcactcagcaataactgtgtgaagtaggtaatatttccattccacagatgaggaaactgaactaaaggctgcttaagtaacttgtctgagattacactcctaaaaagtagtgaactaggtttcagcagtctgacttgtattctcacccattacactaaaataacacccttgaatttttattttgaaggtgggcccactctaggctttcaaaccagattgccctttcaaaggcagtagtagtctctgttctgaacccttcttgttcccaattctgtgtgtctgatttttatcccatcacatttatatttgaaccaaggctttctgaaaacagggccttaatccaaaggaatgtctcatgctaggaattaccaactccaaggcaagacaggcccctggaggcagatggatttgtgctactctcagattatgtagtagctacctggatccttaatgacaccgggttgggggatggtgttggtaagataaagagcaaagagtccgggtgtggtggctcatgcctgtaatcccagcactttgggaggccgaggcaggcagatcaccaggtcaggagatcgagaccatcctggctaacacagtgaaaccccatctctactaaaaatacaaaaaattagccgggcgtggtggcgggcgcctgtagtcctagctactcactcgggaggctgaggcaggagaatggcatgaacctgggaggcggagcttgcagtgagcagagatcgcgccactgcactccagcctgggcgacagagcgagactctgtctc

SEQ ID NO: 360387 - DNA, 2561 bp, Homo sapiens
ccgcgctgccgatcgccgggaggacccccgcctcgccgaagacgggcggggcaagccgagcctcacggggtccccggagctgggccgggcctccagatggagaaggcgcaacggggagttcttgagtaagccagagcggtgtccagcgcggtgtagccgcagccgccgctgtcaggcgcagcaacgggcaaccccgtagaagtcggtcggcaggtcctctccaacccgccgctaccgcgccgctgtgggagagaccccagcaggagcccaaaggcagctacgggggcgcgaaggccgctggcgccgcctcggccagcccttcccgcgcggttccactgccttaaggatgacagtcgtagggaaccctcgaagttggagctgccagtggttgccaatcctgatactgttgctgggcacaggccatgggccaggggtggaaggcgtgacacactacaaggccggcgaccctgttattctgtatgtcaacaaagtgggaccctaccataaccctcaggaaacttaccactactatcagcttccagtctgctgccctgagaagatacgtcacaaaagccttagcctgggtgaagtgctggatggggaccgaatggctgagtctttgtatgagatccgctttcgggaaaacgtggagaagagaattctgtgccacatgcagctcagttctgcacaggtggagcagctgcgccaggccattgaagaactgtactactttgaatttgtggtagatgacttgccaatccggggctttgtgggctacatggaggagagtggtttcctgccacacagccacaagataggactctggacccatttggacttccacctagaattccatggagaccgaattatatttgccaatgtttcagtgcgggacgtcaagccccacagcttggatgggttacgacctgacgagttcctaggccttacccacacttatagcgtgcgctggtctgagacttcagtggagcgtcggagtgacaggcgccgtggtgacgatggtggtttctttcctcgaacactggaaatccattggttgtccatcatcaactccatggtgcttgtgtttttactggtgggttttgtggctgtcattctaatgcgtgtgcttcggaatgacctggctcggtacaacttagatgaggagaccacctctgcaggttctggtgatgactttgaccagggtgacaatggctggaaaattatccatacagatgtcttccgcttccccccataccgtggtctgctctgtgctgtgcttggcgtgggtgcccagttcctggcccttggcactggcattattgtcatggcactgctgggcatgttcaatgtgcaccgtcatggggccattaactcagcagccatcttgttgtatgccctgacctgctgcatctctggctacgtgtccagccacttctaccggcagattggaggcgagcgttgggtgtggaacatcattctcaccaccagtctcttctctggtgaggactttcctttccctggtgggcctttctggacttaggaatgaagaacacattgtggctggtcacagtggctcacacctgtaatcctagcactttgggagaccgaggccggaggatcacttgagcccaaaagtttgagacaagcctagacaacatagtgagaccctctctctataacaaaaaattagccgggcatggtaggttcacatctgtaatcccagctacttgggaggctgacccaggaggattgcttgagcctggggagccagggaggttgaggctacagtgagccatgattgcaccactgcactctagctgggctgacagagtgagactgtctcaaaaaaaaaaaaaagaacacatcatagaacttgggatagagtcaggatgaggcttgaagggaaggaatattgtaaaagaaagaagaaaaccaaaaaaaaacaagaatgcatttcttttgaatagtttaaaattactaagccctcaaaatgtcctaggcagtgtggaaagcactcagcaataactgtgtgaagtaggtaatatttccattccacagatgaggaaactgaactaaaggctgcttaagtaacttgtctgagattacactcctaaaaagtagtgaactaggtttcagcagtctgacttgtattctcacccattacactaaaataacacccttgaatttttattttgaaggtgggcccactctaggctttcaaaccagattgccctttcaaaggcagtagtagtctctgttctgaacccttcttgttcccaattctgtgtgtctgatttttatcccatcacatttatatttgaaccaaggctttctgaaaacagggccttaatccaaaggaatgtctcatgctaggaattaccaactccaaggcaagacaggcccctggaggcagatggatttgtgctactctcagattatgtagtagctacctggatccttaatgacaccgggttgggggatggtgttggtaagataaagagcaaagagtccgggtgtcattaaggatccaggggcctgtcttgccttggagttggcggccg

SEQ ID NO: 360388 - DNA, 1710 bp, Homo sapiens
aaaaacacagaacaaagaataatgggacctgaaagggtggaggtgaaggcagtcgactctgcagggacatccaggagcatgagtctgccgttagagtggcaggctgcttcagccccctccccttttggtcctggatgtaagtgggtgcccttagagatgtagctcctagtgttgaccctccctccgggggcccatccctgcagtgcctttcttcctgacgtggagtgtggtgaactcagtgcattgggccaatggttcgacacaggctctgccagccacaaccatcctgctgcttctgacggtttggctgctggtgggctttcccctcactgtcattggaggcatctttgggaagaacaacgccagcccctttgatgcaccctgtcgcaccaagaacatcgcccgggagattccaccccagccctggtacaagtctactgtcatccacatgactgttggaggcttcctgcctttcaggtatcctccctttattccatggctattactgtcaggttcctgacctcaatttttcctgtccctactcatccagtaccctaacccaacccgttgatccctggttcagtggtaccattcagagatcattaaatggttcctcctatccccaagcaggactgagcttgaatgatatgagagtgtctcacttataaagctctccggagacatttcccccttcaccttcctggtttctgactttaatgcctatggacatcatgtggggtttaaagcccatttgatgacccatttactttgttgaatacctctttgtgccaggcaaagaataaagtggaataaaatggacaagatccctgccctcaatctattagggaagatattcttgaagtgagagcggctaatcataggcaaaaaatccccatgaagccaggagatctggggcagagagtggagtgaactcacttttcacaatgacccagcaacatgggagagggtgggggctggatttcagcccagccactgtgctgatggtgcacagccctttaatgctgtgtatcatctcttttcttcacagtgccatctctgtggagctgtactacatctttgccacagtatggggtcgggagcagtacactttgtacggcatcctcttctttgtcttcgccatcctgctgagtgtgggggcttgcatctccattgcactcacctacttccagttgtctggggaggattaccgctggtggtggcgatctgtgctgagtgttggctccaccggcctcttcatcttcctctactcagttttctattatgcccggcgctccaacatgtctggggcagtacagacagtagagttcttcggctactccttactcactggttatgtcttcttcctcatgctgggcaccatctcctttttttcttccctaaagttcatccggtatatctatgttaacctcaagatggactgagttctgtatggcagaactattgctgttctctccctttcttcatgccctgttgaactctcctaccagcttctcttctgattgactgaattgtgtgatggcattgttgccttcccttttgccctttgggcattccttccccagagagggcctggaaattataaatctctatcacataaggattatatatttgaactttttaagttgcctttagttttggtcctgatttttctttttacaattaccaaaataaaatttattaagaaaaagg

SEQ ID NO: 360389 - DNA, 714 bp, Homo sapiens
cgtcgtagactggtaaaacccaggcgactgtaggaggctacctgcctttcagtgccatctctgtggagctgtactacatctttgccacagtatggggtcgggagcagtacactttgtacggcatcctcttctttgtcttcgccatcctgctgagtgtgggggcttgcatctccattgcactcacctacttccagttgtctggggaggattaccgctggtggtggcgatctgtgctgagtgttggctccaccggcctcttcatcttcctctactcagttttctattatgcccggcgctccaacatgtctggggcagtacagacagtagagttcttcggctactccttactcactggttatgtcttcttcctcatgctgggcaccatctcctttttttcttccctaaagttcatccggtatatctatgttaacctcaagatggactgagttctgtatggcagaactattgctgttctctccctttcttcatgccctgttgaactctcctaccagcttctcttctgattgactgaattgtgtgatggcattgttgccttcccttttgccctttgggcattccttccccagagagggcctggaaattataaatctctatcacataaggattatatatttgaactttttaagttgcctttagttttggtcctgatttttctttttacaattaccaaaataaaatttattaagaaaaagg

SEQ ID NO: 360390 - DNA, 1547 bp, Homo sapiens
attcctctgaaattgctagaagagacacaggtgaggcctaacttgggctttccgctaccgtcctgcaggcattattgtcatggcactgctgggcatgttcaatgtgcaccgtcatggggccattaactcagcagccatcttgttgtatgccctgacctgctgcatctctggctacgtgtccagccacttctaccggcagattggaggcgagcgttgggtgtggaacatcattctcaccaccagtctcttctctggtgaggactttcctttccctggtgggcctttctggacttaggaatgaagaacacattgtggctggtcacagtggctcacacctgtaatcctagcactttgggagaccgaggccggaggatcacttgagcccaaaagtttgagacaagcctagacaacatagtgagaccctctctctataacaaaaaattagccgggcatggtaggttcacatctgtaatcccagctacttgggaggctgacccaggaggattgcttgagcctggggagccagggaggttgaggctacagtgagccatgattgcaccactgcactctagctgggctgacagagtgagactgtctcaaaaaaaaaaaaaagaacacatcatagaacttgggatagagtcaggatgaggcttgaagggaaggaatattgtaaaagaaagaagaaaaccaaaaaaaaacaagaatgcatttcttttgaatagtttaaaattactaagccctcaaaatgtcctaggcagtgtggaaagcactcagcaataactgtgtgaagtaggtaatatttccattccacagatgaggaaactgaactaaaggctgcttaagtaacttgtctgagattacactcctaaaaagtagtgaactaggtttcagcagtctgacttgtattctcacccattacactaaaataacacccttgaatttttattttgaaggtgggcccactctaggctttcaaaccagattgccctttcaaaggcagtagtagtctctgttctgaacccttcttgttcccaattctgtgtgtctgatttttatcccatcacatttatatttgaaccaaggctttctgaaaacagggccttaatccaaaggaatgtctcatgctaggaattaccaactccaaggcaagacaggcccctggaggcagatggatttgtgctactctcagattatgtagtagctacctggatccttaatgacaccgggttgggggatggtgttggtaagataaagagcaaagagtccgggtgtggtggctcatgcctgtaatcccagcactttgggaggccgaggcaggcagatcaccaggtcaggagatcgagaccatcctggctaacacagtgaaaccccatctctactaaaaatacaaaaaattagccgggcgtggtggcgggcgcctgtagtcctagctactcactcgggaggctgaggcaggagaatggcatgaacctgggaggcggagcttgcagtgagcagagatcgcgccactgcactccagcctgggcgacagagcgagactctgtctc

SEQ ID NO: 360391 - DNA, 2231 bp, Homo sapiens
ccgcgctgccgatcgccgggaggacccccgcctcgccgaagacgggcggggcaagccgagcctcacggggtccccggagctgggccgggcctccagatggagaaggcgcaacggggagttcttgagttccactgccttaaggatgacagtcgtagggaaccctcgaagttggagctgccagtggttgccaatcctgatactgttgctgggcacaggccatgggccaggggtggaaggcgtgacacactacaaggccggcgaccctgttattctgtatgtcaacaaagtgggaccctaccataaccctcaggaaacttaccactactatcagcttccagtctgctgccctgagaagatacgtcacaaaagccttagcctgggtgaagtgctggatggggaccgaatggctgagtctttgtatgagatccgctttcgggaaaacgtggagaagagaattctgtgccacatgcagctcagttctgcacaggtggagcagctgcgccaggccattgaagaactgtactactttgaatttgtggtagatgacttgccaatccggggctttgtgggctacatggaggagagtggtttcctgccacacagccacaagataggactctggacccatttggacttccacctagaattccatggagaccgaattatatttgccaatgtttcagtgcgggacgtcaagccccacagcttggatgggttacgacctgacgagttcctaggccttacccacacttatagcgtgcgctggtctgagacttcagtggagcgtcggagtgacaggcgccgtggtgacgatggtggtttctttcctcgaacactggaaatccattggttgtccatcatcaactccatggtgcttgtgtttttactggtgggttttgtggctgtcattctaatgcgtgtgcttcggaatgacctggctcggtacaacttagatgaggagaccacctctgcaggttctggtgatgactttgaccagggtgacaatggctggaaaattatccatacagatgtcttccgcttccccccataccgtggtctgctctgtgctgtgcttggcgtgggtgcccagttcctggcccttggcactggcattattgtcatggcactgctgggcatgttcaatgtgcaccgtcatggggccattaactcagcagccatcttgttgtatgccctgacctgctgcatctctggctacgtgtccagccacttctaccggcagattggaggcgagcgttgggtgtggaacatcattctcaccaccagtctcttctctgtgcctttcttcctgacgtggagtgtggtgaactcagtgcattgggccaatggttcgacacaggctctgccagccacaaccatcctgctgcttctgacggtttggctgctggtgggctttcccctcactgtcattggaggcatctttgggaagaacaacgccagcccctttgatgcaccctgtcgcaccaagaacatcgcccgggagattccaccccagccctggtacaagtctactgtcatccacatgactgttggaggcttcctgcctttcagtgccatctctgtggagctgtactacatctttgccacagtatggggtcgggagcagtacactttgtacggcatcctcttctttgtcttcgccatcctgctgagtgtgggggcttgcatctccattgcactcacctacttccagttgtctggggaggattaccgctggtggtggcgatctgtgctgagtgttggctccaccggcctcttcatcttcctctactcagttttctattatgcccggcgctccaacatgtctggggcagtacagacagtagagttcttcggctactccttactcactggttatgtcttcttcctcatgctgggcaccatctcctttttttcttccctaaagttcatccggtatatctatgttaacctcaagatggactgagttctgtatggcagaactattgctgttctctccctttcttcatgccctgttgaactctcctaccagcttctcttctgattgactgaattgtgtgatggcattgttgccttcccttttgccctttgggcattccttccccagagagggcctggaaattataaatctctatcacataaggattatatatttgaactttttaagttgcctttagttttggtcctgatttttctttttacaattaccaaaataaaatttattaagaaaaagg

SEQ ID NO: 360392 - DNA, 2847 bp, Homo sapiens
  misc_feature (2670)..(2670): n is a, c, g, or t
ccgcgctgccgatcgccgggaggacccccgcctcgccgaagacgggcggggcaagccgagcctcacggggtccccggagctgggccgggcctccagatggagaaggcgcaacggggagttcttgagtaagccagagcggtgtccagcgcggtgtagccgcagccgccgctgtcaggcgcagcaacgggcaaccccgtagaagtcggtcggcaggtcctctccaacccgccgctaccgcgccgctgtgggagagaccccagcaggagcccaaaggcagctacgggggcgcgaaggccgctggcgccgcctcggccagcccttcccgcgcggttccactgccttaaggatgacagtcgtagggaaccctcgaagttggagctgccagtggttgccaatcctgatactgttgctgggcacaggccatgggccaggggtggaaggcgtgacacactacaaggccggcgaccctgttattctgtatgtcaacaaagtgggaccctaccataaccctcaggaaacttaccactactatcagcttccagtctgctgccctgagaagatacgtcacaaaagccttagcctgggtgaagtgctggatggggaccgaatggctgagtctttgtatgagatccgctttcgggaaaacgtggagaagagaattctgtgccacatgcagctcagttctgcacaggtggagcagctgcgccaggccattgaagaactgtactactttgaatttgtggtagatgacttgccaatccggggctttgtgggctacatggaggagagtggtttcctgccacacagccacaagataggactctggacccatttggacttccacctagaattccatggagaccgaattatatttgccaatgtttcagtgcgggacgtcaagccccacagcttggatgggttacgacctgacgagttcctaggccttacccacacttatagcgtgcgctggtctgagacttcagtggagcgtcggagtgacaggcgccgtggtgacgatggtggtttctttcctcgaacactggaaatccattggttgtccatcatcaactccatggtgcttgtgtttttactggtgggttttgtggctgtcattctaatgcgtgtgcttcggaatgacctggctcggtacaacttagatgaggagaccacctctgcaggttctggtgatgactttgaccagggtgacaatggctggaaaattatccatacagatgtcttccgcttccccccataccgtggtctgctctgtgctgtgcttggcgtgggtgcccagttcctggcccttggcactggcattattgtcatggcactgctgggcatgttcaatgtgcaccgtcatggggccattaactcagcagccatcttgttgtatgccctgacctgctgcatctctggctacgtgtccagccacttctaccggcagattggaggcgagcgttgggtgtggaacatcattctcaccaccagtctcttctctgtgcctttcttcctgacgtggagtgtggtgaactcagtgcattgggccaatggttcgacacaggctctgccagccacaaccatcctgctgcttctgacggtttggctgctggtgggctttcccctcactgtcattggaggcatctttgggaagaacaacgccagcccctttgatgcaccctgtcgcaccaagaacatcgcccgggagattccaccccagccctggtacaagtctactgtcatccacatgactgttggaggcttcctgcctttcagtgccatctctgtggagctgtactacatctttgccacagtatggggtcgggagcagtacactttgtacggcatcctcttctttgtcttcgccatcctgctgagtgtgggggcttgcatctccattgcactcacctacttccagttgtctggggaggattaccgctggtggtggcgatctgtgctgagtgttggctccaccggcctcttcatcttcctctactcagttttctattatgcccggcgctccaacatgtctggggcagtacagacagtagagttcttcggctactccttactcactggttatgtcttcttcctcatgctgggcaccatctcctttttttcttccctaaagttcatccggtatatctatgttaacctcaagatggactgagttctgtatggcagaactattgctgttctctccctttcttcatgccctgttgaactctcctaccagcttctcttctgattgactgaattgtgtgatggcattgttgccttcccttttgccctttgggcattccttccccagagagggcctggaaattataaatctctatcacataaggattatatatttgaactttttaagttgcctttagttttggtcctgatttttctttttacaattaccaaaataaaatttattaagaaaaaggaaaaaaaaaaaaaaaaaaaaaaaaaaaaaaaaaaaaaaaaaaaacgcgggggaatttttgggggggggaaaaaagggtaaaaaaggggcatgggacacataccgggttgtccagcgaccgccactttttgtgttacacaaggggggaaaatctggggggggccccccaaataagagaggcggaatatatattgcagaaagccggagtatccctgttttatgactgtgcgcacaancgcagagcagaccacgacaggagcgacatgatgacgagaggccgcacgacagaactgaaacggagagacagcagcagcgaaagcagaacgtacaacgttaacacgagagagagacctgaaggtaggcgcagagcaacagagattgagtcagagcccaaatacgacgactgcatactg

SEQ ID NO: 360393 - DNA, 2266 bp, Homo sapiens
ccgcgctgccgatcgccgggaggacccccgcctcgccgaagacgggcggggcaagccgagcctcacggggtccccggagctgggccgggcctccagatggagaaggcgcaacggggagttcttgagtaagccagagcggtgtccagcgcggtgtagccgcagccgccgctgtcaggcgcagcaacgggcaaccccgtagaagtcggtcggcaggtcctctccaacccgccgctaccgcgccgctgtgggagagaccccagcaggagcccaaaggcagctacgggggcgcgaaggccgctggcgccgcctcggccagcccttcccgcgcggtgaggaccccggggctgtggcgggaagggacccgagcttccagtctgctgccctgagaagatacgtcacaaaagccttagcctgggtgaagtgctggatggggaccgaatggctgagtctttgtatgagatccgctttcgggaaaacgtggagaagagaattctgtgccacatgcagctcagttctgcacaggtggagcagctgcgccaggccattgaagaactgtactactttgaatttgtggtagatgacttgccaatccggggctttgtgggctacatggaggagagtggtttcctgccacacagccacaagataggactctggacccatttggacttccacctagaattccatggagaccgaattatatttgccaatgtttcagtgcgggacgtcaagccccacagcttggatgggttacgacctgacgagttcctaggccttacccacacttatagcgtgcgctggtctgagacttcagtggagcgtcggagtgacaggcgccgtggtgacgatggtggtttctttcctcgaacactggaaatccattggttgtccatcatcaactccatggtgcttgtgtttttactggtgggttttgtggctgtcattctaatgcgtgtgcttcggaatgacctggctcggtacaacttagatgaggagaccacctctgcaggttctggtgatgactttgaccagggtgacaatggctggaaaattatccatacagatgtcttccgcttccccccataccgtggtctgctctgtgctgtgcttggcgtgggtgcccagttcctggcccttggcactggcattattgtcatggcactgctgggcatgttcaatgtgcaccgtcatggggccattaactcagcagccatcttgttgtatgccctgacctgctgcatctctggctacgtgtccagccacttctaccggcagattggaggcgagcgttgggtgtggaacatcattctcaccaccagtctcttctctgtgcctttcttcctgacgtggagtgtggtgaactcagtgcattgggccaatggttcgacacaggctctgccagccacaaccatcctgctgcttctgacggtttggctgctggtgggctttcccctcactgtcattggaggcatctttgggaagaacaacgccagcccctttgatgcaccctgtcgcaccaagaacatcgcccgggagattccaccccagccctggtacaagtctactgtcatccacatgactgttggaggcttcctgcctttcagtgccatctctgtggagctgtactacatctttgccacagtatggggtcgggagcagtacactttgtacggcatcctcttctttgtcttcgccatcctgctgagtgtgggggcttgcatctccattgcactcacctacttccagttgtctggggaggattaccgctggtggtggcgatctgtgctgagtgttggctccaccggcctcttcatcttcctctactcagttttctattatgcccggcgctccaacatgtctggggcagtacagacagtagagttcttcggctactccttactcactggttatgtcttcttcctcatgctgggcaccatctcctttttttcttccctaaagttcatccggtatatctatgttaacctcaagatggactgagttctgtatggcagaactattgctgttctctccctttcttcatgccctgttgaactctcctaccagcttctcttctgattgactgaattgtgtgatggcattgttgccttcccttttgccctttgggcattccttccccagagagggcctggaaattataaatctctatcacataaggattatatatttgaactttttaagttgcctttagttttggtcctgatttttctttttacaattaccaaaataaaatttattaagaaaaagg

SEQ ID NO: 360394 - DNA, 2073 bp, Homo sapiens
ccgcgctgccgatcgccgggaggacccccgcctcgccgaagacgggcggggcaagccgagcctcacggggtccccggagctgggccgggcctccagatggagaaggcgcaacggggagttcttgagtaagccagagcggtgtccagcgcggtgtagccgcagccgccgctgtcaggcgcagcaacgggcaaccccgtagaagtcggtcggcaggtcctctccaacccgccgctaccgcgccgctgtgggagagaccccagcaggagcccaaaggcagctacgggggcgcgaaggccgctggcgccgcctcggccagcccttcccgcgcggtggagcagctgcgccaggccattgaagaactgtactactttgaatttgtggtagatgacttgccaatccggggctttgtgggctacatggaggagagtggtttcctgccacacagccacaagataggactctggacccatttggacttccacctagaattccatggagaccgaattatatttgccaatgtttcagtgcgggacgtcaagccccacagcttggatgggttacgacctgacgagttcctaggccttacccacacttatagcgtgcgctggtctgagacttcagtggagcgtcggagtgacaggcgccgtggtgacgatggtggtttctttcctcgaacactggaaatccattggttgtccatcatcaactccatggtgcttgtgtttttactggtgggttttgtggctgtcattctaatgcgtgtgcttcggaatgacctggctcggtacaacttagatgaggagaccacctctgcaggttctggtgatgactttgaccagggtgacaatggctggaaaattatccatacagatgtcttccgcttccccccataccgtggtctgctctgtgctgtgcttggcgtgggtgcccagttcctggcccttggcactggcattattgtcatggcactgctgggcatgttcaatgtgcaccgtcatggggccattaactcagcagccatcttgttgtatgccctgacctgctgcatctctggctacgtgtccagccacttctaccggcagattggaggcgagcgttgggtgtggaacatcattctcaccaccagtctcttctctgtgcctttcttcctgacgtggagtgtggtgaactcagtgcattgggccaatggttcgacacaggctctgccagccacaaccatcctgctgcttctgacggtttggctgctggtgggctttcccctcactgtcattggaggcatctttgggaagaacaacgccagcccctttgatgcaccctgtcgcaccaagaacatcgcccgggagattccaccccagccctggtacaagtctactgtcatccacatgactgttggaggcttcctgcctttcagtgccatctctgtggagctgtactacatctttgccacagtatggggtcgggagcagtacactttgtacggcatcctcttctttgtcttcgccatcctgctgagtgtgggggcttgcatctccattgcactcacctacttccagttgtctggggaggattaccgctggtggtggcgatctgtgctgagtgttggctccaccggcctcttcatcttcctctactcagttttctattatgcccggcgctccaacatgtctggggcagtacagacagtagagttcttcggctactccttactcactggttatgtcttcttcctcatgctgggcaccatctcctttttttcttccctaaagttcatccggtatatctatgttaacctcaagatggactgagttctgtatggcagaactattgctgttctctccctttcttcatgccctgttgaactctcctaccagcttctcttctgattgactgaattgtgtgatggcattgttgccttcccttttgccctttgggcattccttccccagagagggcctggaaattataaatctctatcacataaggattatatatttgaactttttaagttgcctttagttttggtcctgatttttctttttacaattaccaaaataaaatttattaagaaaaagg

SEQ ID NO: 360395 - DNA, 1190 bp, Homo sapiens
attcctctgaaattgctagaagagacacaggtgaggcctaacttgggctttccgctaccgtcctgcaggcattattgtcatggcactgctgggcatgttcaatgtgcaccgtcatggggccattaactcagcagccatcttgttgtatgccctgacctgctgcatctctggctacgtgtccagccacttctaccggcagattggaggcgagcgttgggtgtggaacatcattctcaccaccagtctcttctctgtgcctttcttcctgacgtggagtgtggtgaactcagtgcattgggccaatggttcgacacaggctctgccagccacaaccatcctgctgcttctgacggtttggctgctggtgggctttcccctcactgtcattggaggcatctttgggaagaacaacgccagcccctttgatgcaccctgtcgcaccaagaacatcgcccgggagattccaccccagccctggtacaagtctactgtcatccacatgactgttggaggcttcctgcctttcagtgccatctctgtggagctgtactacatctttgccacagtatggggtcgggagcagtacactttgtacggcatcctcttctttgtcttcgccatcctgctgagtgtgggggcttgcatctccattgcactcacctacttccagttgtctggggaggattaccgctggtggtggcgatctgtgctgagtgttggctccaccggcctcttcatcttcctctactcagttttctattatgcccggcgctccaacatgtctggggcagtacagacagtagagttcttcggctactccttactcactggttatgtcttcttcctcatgctgggcaccatctcctttttttcttccctaaagttcatccggtatatctatgttaacctcaagatggactgagttctgtatggcagaactattgctgttctctccctttcttcatgccctgttgaactctcctaccagcttctcttctgattgactgaattgtgtgatggcattgttgccttcccttttgccctttgggcattccttccccagagagggcctggaaattataaatctctatcacataaggattatatatttgaactttttaagttgcctttagttttggtcctgatttttctttttacaattaccaaaataaaatttattaagaaaaagg

SEQ ID NO: 360396 - DNA, 1139 bp, Homo sapiens
aaaaacacagaacaaagaataatgggacctgaaagggtggaggtgaaggcagtcgactctgcagggacatccaggagcatgagtctgccgttagagtggcaggctgcttcagccccctccccttttggtcctggatgtaagtgggtgcccttagagatgtagctcctagtgttgaccctccctccgggggcccatccctgcagtgcctttcttcctgacgtggagtgtggtgaactcagtgcattgggccaatggttcgacacaggctctgccagccacaaccatcctgctgcttctgacggtttggctgctggtgggctttcccctcactgtcattggaggcatctttgggaagaacaacgccagcccctttgatgcaccctgtcgcaccaagaacatcgcccgggagattccaccccagccctggtacaagtctactgtcatccacatgactgttggaggcttcctgcctttcagtgccatctctgtggagctgtactacatctttgccacagtatggggtcgggagcagtacactttgtacggcatcctcttctttgtcttcgccatcctgctgagtgtgggggcttgcatctccattgcactcacctacttccagttgtctggggaggattaccgctggtggtggcgatctgtgctgagtgttggctccaccggcctcttcatcttcctctactcagttttctattatgcccggcgctccaacatgtctggggcagtacagacagtagagttcttcggctactccttactcactggttatgtcttcttcctcatgctgggcaccatctcctttttttcttccctaaagttcatccggtatatctatgttaacctcaagatggactgagttctgtatggcagaactattgctgttctctccctttcttcatgccctgttgaactctcctaccagcttctcttctgattgactgaattgtgtgatggcattgttgccttcccttttgccctttgggcattccttccccagagagggcctggaaattataaatctctatcacataaggattatatatttgaactttttaagttgcctttagttttggtcctgatttttctttttacaattaccaaaataaaatttattaagaaaaagg

SEQ ID NO: 360397 - DNA, 2214 bp, Homo sapiens
ccgcgctgccgatcgccgggaggacccccgcctcgccgaagacgggcggggcaagccgagcctcacggggtccccggagctgggccgggcctccagatggagaaggcgcaacggggagttcttgagtaagccagagcggtgtccagcgcggtgtagccgcagccgccgctgtcaggcgcagcaacgggcaaccccgtagaagtcggtcggcaggtcctctccaacccgccgctaccgcgccgctgtgggagagaccccagcaggagcccaaaggcagctacgggggcgcgaaggccgctggcgccgcctcggccagcccttcccgcgcggttccactgccttaaggatgacagtcgtagggaaccctcgaagttggagctgccagtggttgccaatcctgatactgttgctgggcacaggccatgggccaggggtggaaggcgtgacacactacaaggccggcgaccctgttattctgtatgtcaacaaagtgggaccctaccataaccctcaggaaacttaccactactatcagcttccagtctgctgccctgagaagatacgtcacaaaagccttagcctgggtgaagtgctggatggggaccgaatggctgagtctttgtatgagatccgctttcgggaaaacgtggagaagagaattctgtgccacatgcagctcagttctgcacaggtggagcagctgcgccaggccattgaagaactgtactactttgaatttgtggtagatgacttgccaatccggggctttgtgggctacatggaggagagtggtttcctgccacacagccacaagataggactctggacccatttggacttccacctagaattccatggagaccgaattatatttgccaatgtttcagtgcgggacgtcaagccccacagcttggatgggttacgacctgacgagttcctaggccttacccacacttatagcgtgcgctggtctgagacttcagtggagcgtcggagtgacaggcgccgtggtgacgatggtggtttctttcctcgaacactggaaatccattggttgtccatcatcaactccatggtgcttgtgtttttactggtgggttttgtggctgtcattctaatgcgtgtgcttcggaatgacctggctcggtacaacttagatgaggagaccacctctgcaggttctggtgatgactttgaccagggtgacaatggctggaaaattatccatacagatgtcttccgcttccccccataccgtggtctgctctgtgctgtgcttggcgtgggtgcccagttcctggcccttggcactggcattattgtcatggcactgctgggcatgttcaatgtgcaccgtcatggggccattaactcagcagccatcttgttgtatgccctgacctgctgcatctctggctacgtgtccagccacttctaccggcagattggaggcgagcgttgggtgtggaacatcattctcaccaccagtctcttctctggtgaggactttcctttccctggtgggcctttctggacttaggaatgaagaacacattgtggctggtcacagtggctcacacctgtaatcctagcactttgggagaccgaggccggaggatcacttgagcccaaaagtttgagacaagcctagacaacatagtgagaccctctctctataacaaaaaattagccgggcatggtagtgcacatctgtaatcccagctactagggaggctgaggcgggacaattgcttgcagtgagccgagatcgtgccactgcactgtagcctgggcaacagagtgagactctgcctcgaaaaaaaaaaaaagcgcccctcacaaggcctggctcttaagctcaaaaatggtcatttctacagctcttgggcctgcctatgcctctcaccagaaagaaggttctctctgctgacctggctccctgggctctgtaggaacttcaggagggatctcttcaactctctctgggattgcagcctctaagaggtgtcgaatctttggagagggattggaaacaaaagatagggttcagcttcagccccctgctttcccacttttcacagccttcttcaacaatgcacggtaatctccttttatgcctaattcttgttgcattgacatcagcttgcagtaaactcacccgccctctggtcttctttcctcagttcctgttctcacctccctccccaacccgca

SEQ ID NO: 360398 - DNA, 1480 bp, Homo sapiens
  misc_feature (1303)..(1303): n is a, c, g, or t
ccgcgctgccgatcgccgggaggacccccgcctcgccgaagacgggcggggcaagccgagcctcacggggtccccggagctgggccgggcctccagatggagaaggcgcaacggggagttcttgagtaagccagagcggtgtccagcgcggtgtagccgcagccgccgctgtcaggcgcagcaacgggcaaccccgtagaagtcggtcggcaggtcctctccaacccgccgctaccgcgccgctgtgggagagaccccagcaggagcccaaaggcagctacgggggcgcgaaggccgctggcgccgcctcggccagcccttcccgcgcggttccactgccttaaggatgacagtcgtagggaaccctcgaagttggagctgccagtggttgccaatcctgatactgttgctgggcacaggccatgggccaggggtggaaggcgtgacacactacaaggccggcgaccctgttattctgtatgtcaacaaagtgggaccctaccataaccctcaggaaacttaccactactatcagcttccagtctgctgccctgagaagatacgtcacaaaagccttagcctgggtgaagtgctggatggggaccgaatggctgagtctttgtatgagatccgctttcgggaaaacgtggagaagagaattctgtgccacatgcagctcagttctgcacaggtggagcagctgcgccaggccattgaagaactgtactactttgaatttgtggtagatgacttgccaatccggggctttgtgggctacatggaggagagtggtttcctgccacacagccacaagataggactctggacccatttggacttccacctagaattccatggagaccgaattatatttgccaatgtttcagtgcgggacgtcaagccccacagcttggatgggttacgacctgacgagttcctaggccttacccacacttatagcgtgcgctggtctgagacttcagtggagcgtcggagtgacaggcgccgtggtgacgatggtggtttctttcctcgaacactggaaatccattggttgtccatcatcaaaaaaaaaaaaaaaaaaaaaaaaaaaaaaaaaaaaaaaaaaaaaacgcgggggaatttttgggggggggaaaaaagggtaaaaaaggggcatgggacacataccgggttgtccagcgaccgccactttttgtgttacacaaggggggaaaatctggggggggccccccaaataagagaggcggaatatatattgcagaaagccggagtatccctgttttatgactgtgcgcacaancgcagagcagaccacgacaggagcgacatgatgacgagaggccgcacgacagaactgaaacggagagacagcagcagcgaaagcagaacgtacaacgttaacacgagagagagacctgaaggtaggcgcagagcaacagagattgagtcagagcccaaatacgacgactgcatactg

SEQ ID NO: 360399 - DNA, 424 bp, Homo sapiens
ctcgccgaggcccctccttgcccgccgatatctctgccgggtgactagctgcttcctttctctctcgcgcgcggtgtggtggcagcaggcgcacaggcgcagcccagcctcgaaatgcagaacgacgccggcgagttcgtggacctgtacgtgccgcggaaatgctccgctagcaatcgcatcatcggtgccaaggaccacgcatccatccagatgaacgtggccgaggttgacaaggtcacaggcaggtttaatggccagtttaaaacttatgctatctgcggggccattcgtaggatgggtgagtcagatgattccattctccgattggccaaggccgatggcatcgtctcaaagaacttttgactggagagaatcacagatgtggaatatttgtcataaataaataatgaaaacctaaaaa

SEQ ID NO: 360400 - DNA, 385 bp, Homo sapiens
  misc_feature (16)..(16): n is a, c, g, or t
  misc_feature (24)..(24): n is a, c, g, or t
tactaaattcgcgggngctgcttnttttctctctcgcgcgcggtgtggtggcagcaggcgcagcccagcctcgaaatgcagaacgacgccggcgagttcgtggacctgtacgtgccgcggaaatgctccgctagcaatcgcatcatcggtgccaaggaccacgcatccatccagatgaacgtggccgaggttgacaaggtcacaggcaggtttaatggccagtttaaaacttatgctatctgcggggccattcgtaggatgggtgagtcagatgattccattctccgattggccaaggccgatggcatcgtctcaaagaacttttgactggagagaatcacagatgtggaatatttgtcataaataaataatgaaaacctaaaaa

SEQ ID NO: 360401 - DNA, 394 bp, Homo sapiens
  misc_feature (8)..(8): n is a, c, g, or t
  misc_feature (14)..(14): n is a, c, g, or t
  misc_feature (43)..(43): n is a, c, g, or t
  misc_feature (45)..(45): n is a, c, g, or t
  misc_feature (47)..(49): n is a, c, g, or t
ggcacganctcgtncaattcggcagaggattcggcacgagatncngnnngagcaggcgcaccacaggcgcagcccagcctcgaaatgcagaacgacgccggcgagttcgtggacctgtacgtgccgcggaaatgctccgctagcaatcgcatcatcggtgccaaggaccacgcatccatccagatgaacgtggccgaggttgacaaggtcacaggcaggtttaatggccagtttaaaacttatgctatctgcggggccattcgtaggatgggtgagtcagatgattccattctccgattggccaaggccgatggcatcgtctcaaagaacttttgactggagagaatcacagatgtggaatatttgtcataaataaataatgaaaacctaaaaa

SEQ ID NO: 360402 - DNA, 383 bp, Homo sapiens
  misc_feature (12)..(13): n is a, c, g, or t
  misc_feature (18)..(18): n is a, c, g, or t
  misc_feature (20)..(23): n is a, c, g, or t
  misc_feature (29)..(31): n is a, c, g, or t
tgccgggtgacnnagctncnnnngttctnnntcgcgcgcggtgtggtggcagcaggcgcagcccagcctcgaaatgcagaacgacgccggcgagttcgtggacctgtacgtgccgcggaaatgctccgctagcaatcgcatcatcggtgccaaggaccacgcatccatccagatgaacgtggccgaggttgacaaggtcacaggcaggtttaatggccagtttaaaacttatgctatctgcggggccattcgtaggatgggtgagtcagatgattccattctccgattggccaaggccgatggcatcgtctcaaagaacttttgactggagagaatcacagatgtggaatatttgtcataaataaataatgaaaacctaaaaa

SEQ ID NO: 360403 - DNA, 359 bp, Homo sapiens
gccgcagtggtgctggattcggtggcagcaggcgcagcccagcctcgaaatgcagaacgacgccggcgagttcgtggacctgtacgtgccgcggaaatgctccgctagcaatcgcatcatcggtgccaaggaccacgcatccatccagatgaacgtggccgaggttgacaaggtcacaggcaggtttaatggccagtttaaaacttatgctatctgcggggccattcgtaggatgggtgagtcagatgattccattctccgattggccaaggccgatggcatcgtctcaaagaacttttgactggagagaatcacagatgtggaatatttgtcataaataaataatgaaaacctaaaaa

SEQ ID NO: 360404 - DNA, 831 bp, Homo sapiens
ggaggaatgtcgcccattactcctcaggcctggccctcgggcctccgtgatgggagccccccaggaggggtcagatgctggaaggggccgctttctggggagtgaggtgagacatagcggcccgggcgctgccttcactcctggagtgagtttccatttccagctggaatctgcagccacccccatttcctgttttccattcccccgttctggccgcgccccactgcccacctgaaggggtggtttccagccctccggagagtgggcttggccctaggccctccagctcagccagaaaaagcccagaaacccaggtgctggaccaggccctcagggaggggaccctgcggctagagtgggctaggccctggctttgcccgtcagatttgaacgaatgtgtgtcccttgagcccaaggagagcggcaggaggggtgggaccaggctgggaggacagagccagcagctgccatgccctcctgctcctcctgacctttggcagcaggcgcagcccagcctcgaaatgcagaacgacgccggcgagttcgtggacctgtacgtgccgcggaaatgctccgctagcaatcgcatcatcggtgccaaggaccacgcatccatccagatgaacgtggccgaggttgacaaggtcacaggcaggtttaatggccagtttaaaacttatgctatctgcggggccattcgtaggatgggtgagtcagatgattccattctccgattggccaaggccgatggcatcgtctcaaagaacttttgactggagagaatcacagatgtggaatatttgtcataaataaataatgaaaacctaaaaa

SEQ ID NO: 360405 - DNA, 361 bp, Homo sapiens
gaattcactagtaatgcggtgtggtggcagcaggcgcagcccagcctcgaaatgcagaacgacgccggcgagttcgtggacctgtacgtgccgcggaaatgctccgctagcaatcgcatcatcggtgccaaggaccacgcatccatccagatgaacgtggccgaggttgacaaggtcacaggcaggtttaatggccagtttaaaacttatgctatctgcggggccattcgtaggatgggtgagtcagatgattccattctccgattggccaaggccgatggcatcgtctcaaagaacttttgactggagagaatcacagatgtggaatatttgtcataaataaataatgaaaacctaaaaa

SEQ ID NO: 360406 - DNA, 634 bp, Homo sapiens
  misc_feature (16)..(16): n is a, c, g, or t
  misc_feature (24)..(24): n is a, c, g, or t
  misc_feature (422)..(422): n is a, c, g, or t
tactaaattcgcgggngctgcttnttttctctctcgcgcgcggtgtggtggcagcaggcgcagcccagcctcgaaatgcagaacgacgccggcgagttcgtggacctgtacgtgccgcggaaatgctccgctagcaatcgcatcatcggtgccaaggaccacgcatccatccagatgaacgtggccgaggttgacaaggtcacaggcaggtttaatggccagtttaaaacttatgctatctgcggggccattcgtaggatgggtgagtcagatgattccattctccgattggccaaggccgatggcatcgtctcaaagaacttttgactggagagaatcacagatgtggaatatttgtcataaataaataatgaaaacctaaaaaaaaaaaaaaaaaaaaaaaaaaaaaaaaaaaaaaaaanaaaaacaaaaaaacaaaaaaaagagaaagaaaaaaaacgaaataaacaaccgaacaggaaaacaacagcaaggagggggcgcccaaataatcatcgccaaggggggccgcacaacagcggcacgcaatctttcctcagacagggggccccacaacaacagcgtattatacagaagaccgcgcgtggccgcgaacaaaacagagagcgagcga

SEQ ID NO: 360407 - DNA, 985 bp, Homo sapiens
ctcgccgaggcccctccttgcccgccgatatctctgccgggtgactagctgcttcctttctctctcgcgcgcggtgtggtggcagcaggcgcacaggcgcagcccagcctcgaaatgcagaacgacgccggcgagttcgtggacctgtacgtgccgcggaaatgctccgctagcaatcgcatcatcggtgccaaggaccacgcatccatccagatgaacgtggccgaggttgacaaggtcacaggcaggtttaatggccagtttaaaacttatgctatctgcggggccattcgtaggatgggtgagtcagatgattccattctccgattggccaaggccgatggcatcgtctcaaagaacttttgactggagagaatcacagatgtggaatatttgtcataaataaataatgaaaacctaaaaaaaaaaaaaaaaaagccagtttgaggagttcctgaaccagaagttcgcccttctacttctggatgaatggtgaccgcattcgactcccttgctggagaacgaccggcagcagacgcacattgctggatgtcatgcaggaccatttcagccgcgcgtcagcattcatagacgagctcttccaggacaggttcttcacccgggagccccaggataccttaccactacctgccttcagcctgcccacggaggcctcaccttcttctttcccaagtcccgcatcgtcccgcagttgatgcccttcttctccgtacgagcccctgaatttcacgccatggttcaggcctttcttgggatgatccccgggggtctcgcaggcctgggcattccactttcatagccgggcttcaggcccccgccaacggattctacgagaagggggcgataccggtgtgtgccggggatctcgccaatcccgggtgctggtataagcacttggacaggcgggactcttttgtggtgtcccacacttccggtatgggggaggcccaccccgcggcgtgac

SEQ ID NO: 360408 - DNA, 656 bp, Homo sapiens
ctcgccgaggcccctccttgcccgccgatatctctgccgggtgactagctgcttcctttctctctcgcgcgcggtgtggtggcagcaggcgcacaggcgcagcccagcctcgaaatgcagaacgacgccggcgagttcgtggacctgtacgtgccgcggaaatgctccgctagcaatcgcatcatcggtgccaaggaccacgcatccatccagatgaacgtggccgaggttgacaaggtcacaggcaggtttaatggccagtttaaaacttatgctatctgcggggccattcgtaggatgggtgagtcagatgattccattctccgattggccaaggccgatggcatcgtctcaaagaacttttgactggagagaatcacagatgtggaatatttgtcataaataaataatgaaaacctaaaaaccacccagccaactcccccaaccccaccttaaccttaatttcacattttccccttatctcaccacttttctatcaactgccctctcttcacaacctcactacctgtcactgcctggcgtacactatctatatcccgtactgtatcatgccgcctcctcggaccccttcctggcgacaagcctattaggcgcggccttcacacctggtgggaactttaatcctcacgggcgcc

SEQ ID NO: 360409 - DNA, 719 bp, Homo sapiens
  misc_feature (531)..(531): n is a, c, g, or t
  misc_feature (552)..(552): n is a, c, g, or t
  misc_feature (554)..(554): n is a, c, g, or t
ccgcccccccccctctcaaaaaaaaaaagctataccatgcttacgcaaagtaataatcgaaaaaccactgcgaaacctgatacgcctacaataaccataccaaaataaaaaaagctgccgcctactactactaaattcgcggccgcgtcgacagcagacaggcgcagcccagcctcgaaatgcagaacgacgccggcgagttcgtggacctgtacgtgccgcggaaatgctccgctagcaatcgcatcatcggtgccaaggaccacgcatccatccagatgaacgtggccgaggttgacaaggtcacaggcaggtttaatggccagtttaaaacttatgctatctgcggggccattcgtaggatgggtgagtcagatgattccattctccgattggccaaggccgatggcatcgtctcaaagaacttttgactggagagaatcacagatgtggaatatttgtcataaataaataatgaaaacctaaaaaaaaaaaaaaaaaaaaaaaaaaaaaaaaaaaaaaaaaaaaacncggggggatttttgttggggngnggggaaaaaggggtaggagaaaggggccaagggggaaaagcgcgggtcccgggacccaggcttttttgggaacaagggggggaaaacgggcgggggacccaaaaaggggagaggcggaactaaattgcgaaaagccggggaaccggggataataaacggacaaaa

SEQ ID NO: 360410 - DNA, 516 bp, Homo sapiens
ctcgccgaggcccctccttgcccgccgatatctctgccgggtgactagctgcttcctttctctctcgcgcgcggtgtggtggcagcaggcgcacaggcgcagcccagcctcgaaatgcagaacgacgccggcgagttcgtggacctgtacgtgccgcggaaatgctccgctagcaatcgcatcatcggtgccaaggaccacgcatccatccagatgaacgtggccgaggttgacaaggtcacaggcaggtttaatggccagtttaaaacttatgctatctgcggggccattcgtaggatgggtgagtcagatgattccattctccgattggccaaggccgatggcatcgtctcaaagtaaggttgggggctcacatttgggcagagtgagtggactaggactgctccagaggcgtggtcttaacgttgtccttttcccctggttctaggaacttttgactggagagaatcacagatgtggaatatttgtcataaataaataatgaaaacctaaaaa

SEQ ID NO: 360411 - DNA, 915 bp, Homo sapiens
  misc_feature (568)..(568): n is a, c, g, or t
gaattcactagtaatgcggtgtggtggcagcaggcgcagcccagcctcgaaatgcagaacgacgccggcgagttcgtggacctgtacgtgccgcggaaatgctccgctagcaatcgcatcatcggtgccaaggaccacgcatccatccagatgaacgtggccgaggttgacaaggtcacaggcaggtttaatggccagtttaaaacttatgctatctgcggggccattcgtaggatgggtgagtcagatgattccattctccgattggccaaggccgatggcatcgtctcaaagaacttttgactggagagaatcacagatgtggaatatttgtcataaataaataatgaaaacctaaaaaaaaaaaaaaaaaaactcggagactagtttcttcttcttctcttccacggggcctccggtaggccaccaacgtggcaagggaccccttcccccttgcggggcggcctccacatgggcgcacaagttcggcggttcgagaagagtgaacctggaactcgcgctggcgttcaagcgtgggatggcgacccaattccccaaatggcgaccncccgtgggagccgcatgggacagcggcaaaaggcgcaagagaacgccgagaagggccccgggcgcccctcaaccccagtggcggggcgcgccaaacgcgaatccacaagagggcccgcgccagagaacctcgcgggaccgagaactccgtgggcaaactccagattccagagggttcagaagccactccctagagaaaaccgtgggcgggtggacccggtaaaatccccacatgcgcaggtgtctgccccaagattggcacgggtgggccagggttcgctctctgaggcaaggggagagaccaggcgtgagaaacaggccagagagccccacccaaggaagggaccc

SEQ ID NO: 360412 - DNA, 441 bp, Homo sapiens
  misc_feature (12)..(13): n is a, c, g, or t
  misc_feature (18)..(18): n is a, c, g, or t
  misc_feature (20)..(23): n is a, c, g, or t
  misc_feature (29)..(31): n is a, c, g, or t
tgccgggtgacnnagctncnnnngttctnnntcgcgcgcggtgtggtggcagcaggcgcagcccagcctcgaaatgcagaacgacgccggcgagttcgtggacctgtacgtgccgcggaaatgctccgctagcaatcgcatcatcggtgccaaggaccacgcatccatccagatgaacgtggccgaggttgacaaggtcacaggcaggtttaatggccagtttaaaacttatgctatctgcggggccattcgtaggatgggtgagtcagatgattccattctccgattggccaaggccgatggcatcgtctcaaagaacttttgactggagagaatcacagatgtggaatatttgtcataaataaataatgaaaacctaaaaaaaagaaaagcaaaatgatgataatgcaataaggaaccaaaggataaacacactgaggc

SEQ ID NO: 360413 - DNA, 656 bp, Homo sapiens
  misc_feature (378)..(378): n is a, c, g, or t
tgaggccacaacaatggctaggtcgaggctggtgtgttggcagcaggcgcagcccagcctcgaaatgcagaacgacgccggcgagttcgtggacctgtacgtgccgcggaaatgctccgctagcaatcgcatcatcggtgccaaggaccacgcatccatccagatgaacgtggccgaggttgacaaggtcacaggcaggtttaatggccagtttaaaacttatgctatctgcggggccattcgtaggatgggtgagtcagatgattccattctccgattggccaaggccgatggcatcgtctcaaagaacttttgactggagagaatcacagatgtggaatatttgtcataaataaataatgaaaacctaaaaaaaanacaatgtataaattcattctattttggttctattttttaattaaatctatcaagtataatcctaaattgcaaatttgttttataaaaaaaactttgttggccgtttggccacaattgcttttaacttgaacaagttttttcattcggcccgaatttggggccaatttggccaaatcaccttttattggggttgtttttaacatatagtgggccgggttttaaaaactttctgtctgtggaaaacctctggggtcccccaatttatatcctctttgaac

SEQ ID NO: 360414 - DNA, 576 bp, Homo sapiens
aagcatggtatcaacgcagagtgcccattacggccgggcttcctttctctctcgcgcgcggtgtggtggcagcaggcgcagcccagcctcgaaatgcagaacgacgccggcgagttcgtggacctgtacgtgccgcggaaatgctccgctagcaatcgcatcatcggtgccaaggaccacgcatccatccagatgaacgtggccgaggttgacaaggtcacaggcaggtttaatggccagtttaaaacttatgctatctgcggggccattcgtaggatgggtgagtcagatgattccattctccgattggccaaggccgatggcatcgtctcaaagaacttttgactggagagaatcacagatgtggaatatttgtcataaataaataatgaaaacctaaaaaaaaaaaaaaaagggcgggcgctcgcgcccacgcgttccgcggacgcgtgggcccgcggtgaggttgtctagtccacgctcggagccatgccgtccaagggtccgctgcagtcggtgcaggtcttcggacgcaagaacgacagcgacagctgtggcgcactgcaaacgcggcca

SEQ ID NO: 360415 - DNA, 287 bp, Homo sapiens
  misc_feature (19)..(19): n is a, c, g, or t
ctcgtgcgattcggcagangtaaaatgctccgctagcaatcgcatcatcggtgccaaggaccacgcatccatccagatgaacgtggccgaggttgacaaggtcacaggcaggtttaatggccagtttaaaacttatgctatctgcggggccattcgtaggatgggtgagtcagatgattccattctccgattggccaaggccgatggcatcgtctcaaagaacttttgactggagagaatcacagatgtggaatatttgtcataaataaataatgaaaacctaaaaa

SEQ ID NO: 360416 - DNA, 758 bp, Homo sapiens
ctcgccgaggcccctccttgcccgccgatatctctgccgggtgactagctgcttcctttctctctcgcgcgcggtgtggtggcagcaggcgcacaggcgcagcccagcctcgaaatgcagaacgacgccggcgagttcgtggacctgtacgtgccgcggaaatgctccgctagcaatcgcatcatcggtgccaaggaccacgcatccatccagatgaacgtggccgaggttgacaaggtcacaggcaggtttaatggccagtttaaaacttatgctatctgcggggccattcgtaggatgggtgagtcagatgattccattctccgattggccaaggccgatggcatcgtctcaaagtaaggttgggggctcacatttgggcagagtgagtggactaggactgctccagaggcgtggtcttaacgttgtccttttcccctggttctaggaacttttgactggagagaatcacagatgtggaatatttgtcataaataaataatgaaaacctaaaaaaaaaaaaaaaaaaaactcgagactagcttctctcaaataataaccatacacaacactaaggggcgaacctgatctcttatacaagtatccttagtcatttcttttgtgcgcacaattaacctcctcggactccggctcactcatttacaccaaccacccaatatctttaaacctagcatgggcatcctcttatgaggggggcgggataaaggagtcggcctaagataatatggcctagccat

SEQ ID NO: 360417 - DNA, 422 bp, Homo sapiens
gtcttaggtggtttcattaaatgcagcacttggttagcagatgtttaattttttttttaacaacattaacttgtggcctctttctacacctggaaatttactcttgaataaataaaaactcgtttgtcttgtaaaaaaaaaaccaaaaaaaaaaaagaaatgctccgctagcaatcgcatcatcggtgccaaggaccacgcatccatccagatgaacgtggccgaggttgacaaggtcacaggcaggtttaatggccagtttaaaacttatgctatctgcggggccattcgtaggatgggtgagtcagatgattccattctccgattggccaaggccgatggcatcgtctcaaagaacttttgactggagagaatcacagatgtggaatatttgtcataaataaataatgaaaacctaaaaa

SEQ ID NO: 360418 - DNA, 273 bp, Homo sapiens
tctgcggtaccctaagtatcccggctatacatatcggtgccaaggaccacgcatccatccagatgaacgtggccgaggttgacaaggtcacaggcaggtttaatggccagtttaaaacttatgctatctgcggggccattcgtaggatgggtgagtcagatgattccattctccgattggccaaggccgatggcatcgtctcaaagaacttttgactggagagaatcacagatgtggaatatttgtcataaataaataatgaaaacctaaaaa

SEQ ID NO: 360419 - DNA, 471 bp, Homo sapiens
tgcagatgcctccccgaagcagtggccctggaaacctcaaacagcctcttgccaggggcatgaaggccatacagggccaggggaggcagaagcagtttgttgggccccttgcagcttccagataccaagcctgactgcggcagctccagagagggccccagactttcttcccctgaccccagtcctgggcacatgtccttgtcacctccctgccctgcactccagggcagggaggtgccaaggaccacgcatccatccagatgaacgtggccgaggttgacaaggtcacaggcaggtttaatggccagtttaaaacttatgctatctgcggggccattcgtaggatgggtgagtcagatgattccattctccgattggccaaggccgatggcatcgtctcaaagaacttttgactggagagaatcacagatgtggaatatttgtcataaataaataatgaaaacctaaaaa

SEQ ID NO: 360420 - DNA, 587 bp, Homo sapiens
cgtgggtgtcatccaaccgtgaccagaaggctgctggagctggcaaaggtcccccagtctgccccgaaagctccgaaggctaaatggatacttatccctgatacctgccaccccactcttaatccctggtggacagaagccgtctcagaactgtttgtttccattggcccctttaagtcttagctagtaaaagacctggcttaactgactaacccactggcactcgtaaaaccctctcacgaaggaaatggaggaaatgttttgtggagccacctcttggctttttcttcttttgcgctgtggccacgcttttaagcttattagtttttaaaatccgtactttctaatgggaaccacttggccccaaatttgtccccgaattcttgagaccccttaaaaagtttaatgagaaaaaaaaagccagtttaaaacttatgctatctgcggggccattcgtaggatgggtgagtcagatgattccattctccgattggccaaggccgatggcatcgtctcaaagaacttttgactggagagaatcacagatgtggaatatttgtcataaataaataatgaaaacctaaaaa

SEQ ID NO: 360421 - DNA, 351 bp, Homo sapiens
ccgcccccccccctctcaaaaaaaaaaagctataccatgcttacgcaaagtaataatcgaaaaaccactgcgaaacctgatacgcctacaataaccataccaaaataaaaaaagctgccgcctactactactaaattcgcggccgcgtcgacagcagaaaatgctccgctagcaatcgcatcatcggtgccaaggaccacgcatccatccagatgaacgtggccgagggtgagtcagatgattccattctccgattggccaaggccgatggcatcgtctcaaagaacttttgactggagagaatcacagatgtggaatatttgtcataaataaataatgaaaacctaaaaa

SEQ ID NO: 360422 - DNA, 985 bp, Homo sapiens
ctcgccgaggcccctccttgcccgccgatatctctgccgggtgactagctgcttcctttctctctcgcgcgcggtgtggtggcagcaggcgcacaggcgcagcccagcctcgaaatgcagaacgacgccggcgagttcgtggacctgtacgtgccgcggaaatgctccgctagcaatcgcatcatcggtgccaaggaccacgcatccatccagatgaacgtggccgaggttgacaaggtcacaggcaggtttaatggccagtttaaaacttatgctatctgcggggccattcgtaggatgggtgagtcagatgattccattctccgattggccaaggccgatggcatcgtctcaaagaacttttgactggagagaatcacagatgtggaatatttgtcataaataaataatgaaaacctaaaaaaaaaaaaaaaaaaaaaaaaaaaaaatacagaatggaaaggaacgaaacatgatataaaacataacctgattggatacatggatgtcatcagcttttgaccatagacgggagagaatttccgttgatactatgacaccaagggtacgcatttgctgtacatcgggattacacctgaggaggcaagtacaagttgagcaagagtgagaaagatcttgtcgggcacaaaaggaatccctcatctggtgactcatgatgaaccggggcataccgcataacccgatccggcgtcatcaagggtggggtgataccattgcagatggataaaggagacatgggaagatcactgatttacatcaacgtgcgacacctggataaccgtgtgtaatcggtgactggaggtgaaaaacacataggaaagccaccggcgagagaaggagcccccacagaaggggacccaggaacgccggacgcagcgcacgatggtgagaatgaaaaagacaaagctggcgaaaggagatcacacccaaaaagtagggggcggcaaaaacaacgccaaacagc

SEQ ID NO: 360423 - DNA, 935 bp, Homo sapiens
ctcgccgaggcccctccttgcccgccgatatctctgccgggtgactagctgcttcctttctctctcgcgcgcggtgtggtggcagcaggcgcacaggcgcagcccagcctcgaaatgcagaacgacgccggcgagttcgtggacctgtacgtgccgcggaaatgctccgctagcaatcgcatcatcggtgccaaggaccacgcatccatccagatgaacgtggccgaggttgacaaggtcacaggcaggtttaatggccagtttaaaacttatgctatctgcggggccattcgtaggatgggtgagtcagatgattccattctccgattggccaaggccgatggcatcgtctcaaagaacttttgactggagagaatcacagatgtggaatatttgtcataaataaataatgaaaacctaaaaaaaaaaaaaaaaaaaaaaaaaaaaaaaaaaaaaaaaaaaaaaaaaaaaaaaaaaaaaaaaaaaaaagaggggggggcgcgcccaaaaaatccccccggggggcgcgcctttgcgcccccgcttttgtgtgaaaggggggcccccatgaggggctttttaaagggccgcgcagcggggcgcgcgttataaaaagcaccagcagcgagtgggggaacacagccgagccacgcgggggagatctcttggggagaaggagcccccatatcggcggggggggggagagcaaaattagggggggaaacaccctacacctaaacgaagatatattaagaaactcttgggaggggaagtaatatataaacttttcagagagggggtatataggtgggtgaaaaaccagagacgcgagatcgtatggatgtggggtggtaaaagaatattgtgggtctagcgagtgtatgtaatttcgacgaaactttattatagcgaggggcgttttagatgataaggtg

SEQ ID NO: 360424 - DNA, 1064 bp, Homo sapiens
gcggcgcgggcttcgggctcagggctggggctggggcgggagtgggggcttggacgcgggggacggggtgcggggtgctgggtgcggctggggccgtgaccctaggggccggtttgcgccgggagccggggcacggttccggccgtactcacggcgccgcgcggtgactccccaggcgcagcccagcctcgaaatgcagaacgacgccggcgagttcgtggacctgtacgtgccgcggaaatgctccgctagcaatcgcatcatcggtgccaaggaccacgcatccatccagatgaacgtggccgaggttgacaaggtcacaggcaggtttaatggccagtttaaaacttatgctatctgcggggccattcgtaggatgggtgagtcagatgattccattctccgattggccaaggccgatggcatcgtctcaaagaacttttgactggagagaatcacagatgtggaatatttgtcataaataaataatgaaaacctaaaaaaaaaaaaaaaaaaaaaaaaaaaaaatacagaatggaaaggaacgaaacatgatataaaacataacctgattggatacatggatgtcatcagcttttgaccatagacgggagagaatttccgttgatactatgacaccaagggtacgcatttgctgtacatcgggattacacctgaggaggcaagtacaagttgagcaagagtgagaaagatcttgtcgggcacaaaaggaatccctcatctggtgactcatgatgaaccggggcataccgcataacccgatccggcgtcatcaagggtggggtgataccattgcagatggataaaggagacatgggaagatcactgatttacatcaacgtgcgacacctggataaccgtgtgtaatcggtgactggaggtgaaaaacacataggaaagccaccggcgagagaaggagcccccacagaaggggacccaggaacgccggacgcagcgcacgatggtgagaatgaaaaagacaaagctggcgaaaggagatcacacccaaaaagtagggggcggcaaaaacaacgccaaacagc

SEQ ID NO: 360425 - DNA, 821 bp, Homo sapiens
  misc_feature (508)..(508): n is a, c, g, or t
ctcgccgaggcccctccttgcccgccgatatctctgccgggtgactagctgcttcctttctctctcgcgcgcggtgtggtggcagcaggcgcacaggcgcagcccagcctcgaaatgcagaacgacgccggcgagttcgtggacctgtacgtgccgcggaaatgctccgctagcaatcgcatcatcggtgccaaggaccacgcatccatccagatgaacgtggccgaggttgacaaggtcacaggcaggtttaatggccagtttaaaacttatgctatctgcggggccattcgtaggatgggtgagtcagatgattccattctccgattggccaaggccgatggcatcgtctcaaagaacttttgactggagagaatcacagatgtggaatatttgtcataaataaataatgaaaacctaaaaaaaaaaaaaaaaaaaaaaaaaaaaaaaaaaaaaaaaaaaaaaaaaaaaaaaaaaaaaaaaagaacaaaaaaaaaaaaaaaaaaanaaaaaaaagagaagaaaaaaaaaaaaaagcacaaaaaaaaaagagagggggggaggagagtgagaagtatatcctgctgtggggggagaagactaaacaaggaggcgagagcagattttttgtgaatcacggggcggcccaccccgaaacgagggcggagtataaaaagcgaacaagcagggcgggagagaataatacaaagggggatgggaggagaagaaagaaaaaagagagacgaaaggaggaagaagagacggaggaaaaaacagtggggaggagaaagaaaggaaagagaacacaagcaacacaaaga

SEQ ID NO: 360426 - DNA, 654 bp, Homo sapiens
  misc_feature (466)..(466): n is a, c, g, or t
  misc_feature (487)..(487): n is a, c, g, or t
  misc_feature (489)..(489): n is a, c, g, or t
ctcgccgaggcccctccttgcccgccgatatctctgccgggtgactagctgcttcctttctctctcgcgcgcggtgtggtggcagcaggcgcacaggcgcagcccagcctcgaaatgcagaacgacgccggcgagttcgtggacctgtacgtgccgcggaaatgctccgctagcaatcgcatcatcggtgccaaggaccacgcatccatccagatgaacgtggccgaggttgacaaggtcacaggcaggtttaatggccagtttaaaacttatgctatctgcggggccattcgtaggatgggtgagtcagatgattccattctccgattggccaaggccgatggcatcgtctcaaagaacttttgactggagagaatcacagatgtggaatatttgtcataaataaataatgaaaacctaaaaaaaaaaaaaaaaaaaaaaaaaaaaaaaaaaaaaaaaaaaaacncggggggatttttgttggggngnggggaaaaaggggtaggagaaaggggccaagggggaaaagcgcgggtcccgggacccaggcttttttgggaacaagggggggaaaacgggcgggggacccaaaaaggggagaggcggaactaaattgcgaaaagccggggaaccggggataataaacggacaaaa

SEQ ID NO: 360427 - DNA, 652 bp, Homo sapiens
  misc_feature (460)..(460): n is a, c, g, or t
  misc_feature (477)..(478): n is a, c, g, or t
  misc_feature (480)..(480): n is a, c, g, or t
  misc_feature (502)..(502): n is a, c, g, or t
  misc_feature (504)..(504): n is a, c, g, or t
  misc_feature (510)..(510): n is a, c, g, or t
ctcgccgaggcccctccttgcccgccgatatctctgccgggtgactagctgcttcctttctctctcgcgcgcggtgtggtggcagcaggcgcacaggcgcagcccagcctcgaaatgcagaacgacgccggcgagttcgtggacctgtacgtgccgcggaaatgctccgctagcaatcgcatcatcggtgccaaggaccacgcatccatccagatgaacgtggccgaggttgacaaggtcacaggcaggtttaatggccagtttaaaacttatgctatctgcggggccattcgtaggatgggtgagtcagatgattccattctccgattggccaaggccgatggcatcgtctcaaagaacttttgactggagagaatcacagatgtggaatatttgtcataaataaataatgaaaacctaaaaaaaaaaaaaaaaaaaacaaaaaaaaaaaaaaaaaaanaaaaacaacgggggggnntnttgggggggggggaaaaagggngnaaaganaagggcgacagtgggccaaagggggtttcccagagccccagtttttctgtgtgtacaagggggggaaatcggaggggcccccccaaagggacgcggaaatattgcagaaaacccgggtacccggctttgccccgccaaaggc

SEQ ID NO: 360428 - DNA, 761 bp, Homo sapiens
  misc_feature (618)..(618): n is a, c, g, or t
ctcgccgaggcccctccttgcccgccgatatctctgccgggtgactagctgcttcctttctctctcgcgcgcggtgtggtggcagcaggcgcacaggcgcagcccagcctcgaaatgcagaacgacgccggcgagttcgtggacctgtacgtgccgcggaaatgctccgctagcaatcgcatcatcggtgccaaggaccacgcatccatccagatgaacgtggccgaggttgacaaggtcacaggcaggtttaatggccagtttaaaacttatgctatctgcggggccattcgtaggatgggtgagtcagatgattccattctccgattggccaaggccgatggcatcgtctcaaagaacttttgactggagagaatcacagatgtggaatatttgtcataaataaataatgaaaacctaaaaaaaaaaaaaaaaaaaacaaaaaaaaaacaccccggggcccctcttttgcgcgggggcgcgcggaaaaaggggtattgaagggcgccctgtggccatatagcgcgtggtctcctgtgccccaggtttctctttgttacacacggggaaaacctctgcgccggggtcccccctatattggggaggccggctaataantttccgagaataccgccgcggttaccccgggattaaattgcgccccgcggcacaaaaggtcccacgcgaactatccgcacacacgccgacacgcagcccggcttttaaaccacagacccaacaccgacatatcaaacacccgc

SEQ ID NO: 360429 - DNA, 449 bp, Homo sapiens
ctcgccgaggcccctccttgcccgccgatatctctgccgggtgactagctgcttcctttctctctcgcgcgcggtgtggtggcagcaggcgcacaggcgcagcccagcctcgaaatgcagaacgacgccggcgagttcgtggacctgtacgtgccgcggaaatgctccgctagcaatcgcatcatcggtgccaaggaccacgcatccatccagatgaacgtggccgaggttgacaaggtcacaggcaggtttaatggccagtttaaaacttatgctatctgcggggccattcgtaggatgggtgagtcagatgattccattctccgattggccaaggccgatggcatcgtctcaaagaacttttgactggagagaatcacagatgtggaatatttgtcataaataaataatgaaaacctaaaaagttttttttttttttttttttgaga

SEQ ID NO: 360430 - DNA, 724 bp, Homo sapiens
ctcgccgaggcccctccttgcccgccgatatctctgccgggtgactagctgcttcctttctctctcgcgcgcggtgtggtggcagcaggcgcacaggcgcagcccagcctcgaaatgcagaacgacgccggcgagttcgtggacctgtacgtgccgcggaaatgctccgctagcaatcgcatcatcggtgccaaggaccacgcatccatccagatgaacgtggccgaggttgacaaggtcacaggcaggtttaatggccagtttaaaacttatgctatctgcggggccattcgtaggatgggtgagtcagatgattccattctccgattggccaaggccgatggcatcgtctcaaagaacttttgactggagagaatcacagatgtggaatatttgtcataaataaataatgaaaacctaaaaatggctcattgcaagctccacctcccagcttcaagtgattttcctgcctcagcctcctgagtagctgggactacaggcgcccgccaccacgctcagctaatttttttgtatttttagtagagacggggtttcaccctgttagccaggatggtcttgatctcctgacctcgtgatccacctgcctcggcctcccaaagtgctgggattacaggcgtgagccaccacgcccggcctgtttttttttttgaacagatgctcgactgatgatggggtcaggttttttttttttttttttttgaga

SEQ ID NO: 360431 - DNA, 637 bp, Homo sapiens
  misc_feature (564)..(564): n is a, c, g, or t
  misc_feature (601)..(601): n is a, c, g, or t
ctcgccgaggcccctccttgcccgccgatatctctgccgggtgactagctgcttcctttctctctcgcgcgcggtgtggtggcagcaggcgcacaggcgcagcccagcctcgaaatgcagaacgacgccggcgagttcgtggacctgtacgtgccgcggaaatgctccgctagcaatcgcatcatcggtgccaaggaccacgcatccatccagatgaacgtggccgaggttgacaaggtcacaggcaggtttaatggccagtttaaaacttatgctatctgcggggccattcgtaggatgggtgagtcagatgattccattctccgattggccaaggccgatggcatcgtctcaaagaacttttgactggagagaatcacagatgtggaatatttgtcataaataaataatgaaaacctaaaaatcctagttcctcagtcccgcccagcttctctcgaaagtcactctaattttcattgattcaagtgctctaagttgccattgcttatcctattatactgggatattccgttacccttggcattgctgatcttcagtctgctncttgccattttaggtaatgcatcaatcccattgctgngatctaggacgattcttactcggacctgaagtggtg

SEQ ID NO: 360432 - DNA, 688 bp, Homo sapiens
  misc_feature (463)..(464): n is a, c, g, or t
  misc_feature (471)..(471): n is a, c, g, or t
  misc_feature (476)..(476): n is a, c, g, or t
  misc_feature (503)..(503): n is a, c, g, or t
  misc_feature (525)..(525): n is a, c, g, or t
  misc_feature (540)..(540): n is a, c, g, or t
  misc_feature (544)..(544): n is a, c, g, or t
  misc_feature (596)..(596): n is a, c, g, or t
  misc_feature (601)..(601): n is a, c, g, or t
gaattcactagtaatgcggtgtggtggcagcaggcgcagcccagcctcgaaatgcagaacgacgccggcgagttcgtggacctgtacgtgccgcggaaatgctccgctagcaatcgcatcatcggtgccaaggaccacgcatccatccagatgaacgtggccgaggttgacaaggtcacaggcaggtttaatggccagtttaaaacttatgctatctgcggggccattcgtaggatgggtgagtcagatgattccattctccgattggccaaggccgatggcatcgtctcaaagaacttttgactggagagaatcacagatgtggaatatttgtcataaataaataatgaaaacctaaaaaaaaaaaaaaaaaaactcggagactagtttcttcttcttctcttctctcgtcttactttccctccgggtttccccgccgccgccgccgccatcagtgggggannatcgggncactngcaggccgggcagggcgggcaaccaantcgggcgcaagtttggggaggngatcagcgatgagcncggnttcgaccccaggggcacctaccagggggacagcgacctgcagtgggaacgcntcaangtgtctacaatggggccaccgggggcaagtacgtgccccgcgccggctcgtggatctggagccggcacatggactcgcgcgcccggg

SEQ ID NO: 360433 - DNA, 544 bp, Homo sapiens
ggactagctgcttcctttctctctcgcgcgcggtgtggtggcagcaggcgcagcccagcctcgaaatgcagaacgacgccggcgagttcgtggacctgtacgtgccgcggaaatgctccgctagcaatcgcatcatcggtgccaaggaccacgcatccatccagatgaacgtggccgaaggtgagctgggagcccgggaggcgggaaggttgtgatatatgtgcgggaaaggcaggctgtcccattgtggaggagcccctggggtgaaggtacaggcagaggctggctttgaggattggtgtttcccaaacctgggggagtggtttgtgacccttcttctctttctaggttgacaaggtcacaggcaggtttaatggccagtttaaaacttatgctatctgcggggccattcgtaggatgggtgagtcagatgattccattctccgattggccaaggccgatggcatcgtctcaaagaacttttgactggagagaatcacagatgtggaatatttgtcataaataaataatgaaaacctaaaaa

SEQ ID NO: 360434 - DNA, 1029 bp, Homo sapiens
ggactagctgcttcctttctctctcgcgcgcggtgtggtggcagcaggcgcagcccagcctcgaaatgcagaacgacgccggcgagttcgtggacctgtacgtgccgcggaaatgctccgctagcaatcgcatcatcggtgccaaggaccacgcatccatccagatgaacgtggccgaaggtgagctgggagcccgggaggcgggaaggttgtgatatatgtgcgggaaaggcaggctgtcccattgtggaggagcccctggggtgaaggtacaggcagaggctggctttgaggattggtgtttcccaaacctgggggagtggtttgtgacccttcttctctttctaggttgacaaggtcacaggcaggtttaatggccagtttaaaacttatgctatctgcggggccattcgtaggatggtgagtgtttccctgggctttgctcatcacttcgggacatcgtggactttaccgtgcgcattggagtgtgtgatggtgcctgagtagatctgctggcagagtagtttgagccagctggactgggctggccgcctgccgcttcttgagggtggaagaggggtgctctgagaagacactcaggcagcagactctgcctctcactaggaggtgcccccccgaccccgctccaccatagtcaggctgcaggctgccccgggagaggtggctccccttctgcgcctgtctccattcgctcagcgggggagagacgtgggctggtggcacagctgaccttctgccatctcaggcagccggagtggaaatattcttagtgtgctttttttttttcttaagggtgagtcagatgattccattctccgattggccaaggccgatggcatcgtctcaaagtaaggttgggggctcacatttgggcagagtgagtggactaggactgctccagaggcgtggtcttaacgttgtccttttcccctggttctaggaacttttgactggagagaatcacagatgtggaatatttgtcataaataaataatgaaaacctaaaaa

SEQ ID NO: 360435 - DNA, 503 bp, Homo sapiens
  misc_feature (16)..(16): n is a, c, g, or t
  misc_feature (24)..(24): n is a, c, g, or t
tactaaattcgcgggngctgcttnttttctctctcgcgcgcggtgtggtggcagcaggcgcagcccagcctcgaaatgcagactctgcctctcactaggaggtgcccccccgaccccgctccaccatagtcaggctgcaggctgccccgggagaggtggctccccttctgcgcctgtctccattcgctcagcgggggagagacgtgggctggtggcacagctgaccttctgccatctcaggcagccggagtggaaatattcttagtgtgctttttttttttcttaagggtgagtcagatgattccattctccgattggccaaggccgatggcatcgtctcaaagtaaggttgggggctcacatttgggcagagtgagtggactaggactgctccagaggcgtggtcttaacgttgtccttttcccctggttctaggaacttttgactggagagaatcacagatgtggaatatttgtcataaataaataatgaaaacctaaaaa

SEQ ID NO: 360436 - DNA, 333 bp, Homo sapiens
cttaagggtgagtcagatgattccattctccgattggccaaggccgatggcatcgtctcaaagtaaggttgggggctcacatttgggcagagtgagtggactaggactgctccagaggcgtggtcttaacgttgtccttttcccctggttctaggaacttttgactggagagaatcacagatgtggaatatttgtcataaataaataatgaaaacctaaaaatgcaggttcattctgtgtctgtaggcccagggttgaggttttgctgtcagtgggtgacgggtggggtagggtacccagttagttgaaaggagacaagctgtgaaacatatt

SEQ ID NO: 360437 - DNA, 489 bp, Homo sapiens
ccgcccccccccctctcaaaaaaaaaaagctataccatgcttacgcaaagtaataatcgaaaaaccactgcgaaacctgatacgcctacaataaccataccaaaataaaaaaagctgccgcctactactactaaattcgcggccgcgtcgacagcagacaggcgcagcccagcctcgaaatgcagaacgacgccggcgagttcgtggacctgtacgtgccgcggaaatgctccgctagcaatcgcatcatcggtgccaaggaccacgcatccatccagatgaacgtggccgaggttgacaaggtcacaggcaggtttaatggccagtttaaaacttatgctatctgcggggccattcgtaggatgggtgagtcagatgattccattctccgattggccaaggccgatggcatcgtctcaaagaacttttgactggagagaatcacagatgtggaatatttgtcataaataaataatgaaaacctaaaaa

SEQ ID NO: 360438 - DNA, 953 bp, Homo sapiens
cagttgtcaaatgatcctttattgaaatgttttcctttgtgcttaactggctgggcattccacagcaccactgttgatgtcatcgatgatgtcatgaggatggcggccatcaacattacagcccactgactgggcagtccccaggatctctttaatggttccagagagttctctggctaaggatcggtgccgcatctgtcgagcaatgttgacaatctcatcaaaagtgatattcccactgtgtttaatgtttttctgtttctttctgtctcttggtggttccttgagggctttgatgatcagggcagaggcagaaggcaccacctcaatctgggcctgtctgttctgaatggtcagtttcactgtaatcctcaggcccttccagtcacccgttgccttggcaatgtcatcaccaactttttttggagacagacccagggggccgatcttgggggccagggcagaagtggcaccgacttcacctccggtgcacctcaggtatacgactttgatctcgttggggtcgaacttcggcggcatggtggaggcggctggtgtcggatgaacccggattcgggacgaccgaaggaagttgcaccttggcctcctccgagccgggcagcaggcgcagcccagcctcgaaatgcagaacgacgccggcgagttcgtggacctgtacgtgccgcggaaatgctccgctagcaatcgcatcatcggtgccaaggaccacgcatccatccagatgaacgtggccgaggttgacaaggtcacaggcaggtttaatggccagtttaaaacttatgctatctgcggggccattcgtaggatgggtgagtcagatgattccattctccgattggccaaggccgatggcatcgtctcaaagaacttttgactggagagaatcacagatgtggaatatttgtcataaataaataatgaaaacctaaaaa

SEQ ID NO: 360439 - DNA, 372 bp, Homo sapiens
  misc_feature (2)..(2): n is a, c, g, or t
  misc_feature (7)..(7): n is a, c, g, or t
ancggcncctactactactaaataagcggccgctcgaccagcaggcgcagcccagcctcgaaatgcagaacgacgccggcgagttcgtggacctgtacgtgccgcggaaatgctccgctagcaatcgcatcatcggtgccaaggaccacgcatccatccagatgaacgtggccgaggttgacaaggtcacaggcaggtttaatggccagtttaaaacttatgctatctgcggggccattcgtaggatgggtgagtcagatgattccattctccgattggccaaggccgatggcatcgtctcaaagaacttttgactggagagaatcacagatgtggaatatttgtcataaataaataatgaaaacctaaaaa

SEQ ID NO: 360440 - DNA, 354 bp, Homo sapiens
caccctctgccgaattcggcacgcaggcgcagcccagcctcgaaatgcagaacgacgccggcgagttcgtggacctgtacgtgccgcggaaatgctccgctagcaatcgcatcatcggtgccaaggaccacgcatccatccagatgaacgtggccgaggttgacaaggtcacaggcaggtttaatggccagtttaaaacttatgctatctgcggggccattcgtaggatgggtgagtcagatgattccattctccgattggccaaggccgatggcatcgtctcaaagaacttttgactggagagaatcacagatgtggaatatttgtcataaataaataatgaaaacctaaaaa

SEQ ID NO: 360441 - DNA, 403 bp, Homo sapiens
aagcatggtatcaacgcagagtgcccattacggccgggcttcctttctctctcgcgcgcggtgtggtggcagcaggcgcagcccagcctcgaaatgcagaacgacgccggcgagttcgtggacctgtacgtgccgcggaaatgctccgctagcaatcgcatcatcggtgccaaggaccacgcatccatccagatgaacgtggccgaggttgacaaggtcacaggcaggtttaatggccagtttaaaacttatgctatctgcggggccattcgtaggatgggtgagtcagatgattccattctccgattggccaaggccgatggcatcgtctcaaagaacttttgactggagagaatcacagatgtggaatatttgtcataaataaataatgaaaacctaaaaa

SEQ ID NO: 360442 - DNA, 503 bp, Homo sapiens
gcggcgcgggcttcgggctcagggctggggctggggcgggagtgggggcttggacgcgggggacggggtgcggggtgctgggtgcggctggggccgtgaccctaggggccggtttgcgccgggagccggggcacggttccggccgtactcacggcgccgcgcggtgactccccaggcgcagcccagcctcgaaatgcagaacgacgccggcgagttcgtggacctgtacgtgccgcggaaatgctccgctagcaatcgcatcatcggtgccaaggaccacgcatccatccagatgaacgtggccgaggttgacaaggtcacaggcaggtttaatggccagtttaaaacttatgctatctgcggggccattcgtaggatgggtgagtcagatgattccattctccgattggccaaggccgatggcatcgtctcaaagaacttttgactggagagaatcacagatgtggaatatttgtcataaataaataatgaaaacctaaaaa

SEQ ID NO: 360443 - DNA, 374 bp, Homo sapiens
tgaggccacaacaatggctaggtcgaggctggtgtgttggcagcaggcgcagcccagcctcgaaatgcagaacgacgccggcgagttcgtggacctgtacgtgccgcggaaatgctccgctagcaatcgcatcatcggtgccaaggaccacgcatccatccagatgaacgtggccgaggttgacaaggtcacaggcaggtttaatggccagtttaaaacttatgctatctgcggggccattcgtaggatgggtgagtcagatgattccattctccgattggccaaggccgatggcatcgtctcaaagaacttttgactggagagaatcacagatgtggaatatttgtcataaataaataatgaaaacctaaaaa

SEQ ID NO: 360444 - DNA, 1228 bp, Homo sapiens
  misc_feature (915)..(915): n is a, c, g, or t
ggaggaatgtcgcccattactcctcaggcctggccctcgggcctccgtgatgggagccccccaggaggggtcagatgctggaaggggccgctttctggggagtgaggtgagacatagcggcccgggcgctgccttcactcctggagtgagtttccatttccagctggaatctgcagccacccccatttcctgttttccattcccccgttctggccgcgccccactgcccacctgaaggggtggtttccagccctccggagagtgggcttggccctaggccctccagctcagccagaaaaagcccagaaacccaggtgctggaccaggccctcagggaggggaccctgcggctagagtgggctaggccctggctttgcccgtcagatttgaacgaatgtgtgtcccttgagcccaaggagagcggcaggaggggtgggaccaggctgggaggacagagccagcagctgccatgccctcctgctcctcctgacctttggcagcaggcgcagcccagcctcgaaatgcagaacgacgccggcgagttcgtggacctgtacgtgccgcggaaatgctccgctagcaatcgcatcatcggtgccaaggaccacgcatccatccagatgaacgtggccgaggttgacaaggtcacaggcaggtttaatggccagtttaaaacttatgctatctgcggggccattcgtaggatgggtgagtcagatgattccattctccgattggccaaggccgatggcatcgtctcaaagaacttttgactggagagaatcacagatgtggaatatttgtcataaataaataatgaaaacctaaaaaaaaaaaaaaaaaaaaaaaaaaaaaaaaaaaaaaaaaaaaaaaaaaaaaaaaaaaaaaaaagaacaaaaaaaaaaaaaaaaaaanaaaaaaaagagaagaaaaaaaaaaaaaagcacaaaaaaaaaagagagggggggaggagagtgagaagtatatcctgctgtggggggagaagactaaacaaggaggcgagagcagattttttgtgaatcacggggcggcccaccccgaaacgagggcggagtataaaaagcgaacaagcagggcgggagagaataatacaaagggggatgggaggagaagaaagaaaaaagagagacgaaaggaggaagaagagacggaggaaaaaacagtggggaggagaaagaaaggaaagagaacacaagcaacacaaaga

SEQ ID NO: 360445 - DNA, 1181 bp, Homo sapiens
  misc_feature (989)..(989): n is a, c, g, or t
  misc_feature (1006)..(1007): n is a, c, g, or t
  misc_feature (1009)..(1009): n is a, c, g, or t
  misc_feature (1031)..(1031): n is a, c, g, or t
  misc_feature (1033)..(1033): n is a, c, g, or t
  misc_feature (1039)..(1039): n is a, c, g, or t
cagttgtcaaatgatcctttattgaaatgttttcctttgtgcttaactggctgggcattccacagcaccactgttgatgtcatcgatgatgtcatgaggatggcggccatcaacattacagcccactgactgggcagtccccaggatctctttaatggttccagagagttctctggctaaggatcggtgccgcatctgtcgagcaatgttgacaatctcatcaaaagtgatattcccactgtgtttaatgtttttctgtttctttctgtctcttggtggttccttgagggctttgatgatcagggcagaggcagaaggcaccacctcaatctgggcctgtctgttctgaatggtcagtttcactgtaatcctcaggcccttccagtcacccgttgccttggcaatgtcatcaccaactttttttggagacagacccagggggccgatcttgggggccagggcagaagtggcaccgacttcacctccggtgcacctcaggtatacgactttgatctcgttggggtcgaacttcggcggcatggtggaggcggctggtgtcggatgaacccggattcgggacgaccgaaggaagttgcaccttggcctcctccgagccgggcagcaggcgcagcccagcctcgaaatgcagaacgacgccggcgagttcgtggacctgtacgtgccgcggaaatgctccgctagcaatcgcatcatcggtgccaaggaccacgcatccatccagatgaacgtggccgaggttgacaaggtcacaggcaggtttaatggccagtttaaaacttatgctatctgcggggccattcgtaggatgggtgagtcagatgattccattctccgattggccaaggccgatggcatcgtctcaaagaacttttgactggagagaatcacagatgtggaatatttgtcataaataaataatgaaaacctaaaaaaaaaaaaaaaaaaaacaaaaaaaaaaaaaaaaaaanaaaaacaacgggggggnntnttgggggggggggaaaaagggngnaaaganaagggcgacagtgggccaaagggggtttcccagagccccagtttttctgtgtgtacaagggggggaaatcggaggggcccccccaaagggacgcggaaatattgcagaaaacccgggtacccggctttgccccgccaaaggc

SEQ ID NO: 360446 - DNA, 394 bp, Homo sapiens
  misc_feature (375)..(375): n is a, c, g, or t
gccgcagtggtgctggattcggtggcagcaggcgcagcccagcctcgaaatgcagaacgacgccggcgagttcgtggacctgtacgtgccgcggaaatgctccgctagcaatcgcatcatcggtgccaaggaccacgcatccatccagatgaacgtggccgaggttgacaaggtcacaggcaggtttaatggccagtttaaaacttatgctatctgcggggccattcgtaggatgggtgagtcagatgattccattctccgattggccaaggccgatggcatcgtctcaaagaacttttgactggagagaatcacagatgtggaatatttgtcataaataaataatgaaaacctaaaaaaagtcgacgcggccgngaatttagtagtagtagtc

SEQ ID NO: 360447 - DNA, 420 bp, Homo sapiens
  misc_feature (16)..(16): n is a, c, g, or t
  misc_feature (24)..(24): n is a, c, g, or t
  misc_feature (401)..(401): n is a, c, g, or t
tactaaattcgcgggngctgcttnttttctctctcgcgcgcggtgtggtggcagcaggcgcagcccagcctcgaaatgcagaacgacgccggcgagttcgtggacctgtacgtgccgcggaaatgctccgctagcaatcgcatcatcggtgccaaggaccacgcatccatccagatgaacgtggccgaggttgacaaggtcacaggcaggtttaatggccagtttaaaacttatgctatctgcggggccattcgtaggatgggtgagtcagatgattccattctccgattggccaaggccgatggcatcgtctcaaagaacttttgactggagagaatcacagatgtggaatatttgtcataaataaataatgaaaacctaaaaaaagtcgacgcggccgngaatttagtagtagtagtc

SEQ ID NO: 360448 - DNA, 879 bp, Homo sapiens
  misc_feature (8)..(8): n is a, c, g, or t
  misc_feature (14)..(14): n is a, c, g, or t
  misc_feature (43)..(43): n is a, c, g, or t
  misc_feature (45)..(45): n is a, c, g, or t
  misc_feature (47)..(49): n is a, c, g, or t
ggcacganctcgtncaattcggcagaggattcggcacgagatncngnnngagcaggcgcaccacaggcgcagcccagcctcgaaatgcagaacgacgccggcgagttcgtggacctgtacgtgccgcggaaatgctccgctagcaatcgcatcatcggtgccaaggaccacgcatccatccagatgaacgtggccgaggttgacaaggtcacaggcaggtttaatggccagtttaaaacttatgctatctgcggggccattcgtaggatggtgagtgtttccctgggctttgctcatcacttcgggacatcgtggactttaccgtgcgcattggagtgtgtgatggtgcctgagtagatctgctggcagagtagtttgagccagctggactgggctggccgcctgccgcttcttgagggtggaagaggggtgctctgagaagacactcaggcagcagactctgcctctcactaggaggtgcccccccgaccccgctccaccatagtcaggctgcaggctgccccgggagaggtggctccccttctgcgcctgtctccattcgctcagcgggggagagacgtgggctggtggcacagctgaccttctgccatctcaggcagccggagtggaaatattcttagtgtgctttttttttttcttaagggtgagtcagatgattccattctccgattggccaaggccgatggcatcgtctcaaagtaaggttgggggctcacatttgggcagagtgagtggactaggactgctccagaggcgtggtcttaacgttgtccttttcccctggttctaggaacttttgactggagagaatcacagatgtggaatatttgtcataaataaataatgaaaacctaaaaa

SEQ ID NO: 360449 - DNA, 303 bp, Homo sapiens
ggactagctgcttcctttctctctcgcgcgcggtgtggtggcagcaggcgcagcccagcctcgaaatgcagaacgacgccggcgagttcgtggacctgtacgtgccgcggaaatgctccgctagcaatcgcatcatcggtgccaaggaccacgcatccatccagatgaacgtggccgagggtgagtcagatgattccattctccgattggccaaggccgatggcatcgtctcaaagaacttttgactggagagaatcacagatgtggaatatttgtcataaataaataatgaaaacctaaaaa

SEQ ID NO: 360450 - DNA, 751 bp, Homo sapiens
  misc_feature (526)..(527): n is a, c, g, or t
  misc_feature (534)..(534): n is a, c, g, or t
  misc_feature (539)..(539): n is a, c, g, or t
  misc_feature (566)..(566): n is a, c, g, or t
  misc_feature (588)..(588): n is a, c, g, or t
  misc_feature (603)..(603): n is a, c, g, or t
  misc_feature (607)..(607): n is a, c, g, or t
  misc_feature (659)..(659): n is a, c, g, or t
  misc_feature (664)..(664): n is a, c, g, or t
ctcgccgaggcccctccttgcccgccgatatctctgccgggtgactagctgcttcctttctctctcgcgcgcggtgtggtggcagcaggcgcacaggcgcagcccagcctcgaaatgcagaacgacgccggcgagttcgtggacctgtacgtgccgcggaaatgctccgctagcaatcgcatcatcggtgccaaggaccacgcatccatccagatgaacgtggccgaggttgacaaggtcacaggcaggtttaatggccagtttaaaacttatgctatctgcggggccattcgtaggatgggtgagtcagatgattccattctccgattggccaaggccgatggcatcgtctcaaagaacttttgactggagagaatcacagatgtggaatatttgtcataaataaataatgaaaacctaaaaaaaaaaaaaaaaaaactcggagactagtttcttcttcttctcttctctcgtcttactttccctccgggtttccccgccgccgccgccgccatcagtgggggannatcgggncactngcaggccgggcagggcgggcaaccaantcgggcgcaagtttggggaggngatcagcgatgagcncggnttcgaccccaggggcacctaccagggggacagcgacctgcagtgggaacgcntcaangtgtctacaatggggccaccgggggcaagtacgtgccccgcgccggctcgtggatctggagccggcacatggactcgcgcgcccggg

SEQ ID NO: 360451 - DNA, 611 bp, Homo sapiens
  misc_feature (12)..(13): n is a, c, g, or t
  misc_feature (18)..(18): n is a, c, g, or t
  misc_feature (20)..(23): n is a, c, g, or t
  misc_feature (29)..(31): n is a, c, g, or t
  misc_feature (419)..(419): n is a, c, g, or t
  misc_feature (436)..(437): n is a, c, g, or t
  misc_feature (439)..(439): n is a, c, g, or t
  misc_feature (461)..(461): n is a, c, g, or t
  misc_feature (463)..(463): n is a, c, g, or t
  misc_feature (469)..(469): n is a, c, g, or t
tgccgggtgacnnagctncnnnngttctnnntcgcgcgcggtgtggtggcagcaggcgcagcccagcctcgaaatgcagaacgacgccggcgagttcgtggacctgtacgtgccgcggaaatgctccgctagcaatcgcatcatcggtgccaaggaccacgcatccatccagatgaacgtggccgaggttgacaaggtcacaggcaggtttaatggccagtttaaaacttatgctatctgcggggccattcgtaggatgggtgagtcagatgattccattctccgattggccaaggccgatggcatcgtctcaaagaacttttgactggagagaatcacagatgtggaatatttgtcataaataaataatgaaaacctaaaaaaaaaaaaaaaaaaaacaaaaaaaaaaaaaaaaaaanaaaaacaacgggggggnntnttgggggggggggaaaaagggngnaaaganaagggcgacagtgggccaaagggggtttcccagagccccagtttttctgtgtgtacaagggggggaaatcggaggggcccccccaaagggacgcggaaatattgcagaaaacccgggtacccggctttgccccgccaaaggc

SEQ ID NO: 360452 - DNA, 434 bp, Homo sapiens
ctcgccgaggcccctccttgcccgccgatatctctgccgggtgactagctgcttcctttctctctcgcgcgcggtgtggtggcagcaggcgcacaggcgcagcccagcctcgaaatgcagaacgacgccggcgagttcgtggacctgtacgtgccgcggaaatgctccgctagcaatcgcatcatcggtgccaaggaccacgcatccatccagatgaacgtggccgaggttgacaaggtcacaggcaggtttaatggccagtttaaaacttatgctatctgcggggccattcgtaggatgggtgagtcagatgattccattctccgattggccaaggccgatggcatcgtctcaaagaacttttgactggatcgcgaccgacctggattcgcgaccgaacctggattcgcgaccgaacctggattcgcgagcga

SEQ ID NO: 360453 - DNA, 860 bp, Homo sapiens
ggactagctgcttcctttctctctcgcgcgcggtgtggtggcagcaggcgcagcccagcctcgaaatgcagaacgacgccggcgagttcgtggacctgtacgtgccgcggaaatgctccgctagcaatcgcatcatcggtgccaaggaccacgcatccatccagatgaacgtggccgaggttgacaaggtcacaggcaggtttaatggccagtttaaaacttatgctatctgcggggccattcgtaggatggtgagtgtttccctgggctttgctcatcacttcgggacatcgtggactttaccgtgcgcattggagtgtgtgatggtgcctgagtagatctgctggcagagtagtttgagccagctggactgggctggccgcctgccgcttcttgagggtggaagaggggtgctctgagaagacactcaggcagcagactctgcctctcactaggaggtgcccccccgaccccgctccaccatagtcaggctgcaggctgccccgggagaggtggctccccttctgcgcctgtctccattcgctcagcgggggagagacgtgggctggtggcacagctgaccttctgccatctcaggcagccggagtggaaatattcttagtgtgctttttttttttcttaagggtgagtcagatgattccattctccgattggccaaggccgatggcatcgtctcaaagtaaggttgggggctcacatttgggcagagtgagtggactaggactgctccagaggcgtggtcttaacgttgtccttttcccctggttctaggaacttttgactggagagaatcacagatgtggaatatttgtcataaataaataatgaaaacctaaaaa

SEQ ID NO: 360454 - DNA, 261 bp, Homo sapiens
ctaactctagactcaaccaactccagaccgccctgcaaaagaccgggtggctctacaaaagtccgtgatcaccagcaactcaaagcatacgcgctgcggacagccaaggtcatattaggactatctcagtatagaaaggatgattggtgctgttaaagcttcaggggtgcagaggtctgttacatggcattgtgaccataactaagaataatgtgtatttaaacattactaaaagaatagattttaaactttctcatcata

SEQ ID NO: 360455 - DNA, 611 bp, Homo sapiens
taaatagaaaaggcaataaggacaaaagttggcaaagcttacctaagcactcttcagataaaaagacatttttgctaactagatttgaatattatagtttaattgtcaaggaaaatgcctcaacttaatctttgttaagagactacttaaggcactatcagaagttccctcatggcaaggtgcaatccctcatgcctgtaatcccagcactttgggaggccaaggcaggcaggttacctgaggccaggagttagaaaacaacctgggaaacatagtgagacccgacctctacaaaaacaatttcttaaaattagccaggcatggtggtgctagcctgtaatcccagctatttaggatgcttaggcaggaggattgcttgagcccggggatttgaggctgcagtgagccatcattgtgccacaatactccagcctgagtgatagaaaaaaaaaaaaaaagtgtctttgttatattccaaacttgttctcaactttcaggtgagctggcttcctgtataactcttgtataggacagaacatactggttggggcaagtgaaactgtctagttgtatgcctcataaattaatgaatttcctttctaatatataca

SEQ ID NO: 360456 - DNA, 5748 bp, Homo sapiens
  misc_feature (524)..(524): n is a, c, g, or t
  misc_feature (2226)..(2226): n is a, c, g, or t
  misc_feature (2569)..(2569): n is a, c, g, or t
  misc_feature (2895)..(2895): n is a, c, g, or t
gcggccgccgccgcgccgtggccctttgtgctggaacaatgaccagctgccgctggccccggggccccggctggggttgagggtgaccaccgccgccgccgcgtcgagccgaaccgagcccccagacacgcagtcacagggcgtcggagggagggctcccgactgccgccgagcagcccctacgtgcgccccggcggattcgcgtgacgcgggtgcttgcgcgtgtccgcgccccggggcggagacgcccctcggaccctcccctgcgcggtgccgcccactcgcaccgggcgggggctggccagggccgggggcgccgcggaggcggaggcggggctgggccgggcagctccgagtggcggcgcgcgggccagggccggggccggggccggggccggagccggagccggggccgggcggcgcgcctgtggagcgctgggggcggcctggggctgagcatggagcagcgcggcggaggtgaggggggccgggtctgggaggcggcctggggagcccccaacttntgcgcggtggaatccagccggggggacggcgttccccagtcgcccccactttctggaaggggggctggactctggagaatgggtcaggggctcctggcttcccgccgcagaatgggaactcgtgatcgcagacttgaccccgcttgactggtccttggagtttgggtgggagggagactttccccaactcttcagatccgtctccggccctgaaccagctccagccctctgctctcctcagcccactaaaaggggggtgctcctgggccagagtgattgctcagggagtgctggggagaatgaggggttcccatctcccacagccacaaacgcatttctcaaaatggagcctccacttgcccctccttctctttcgggctccaagagcgggagccggcctggctgggcctggctttccagactcctggctctggctccctggatgtgtggctctcagggcccggctctgtggcactttggacttatgggccctcggctccgtggggttggggggccctggctcactgggtcccgctggctgtccccttgtcggcctgaccctcgggcctctccgagtctttgtctcttttgggtccctgtctttctctgagcctgtctccttccttcaattttcactttctccgtgctcgctgaagtggggaaatgcaacagaggtgccagcccccttggccccctaagaagtcccttccccactgttcactccacaccctggagtgggcccagagaggggaggggagggggttctctatctgctctgctgggggctggggtgtgtggggtggtctgagccccagccctacagaggggcctgtggtcactccctgctcctggcctacccctcccccagctccccgcagctcctgccccagcgtggacacctcttcctggttcgcagtgtcttttgacttgggtgggaaggagggcggtggatttaatggagggcatgcgagaaagaaggggaacagatcaggcaaaggagttagataatgtcccacctctccccacacgccgaagagagaaggaaacaggctccccccaccaatgggccctcaagccacccaggctcccaccactctcatacctgcgtgcccacgttcacaggctccactgcaccactcaccttcctagtcacacacaaacacaggagctcacacataaactcatgaacttactgacaagtctgtccaggcaccgtctctcccacacaccacaaattcacttgttagatccacatttataactttcacaggctttctaatgacccctgatccacatactcttctaagatatacacatgtgaattcacacatgaactcatatgtatgtgaatgaactgatatatcaaacatgcatagactcacatgatgttttcacacacattttcatacacacgtgttcattttcatgctcctgtgcatgtagtcacacaacaaataactaaatgcacacactcctactcccagtgcaattctctgtccacttcttggccccgctctgcatgatgacttcagcagatgcctaagtcctggtcatcagcggcctcgggactgggactagggagggggttccgggtggaggcttgcagctgcttccaggaaggagcagagcctggggaggtggagccctcttgcctgggctctgtggaagtgaggttttggagcagcctccagaggtgaaggcngggcatctaccttcctcccctcagggttagtttggggaccttctgaagctgtagggtttcagagaggttggcagtggggcagagcctgtggaggctccttcaggccttcaggcctcaccgattgggtgtgcagaggctaggagttgtcatggaaactggtatgagcctgcatccacctctgggaggcaggagaccccaaaggacacctgtggactccctaagagccgcgggtttcttatttagccagatcgacagagaggcagtttagccgcctttctgtctgagagaaactgaggcccagcagagggaggcagggcactgcctggccttggctctttgttcnctaattaccatctgaggtgctgattgcacccctgaggtacctctgcccaaactgccctgtaatgaggccacctggctgagaggaccagggacctgtgcttcaagctggtagagaaggcccctccctcacctgagtcctggcctctgtggaggatgcaggattgggcttgggcctgggtctttgctgccaggtggccctgcggtaatcatccaggcctcccatgcctctcagcatctctgctgagtgaattcactcctcagccctgttcagaccagcattgggcagtgtggtttggggcccagggggaattgagattcattccagcncttgaagggggagtcttggtggggatcagggcttgttactgatgtcaaggaggtgtttggtcaggatcagtgggtcaggaggggtctcaaggtggagggactctgacaccactgccctgcttacaggtcgcctgcgaggccgctggccaggcctgagcctctgccaccatggccattgtgcagactctgccagtgccactggagcctgctcctgaagctgccactgccccacaagctccagtcatgggtagtgtgagcagccttatctcaggccggccctgtcccggggggccagctcctccccgccaccacggccctcctgggcccaccttcttccgccagcaggatggcctgctacggggtggctatgaggcacaggagccgctgtgcccagctgtgccccctaggaaggctgtccctgtcaccagcttcacctacatcaatgaggacttccggacagagtcaccccccagcccaagcagtgatgttgaggatgcccgagagcagcgggcacacaatgcccacctccgcggcccaccaccaaagctcatccctgtctctggaaagctggagaagaacatggagaagatcctgatccgcccaacagccttcaagccagtgctgcccaaacctcgaggggctccgtccctgcctagcttcatgggtcctcgggccaccgggctgtctgggagccagggcagcctgacgcagctgtttgggggccctgcctcctcctcctcctcttcctcctcctcttcagctgctgacaaacccctggcatttagtggctgggccagtggctgcccatcagggacgctatccgactctggccgaaactcactgtccagcctgcccacctacagcaccggaggtgccgagccaaccaccagctccccaggcgggcacctgccttcccatggctctgggcgaggggcactgcctgggccagcccgaggggtccctactgggccctcccactcagacagtggccggtcctcctccagcaagagcacaggctccctagggggccgtgtggctggggggcttttgggcagtggtactcgggcctcccctgacagcagctcctgtggggagcgctcaccaccacccccgcctccacctccttcggatgaggccctgctgcactgtgtcctggaaggaaagctccgagaccgggaggcagagcttcagcagctgcgggacagtctggacgagaatgaggctaccatgtgccaggcatacgaggagcggcagcggcactggcagcgagagcgtgaggccctgcgagaggactgtgcggcccaggcacagcgggcacagcgggcccaacagctgctgcagctgcaggtgttccagctgcagcaggagaagcggcaattgcaggacgacttcgcacagctgctgcaggagcgcgaacagctggagcggcgctgcgccaccttggagcgggagcagcgggagctcgggccgaggcttgaggagaccaagtgggaggtgtgccagaaatcaggcgagatctccctgctgaagcagcagctgaaagagtctcaggcagagctggtgcagaagggcagcgagctggtggctctgcgggtggcgctgcgggaggcccgtgctacgctgcgggtcagtgagggccgtgcgcggggtctacaggaggccgcccgagctcgggagctggagctggaagcctgttcccaggagctgcagcgacaccgccaggaagctgagcagctgcgggagaaagctgggcagttggatgctgaggcggccggactccgggagccccctgtgccacctgccaccgctgacccattcctcctggcagagagtgatgaggccaaagtgcagcgggcagcagccggggttgggggcagcttgcgggcccaggtggagcgattgcgggtggagctgcagcgggagcggcggcggggtgaggagcagcgggacagctttgagggggagcggctggcctggcaggcagagaaggagcaggtgatccgctaccagaagcagctgcagcacaactacatccagatgtaccggcgcaaccggcagctagagcaggagctgcagcagctcagcctggagctggaggcccgggagctcgctgacctgggcctggccgagcaggccccctgcatctgcctggaggagatcactgctactgagatctagggccctcagcaaccagctctgtagggagctctgccagaggggcagcagctgcagatccacttaggccccagggtccacggatggccccaaaggctgagggccccaaagccacttgtctcctaggatccaggcctctgggcttctgccaagaactcagggtggccctatgacttggaggagcaagatcagaccgctcaaaggtccccgtgttcactgttacccagaggctcttgttactacccacttcattccccaccgctgccagtgccactgccaaccctgttcacaggcgcttccagcccactccagccaggggagcagggaagaagaaggggctccctcctcttcacattccccccgaccccaaagccagagaaagccagatggcaccagctgctccggatgtgcctgcccacattgggggacagggccgggcctgggctcggttcccaggtttgagctctgcagcctctctcctggagtgagggggctgaagtcagaccaaaggaagaactcagaaatgtcttgtttatttgtgtttgtgaccaagcagcctctcccttcacccaggtttatggcctcgttttcacttgtatatttttcacactgtaaatttcttgtacaaacccaaagaaaaaattaaaaaaaatttttttgtttaaaaaaaaaaaaaaa

SEQ ID NO: 360457 - DNA, 2849 bp, Homo sapiens
cccagagttcggaacctagagttcggagccggctagggagccggcgttgtcgcggcgaggaggtgggcgcgctggagcaggagcggggccggaagctggagccgaggcgcaggtggcgctgggtcgcctgcgaggccgctggccaggcctgagcctctgccaccatggccattgtgcagactctgccagtgccactggagcctgctcctgaagctgccactgccccacaagctccagtcatgggtagtgtgagcagccttatctcaggccggccctgtcccggggggccagctcctccccgccaccacggccctcctgggcccaccttcttccgccagcaggatggcctgctacggggtggctatgaggcacaggagccgctgtgcccagctgtgccccctaggaaggctgtccctgtcaccagcttcacctacatcaatgaggacttccggacagagtcaccccccagcccaagcagtgatgttgaggatgcccgagagcagcgggcacacaatgcccacctccgcggcccaccaccaaagctcatccctgtctctggaaagctggagaagaacatggagaagatcctgatccgcccaacagccttcaagccagtgctgcccaaacctcgaggggctccgtccctgcctagcttcatgggtcctcgggccaccgggctgtctgggagccagggcagcctgacgcagctgtttgggggccctgcctcctcctcctcctcttcctcctcctcttcagctgctgacaaacccctggcatttagtggctgggccagtggctgcccatcagggacgctatccgactctggccgaaactcactgtccagcctgcccacctacagcaccggaggtgccgagccaaccaccagctccccaggcgggcacctgccttcccatggctctgggcgaggggcactgcctgggccagcccgaggggtccctactgggccctcccactcagacagtggccggtcctcctccagcaagagcacaggctccctagggggccgtgtggctggggggcttttgggcagtggtactcgggcctcccctgacagcagctcctgtggggagcgctcaccaccacccccgcctccacctccttcggatgaggccctgctgcactgtgtcctggaaggaaagctccgagaccgggaggcagagcttcagcagctgcgggacagtctggacgagaatgaggctaccatgtgccaggcatacgaggagcggcagcggcactggcagcgagagcgtgaggccctgcgagaggactgtgcggcccaggcacagcgggcacagcgggcccaacagctgctgcagctgcaggtgttccagctgcagcaggagaagcggcaattgcaggacgacttcgcacagctgctgcaggagcgcgaacagctggagcggcgctgcgccaccttggagcgggagcagcgggagctcgggccgaggcttgaggagaccaagtgggaggtgtgccagaaatcaggcgagatctccctgctgaagcagcagctgaaagagtctcaggcagagctggtgcagaagggcagcgagctggtggctctgcgggtggcgctgcgggaggcccgtgctacgctgcgggtcagtgagggccgtgcgcggggtctacaggaggccgcccgagctcgggagctggagctggaagcctgttcccaggagctgcagcgacaccgccaggaagctgagcagctgcgggagaaagctgggcagttggatgctgaggcggccggactccgggagccccctgtgccacctgccaccgctgacccattcctcctggcagagagtgatgaggccaaagtgcagcgggcagcagccggggttgggggcagcttgcgggcccaggtggagcgattgcgggtggagctgcagcgggagcggcggcggggtgaggagcagcgggacagctttgagggggagcggctggcctggcaggcagagaaggagcaggtgatccgctaccagaagcagctgcagcacaactacatccagatgtaccggcgcaaccggcagctagagcaggagctgcagcagctcagcctggagctggaggcccgggagctcgctgacctgggcctggccgagcaggccccctgcatctgcctggaggagatcactgctactgagatctagggccctcagcaaccagctctgtagggagctctgccagaggggcagcagctgcagatccacttaggccccagggtccacggatggccccaaaggctgagggccccaaagccacttgtctcctaggatccaggcctctgggcttctgccaagaactcagggtggccctatgacttggaggagcaagatcagaccgctcaaaggtccccgtgttcactgttacccagaggctcttgttactacccacttcattccccaccgctgccagtgccactgccaaccctgttcacaggcgcttccagcccactccagccaggggagcagggaagaagaaggggctccctcctcttcacattccccccgaccccaaagccagagaaagccagatggcaccagctgctccggatgtgcctgcccacattgggggacagggccgggcctgggctcggttcccaggtttgagctctgcagcctctctcctggagtgagggggctgaagtcagaccaaaggaagaactcagaaatgtcttgtttatttgtgtttgtgaccaagcagcctctcccttcacccaggtttatggcctcgttttcacttgtatatttttcacactgtaaatttcttgtacaaacccaaagaaaaaattaaaaaaaatttttttgtttaaaaaaaaaaaaaaa

SEQ ID NO: 360458 - DNA, 3204 bp, Homo sapiens
gcggccgccgccgcgccgtggccctttgtgctggaacaatgaccagctgccgctggccccggggccccggctggggttgagggtgaccaccgccgccgccgcgtcgagccgaaccgagcccccagacacgcagtcacagggcgtcggagggagggctcccgactgccgccgagcagcccctacgtgcgccccggcggattcgcgtgacgcgggtgcttgcgcgtgtccgcgccccggggcggagacgcccctcggaccctcccctgcgcggtgccgcccactcgcaccgggcgggggctggccagggccgggggcgccgcggaggcggaggcggggctgggccgggcagctccgagtggcggcgcgcgggccagggccggggccggggccggggccggagccggagccggggccgggcggcgcgcctgtggagcgctgggggcggcctggggctgagcatggagcagcgcggcggaggtcgcctgcgaggccgctggccaggcctgagcctctgccaccatggccattgtgcagactctgccagtgccactggagcctgctcctgaagctgccactgccccacaagctccagtcatgggtagtgtgagcagccttatctcaggccggccctgtcccggggggccagctcctccccgccaccacggccctcctgggcccaccttcttccgccagcaggatggcctgctacggggtggctatgaggcacaggagccgctgtgcccagctgtgccccctaggaaggctgtccctgtcaccagcttcacctacatcaatgaggacttccggacagagtcaccccccagcccaagcagtgatgttgaggatgcccgagagcagcgggcacacaatgcccacctccgcggcccaccaccaaagctcatccctgtctctggaaagctggagaagaacatggagaagatcctgatccgcccaacagccttcaagccagtgctgcccaaacctcgaggggctccgtccctgcctagcttcatgggtcctcgggccaccgggctgtctgggagccagggcagcctgacgcagctgtttgggggccctgcctcctcctcctcctcttcctcctcctcttcagctgctgacaaacccctggcatttagtggctgggccagtggctgcccatcagggacgctatccgactctggccgaaactcactgtccagcctgcccacctacagcaccggaggtgccgagccaaccaccagctccccaggcgggcacctgccttcccatggctctgggcgaggggcactgcctgggccagcccgaggggtccctactgggccctcccactcagacagtggccggtcctcctccagcaagagcacaggctccctagggggccgtgtggctggggggcttttgggcagtggtactcgggcctcccctgacagcagctcctgtggggagcgctcaccaccacccccgcctccacctccttcggatgaggccctgctgcactgtgtcctggaaggaaagctccgagaccgggaggcagagcttcagcagctgcgggacagtctggacgagaatgaggctaccatgtgccaggcatacgaggagcggcagcggcactggcagcgagagcgtgaggccctgcgagaggactgtgcggcccaggcacagcgggcacagcgggcccaacagctgctgcagctgcaggtgttccagctgcagcaggagaagcggcaattgcaggacgacttcgcacagctgctgcaggagcgcgaacagctggagcggcgctgcgccaccttggagcgggagcagcgggagctcgggccgaggcttgaggagaccaagtgggaggtgtgccagaaatcaggcgagatctccctgctgaagcagcagctgaaagagtctcaggcagagctggtgcagaagggcagcgagctggtggctctgcgggtggcgctgcgggaggcccgtgctacgctgcgggtcagtgagggccgtgcgcggggtctacaggaggccgcccgagctcgggagctggagctggaagcctgttcccaggagctgcagcgacaccgccaggaagctgagcagctgcgggagaaagctgggcagttggatgctgaggcggccggactccgggagccccctgtgccacctgccaccgctgacccattcctcctggcagagagtgatgaggccaaagtgcagcgggcagcagccggggttgggggcagcttgcgggcccaggtggagcgattgcgggtggagctgcagcgggagcggcggcggggtgaggagcagcgggacagctttgagggggagcggctggcctggcaggcagagaaggagcaggtgatccgctaccagaagcagctgcagcacaactacatccagatgtaccggcgcaaccggcagctagagcaggagctgcagcagctcagcctggagctggaggcccgggagctcgctgacctgggcctggccgagcaggccccctgcatctgcctggaggagatcactgctactgagatctagggccctcagcaaccagctctgtagggagctctgccagaggggcagcagctgcagatccacttaggccccagggtccacggatggccccaaaggctgagggccccaaagccacttgtctcctaggatccaggcctctgggcttctgccaagaactcagggtggccctatgacttggaggagcaagatcagaccgctcaaaggtccccgtgttcactgttacccagaggctcttgttactacccacttcattccccaccgctgccagtgccactgccaaccctgttcacaggcgcttccagcccactccagccaggggagcagggaagaagaaggggctccctcctcttcacattccccccgaccccaaagccagagaaagccagatggcaccagctgctccggatgtgcctgcccacattgggggacagggccgggcctgggctcggttcccaggtttgagctctgcagcctctctcctggagtgagggggctgaagtcagaccaaaggaagaactcagaaatgtcttgtttatttgtgtttgtgaccaagcagcctctcccttcacccaggtttatggcctcgttttcacttgtatatttttcacactgtaaatttcttgtacaaacccaaagaaaaaattaaaaaaaatttttttgtttaaaaaaaaaaaaaaa

SEQ ID NO: 360459 - DNA, 4419 bp, Homo sapiens
  misc_feature (897)..(897): n is a, c, g, or t
  misc_feature (1240)..(1240): n is a, c, g, or t
  misc_feature (1566)..(1566): n is a, c, g, or t
aaaaggtacagtcaggggaaaatagatctaggcagagtgccttagtcagggaccacgggcgctgaatctgcagtgccaacaccaaactgacacatctccaggtgtacctccaaccctagccttctcccacagctgcctacaacagagtctcccagccttctcagagagctaaaaccagaaatttccagactcatgaaagcaaccccccagcctctccccacacgccgaagagagaaggaaacaggctccccccaccaatgggccctcaagccacccaggctcccaccactctcatacctgcgtgcccacgttcacaggctccactgcaccactcaccttcctagtcacacacaaacacaggagctcacacataaactcatgaacttactgacaagtctgtccaggcaccgtctctcccacacaccacaaattcacttgttagatccacatttataactttcacaggctttctaatgacccctgatccacatactcttctaagatatacacatgtgaattcacacatgaactcatatgtatgtgaatgaactgatatatcaaacatgcatagactcacatgatgttttcacacacattttcatacacacgtgttcattttcatgctcctgtgcatgtagtcacacaacaaataactaaatgcacacactcctactcccagtgcaattctctgtccacttcttggccccgctctgcatgatgacttcagcagatgcctaagtcctggtcatcagcggcctcgggactgggactagggagggggttccgggtggaggcttgcagctgcttccaggaaggagcagagcctggggaggtggagccctcttgcctgggctctgtggaagtgaggttttggagcagcctccagaggtgaaggcngggcatctaccttcctcccctcagggttagtttggggaccttctgaagctgtagggtttcagagaggttggcagtggggcagagcctgtggaggctccttcaggccttcaggcctcaccgattgggtgtgcagaggctaggagttgtcatggaaactggtatgagcctgcatccacctctgggaggcaggagaccccaaaggacacctgtggactccctaagagccgcgggtttcttatttagccagatcgacagagaggcagtttagccgcctttctgtctgagagaaactgaggcccagcagagggaggcagggcactgcctggccttggctctttgttcnctaattaccatctgaggtgctgattgcacccctgaggtacctctgcccaaactgccctgtaatgaggccacctggctgagaggaccagggacctgtgcttcaagctggtagagaaggcccctccctcacctgagtcctggcctctgtggaggatgcaggattgggcttgggcctgggtctttgctgccaggtggccctgcggtaatcatccaggcctcccatgcctctcagcatctctgctgagtgaattcactcctcagccctgttcagaccagcattgggcagtgtggtttggggcccagggggaattgagattcattccagcncttgaagggggagtcttggtggggatcagggcttgttactgatgtcaaggaggtgtttggtcaggatcagtgggtcaggaggggtctcaaggtggagggactctgacaccactgccctgcttacaggtcgcctgcgaggccgctggccaggcctgagcctctgccaccatggccattgtgcagactctgccagtgccactggagcctgctcctgaagctgccactgccccacaagctccagtcatgggtagtgtgagcagccttatctcaggccggccctgtcccggggggccagctcctccccgccaccacggccctcctgggcccaccttcttccgccagcaggatggcctgctacggggtggctatgaggcacaggagccgctgtgcccagctgtgccccctaggaaggctgtccctgtcaccagcttcacctacatcaatgaggacttccggacagagtcaccccccagcccaagcagtgatgttgaggatgcccgagagcagcgggcacacaatgcccacctccgcggcccaccaccaaagctcatccctgtctctggaaagctggagaagaacatggagaagatcctgatccgcccaacagccttcaagccagtgctgcccaaacctcgaggggctccgtccctgcctagcttcatgggtcctcgggccaccgggctgtctgggagccagggcagcctgacgcagctgtttgggggccctgcctcctcctcctcctcttcctcctcctcttcagctgctgacaaacccctggcatttagtggctgggccagtggctgcccatcagggacgctatccgactctggccgaaactcactgtccagcctgcccacctacagcaccggaggtgccgagccaaccaccagctccccaggcgggcacctgccttcccatggctctgggcgaggggcactgcctgggccagcccgaggggtccctactgggccctcccactcagacagtggccggtcctcctccagcaagagcacaggctccctagggggccgtgtggctggggggcttttgggcagtggtactcgggcctcccctgacagcagctcctgtggggagcgctcaccaccacccccgcctccacctccttcggatgaggccctgctgcactgtgtcctggaaggaaagctccgagaccgggaggcagagcttcagcagctgcgggacagtctggacgagaatgaggctaccatgtgccaggcatacgaggagcggcagcggcactggcagcgagagcgtgaggccctgcgagaggactgtgcggcccaggcacagcgggcacagcgggcccaacagctgctgcagctgcaggtgttccagctgcagcaggagaagcggcaattgcaggacgacttcgcacagctgctgcaggagcgcgaacagctggagcggcgctgcgccaccttggagcgggagcagcgggagctcgggccgaggcttgaggagaccaagtgggaggtgtgccagaaatcaggcgagatctccctgctgaagcagcagctgaaagagtctcaggcagagctggtgcagaagggcagcgagctggtggctctgcgggtggcgctgcgggaggcccgtgctacgctgcgggtcagtgagggccgtgcgcggggtctacaggaggccgcccgagctcgggagctggagctggaagcctgttcccaggagctgcagcgacaccgccaggaagctgagcagctgcgggagaaagctgggcagttggatgctgaggcggccggactccgggagccccctgtgccacctgccaccgctgacccattcctcctggcagagagtgatgaggccaaagtgcagcgggcagcagccggggttgggggcagcttgcgggcccaggtggagcgattgcgggtggagctgcagcgggagcggcggcggggtgaggagcagcgggacagctttgagggggagcggctggcctggcaggcagagaaggagcaggtgatccgctaccagaagcagctgcagcacaactacatccagatgtaccggcgcaaccggcagctagagcaggagctgcagcagctcagcctggagctggaggcccgggagctcgctgacctgggcctggccgagcaggccccctgcatctgcctggaggagatcactgctactgagatctagggccctcagcaaccagctctgtagggagctctgccagaggggcagcagctgcagatccacttaggccccagggtccacggatggccccaaaggctgagggccccaaagccacttgtctcctaggatccaggcctctgggcttctgccaagaactcagggtggccctatgacttggaggagcaagatcagaccgctcaaaggtccccgtgttcactgttacccagaggctcttgttactacccacttcattccccaccgctgccagtgccactgccaaccctgttcacaggcgcttccagcccactccagccaggggagcagggaagaagaaggggctccctcctcttcacattccccccgaccccaaagccagagaaagccagatggcaccagctgctccggatgtgcctgcccacattgggggacagggccgggcctgggctcggttcccaggtttgagctctgcagcctctctcctggagtgagggggctgaagtcagaccaaaggaagaactcagaaatgtcttgtttatttgtgtttgtgaccaagcagcctctcccttcacccaggtttatggcctcgttttcacttgtatatttttcacactgtaaatttcttgtacaaacccaaagaaaaaattaaaaaaaatttttttgtttaaaaaaaaaaaaaaa

SEQ ID NO: 360460 - DNA, 2781 bp, Homo sapiens
acctactctagggagggggctgtgctggttctgcctgggcagccccacgctgaggtcgcctgcgaggccgctggccaggcctgagcctctgccaccatggccattgtgcagactctgccagtgccactggagcctgctcctgaagctgccactgccccacaagctccagtcatgggtagtgtgagcagccttatctcaggccggccctgtcccggggggccagctcctccccgccaccacggccctcctgggcccaccttcttccgccagcaggatggcctgctacggggtggctatgaggcacaggagccgctgtgcccagctgtgccccctaggaaggctgtccctgtcaccagcttcacctacatcaatgaggacttccggacagagtcaccccccagcccaagcagtgatgttgaggatgcccgagagcagcgggcacacaatgcccacctccgcggcccaccaccaaagctcatccctgtctctggaaagctggagaagaacatggagaagatcctgatccgcccaacagccttcaagccagtgctgcccaaacctcgaggggctccgtccctgcctagcttcatgggtcctcgggccaccgggctgtctgggagccagggcagcctgacgcagctgtttgggggccctgcctcctcctcctcctcttcctcctcctcttcagctgctgacaaacccctggcatttagtggctgggccagtggctgcccatcagggacgctatccgactctggccgaaactcactgtccagcctgcccacctacagcaccggaggtgccgagccaaccaccagctccccaggcgggcacctgccttcccatggctctgggcgaggggcactgcctgggccagcccgaggggtccctactgggccctcccactcagacagtggccggtcctcctccagcaagagcacaggctccctagggggccgtgtggctggggggcttttgggcagtggtactcgggcctcccctgacagcagctcctgtggggagcgctcaccaccacccccgcctccacctccttcggatgaggccctgctgcactgtgtcctggaaggaaagctccgagaccgggaggcagagcttcagcagctgcgggacagtctggacgagaatgaggctaccatgtgccaggcatacgaggagcggcagcggcactggcagcgagagcgtgaggccctgcgagaggactgtgcggcccaggcacagcgggcacagcgggcccaacagctgctgcagctgcaggtgttccagctgcagcaggagaagcggcaattgcaggacgacttcgcacagctgctgcaggagcgcgaacagctggagcggcgctgcgccaccttggagcgggagcagcgggagctcgggccgaggcttgaggagaccaagtgggaggtgtgccagaaatcaggcgagatctccctgctgaagcagcagctgaaagagtctcaggcagagctggtgcagaagggcagcgagctggtggctctgcgggtggcgctgcgggaggcccgtgctacgctgcgggtcagtgagggccgtgcgcggggtctacaggaggccgcccgagctcgggagctggagctggaagcctgttcccaggagctgcagcgacaccgccaggaagctgagcagctgcgggagaaagctgggcagttggatgctgaggcggccggactccgggagccccctgtgccacctgccaccgctgacccattcctcctggcagagagtgatgaggccaaagtgcagcgggcagcagccggggttgggggcagcttgcgggcccaggtggagcgattgcgggtggagctgcagcgggagcggcggcggggtgaggagcagcgggacagctttgagggggagcggctggcctggcaggcagagaaggagcaggtgatccgctaccagaagcagctgcagcacaactacatccagatgtaccggcgcaaccggcagctagagcaggagctgcagcagctcagcctggagctggaggcccgggagctcgctgacctgggcctggccgagcaggccccctgcatctgcctggaggagatcactgctactgagatctagggccctcagcaaccagctctgtagggagctctgccagaggggcagcagctgcagatccacttaggccccagggtccacggatggccccaaaggctgagggccccaaagccacttgtctcctaggatccaggcctctgggcttctgccaagaactcagggtggccctatgacttggaggagcaagatcagaccgctcaaaggtccccgtgttcactgttacccagaggctcttgttactacccacttcattccccaccgctgccagtgccactgccaaccctgttcacaggcgcttccagcccactccagccaggggagcagggaagaagaaggggctccctcctcttcacattccccccgaccccaaagccagagaaagccagatggcaccagctgctccggatgtgcctgcccacattgggggacagggccgggcctgggctcggttcccaggtttgagctctgcagcctctctcctggagtgagggggctgaagtcagaccaaaggaagaactcagaaatgtcttgtttatttgtgtttgtgaccaagcagcctctcccttcacccaggtttatggcctcgttttcacttgtatatttttcacactgtaaatttcttgtacaaacccaaagaaaaaattaaaaaaaatttttttgtttaaaaaaaaaaaaaaa

SEQ ID NO: 360461 - DNA, 2112 bp, Homo sapiens
gctgggattacaggcgtgagccactgcacccggccaagtgcttgctttttttattttttgagacaaggtctcattctgtcacccaggctagagagcagtggcgtgatttcagctccctgtagcctcaaccccctgggctcaagcagtcctctcaccccagcctcccaagtagctgagactacaggcgcatgccaccacaccaagctaatttttggtctttggagaggcagggttttgctgtgttgcctaggctggtctcgaactccggagcttaagtgatccacccacctcgcgtgagccaccgagcccggtctgcttgctcttgtgtttgtttctatgatcatcataaaagcagttagtattgttgttgcaattactattgttgtttaatggaatccacccttcctgagccctcggaagtgggctgccagagcagacactgagtggggagttgggaaaactgcccaggagccaggtctctcttctcgcctgcaggcatacgaggagcggcagcggcactggcagcgagagcgtgaggccctgcgagaggactgtgcggcccaggcacagcgggcacagcgggcccaacagctgctgcagctgcaggtgttccagctgcagcaggagaagcggcaattgcaggacgacttcgcacagctgctgcaggagcgcgaacagctggagcggcgctgcgccaccttggagcgggagcagcgggagctcgggccgaggcttgaggagaccaagtgggaggtgtgccagaaatcaggcgagatctccctgctgaagcagcagctgaaagagtctcaggcagagctggtgcagaagggcagcgagctggtggctctgcgggtggcgctgcgggaggcccgtgctacgctgcgggtcagtgagggccgtgcgcggggtctacaggaggccgcccgagctcgggagctggagctggaagcctgttcccaggagctgcagcgacaccgccaggaagctgagcagctgcgggagaaagctgggcagttggatgctgaggcggccggactccgggagccccctgtgccacctgccaccgctgacccattcctcctggcagagagtgatgaggccaaagtgcagcgggcagcagccggggttgggggcagcttgcgggcccaggtggagcgattgcgggtggagctgcagcgggagcggcggcggggtgaggagcagcgggacagctttgagggggagcggctggcctggcaggcagagaaggagcaggtgatccgctaccagaagcagctgcagcacaactacatccagatgtaccggcgcaaccggcagctagagcaggagctgcagcagctcagcctggagctggaggcccgggagctcgctgacctgggcctggccgagcaggccccctgcatctgcctggaggagatcactgctactgagatctagggccctcagcaaccagctctgtagggagctctgccagaggggcagcagctgcagatccacttaggccccagggtccacggatggccccaaaggctgagggccccaaagccacttgtctcctaggatccaggcctctgggcttctgccaagaactcagggtggccctatgacttggaggagcaagatcagaccgctcaaaggtccccgtgttcactgttacccagaggctcttgttactacccacttcattccccaccgctgccagtgccactgccaaccctgttcacaggcgcttccagcccactccagccaggggagcagggaagaagaaggggctccctcctcttcacattccccccgaccccaaagccagagaaagccagatggcaccagctgctccggatgtgcctgcccacattgggggacagggccgggcctgggctcggttcccaggtttgagctctgcagcctctctcctggagtgagggggctgaagtcagaccaaaggaagaactcagaaatgtcttgtttatttgtgtttgtgaccaagcagcctctcccttcacccaggtttatggcctcgttttcacttgtatatttttcacactgtaaatttcttgtacaaacccaaagaaaaaattaaaaaaaatttttttgtttaaaaaaaaaaaaaaa

SEQ ID NO: 360462 - DNA, 2953 bp, Homo sapiens
gcggccgccgccgcgccgtggccctttgtgctggaacaatgaccagctgccgctggccccggggccccggctggggttgagggtgaccaccgccgccgccgcgtcgagccgaaccgagcccccagacacgcagtcacagggcgtcggagggagggctcccgactgccgccgagcagcccctacgtgcgccccggcggattcgcgtgacgcgggtgcttgcgcgtgtccgcgccccggggcggagacgcccctcggaccctcccctgcgcggtgccgcccactcgcaccgggcgggggctggccagggccgggggcgccgcggaggcggaggcggggctgggccgggcagctccgagtggcggcgcgcgggccagggccggggccggggccggggccggagccggagccggggccgggcggcgcgcctgtggagcgctgggggcggcctggggctgagcatggagcagcgcggcggaggtcgcctgcgaggccgctggccaggcctgagcctctgccaccatggccattgtgcagactctgccagtgccactggagcctgctcctgaagctgccactgccccacaagctccagtcatgggtagtgtgagcagccttatctcaggccggccctgtcccggggggccagctcctccccgccaccacggccctcctgggcccaccttcttccgccagcaggatggcctgctacggggtggctatgaggcacaggagccgctgtgcccagctgtgccccctaggaaggctgtccctgtcaccagcttcacctacatcaatgaggacttccggacagagtcaccccccagcccaagcagtgatgttgaggatgcccgagagcagcgggcacacaatgcccacctccgcggcccaccaccaaagctcatccctgtctctggaaagctggagaagaacatggagaagatcctgatccgcccaacagccttcaagccagtgctgcccaaacctcgaggggctccgtccctgcctagcttcatgggtcctcgggccaccgggctgtctgggagccagggcagcctgacgcagctgtttgggggccctgcctcctcctcctcctcttcctcctcctcttcagctgctgacaaacccctggcatttagtggctgggccagtggctgcccatcagggacgctatccgactctggccgaaactcactgtccagcctgcccacctacagcaccggaggtgccgagccaaccaccagctccccaggcgggcacctgccttcccatggctctgggcgaggggcactgcctgggccagcccgaggggtccctactgggccctcccactcagacagtggccggtcctcctccagcaagagcacaggctccctagggggccgtgtggctggggggcttttgggcagtggtactcgggcctcccctgacagcagctcctgtggggagcgctcaccaccacccccgcctccacctccttcggatgaggccctgctgcactgtgtcctggaaggaaagctccgagaccgggaggcagagcttcagcagctgcgggacagtctggacgagaatgaggctaccatgtgccaggcatacgaggagcggcagcggcactggcagcgagagcgtgaggccctgcgagaggactgtgcggcccaggcacagcgggcacagcgggcccaacagctgctgcagctgcaggtgttccagctgcagcaggagaagcggcaattgcaggacgacttcgcacagctgctgcaggagcgcgaacagctggagcggcgctgcgccaccttggagcgggagcagcgggagctcgggccgaggcttgaggagaccaagtgggaggtgtgccagaaatcaggcgagatctccctgctgaagcagcagctgaaagagtctcaggcagagtgacccattcctcctggcagagagtgatgaggccaaagtgcagcgggcagcagccggggttgggggcagcttgcgggcccaggtggagcgattgcgggtggagctgcagcgggagcggcggcggggtgaggagcagcgggacagctttgagggggagcggctggcctggcaggcagagaaggagcaggtgatccgctaccagaagcagctgcagcacaactacatccagatgtaccggcgcaaccggcagctagagcaggagctgcagcagctcagcctggagctggaggcccgggagctcgctgacctgggcctggccgagcaggccccctgcatctgcctggaggagatcactgctactgagatctagggccctcagcaaccagctctgtagggagctctgccagaggggcagcagctgcagatccacttaggccccagggtccacggatggccccaaaggctgagggccccaaagccacttgtctcctaggatccaggcctctgggcttctgccaagaactcagggtggccctatgacttggaggagcaagatcagaccgctcaaaggtccccgtgttcactgttacccagaggctcttgttactacccacttcattccccaccgctgccagtgccactgccaaccctgttcacaggcgcttccagcccactccagccaggggagcagggaagaagaaggggctccctcctcttcacattccccccgaccccaaagccagagaaagccagatggcaccagctgctccggatgtgcctgcccacattgggggacagggccgggcctgggctcggttcccaggtttgagctctgcagcctctctcctggagtgagggggctgaagtcagaccaaaggaagaactcagaaatgtcttgtttatttgtgtttgtgaccaagcagcctctcccttcacccaggtttatggcctcgttttcacttgtatatttttcacactgtaaatttcttgtacaaacccaaagaaaaaattaaaaaaaatttttttgtttaaaaaaaaaaaaaaa

SEQ ID NO: 360463 - DNA, 3576 bp, Homo sapiens
  misc_feature (897)..(897): n is a, c, g, or t
  misc_feature (1240)..(1240): n is a, c, g, or t
  misc_feature (1566)..(1566): n is a, c, g, or t
aaaaggtacagtcaggggaaaatagatctaggcagagtgccttagtcagggaccacgggcgctgaatctgcagtgccaacaccaaactgacacatctccaggtgtacctccaaccctagccttctcccacagctgcctacaacagagtctcccagccttctcagagagctaaaaccagaaatttccagactcatgaaagcaaccccccagcctctccccacacgccgaagagagaaggaaacaggctccccccaccaatgggccctcaagccacccaggctcccaccactctcatacctgcgtgcccacgttcacaggctccactgcaccactcaccttcctagtcacacacaaacacaggagctcacacataaactcatgaacttactgacaagtctgtccaggcaccgtctctcccacacaccacaaattcacttgttagatccacatttataactttcacaggctttctaatgacccctgatccacatactcttctaagatatacacatgtgaattcacacatgaactcatatgtatgtgaatgaactgatatatcaaacatgcatagactcacatgatgttttcacacacattttcatacacacgtgttcattttcatgctcctgtgcatgtagtcacacaacaaataactaaatgcacacactcctactcccagtgcaattctctgtccacttcttggccccgctctgcatgatgacttcagcagatgcctaagtcctggtcatcagcggcctcgggactgggactagggagggggttccgggtggaggcttgcagctgcttccaggaaggagcagagcctggggaggtggagccctcttgcctgggctctgtggaagtgaggttttggagcagcctccagaggtgaaggcngggcatctaccttcctcccctcagggttagtttggggaccttctgaagctgtagggtttcagagaggttggcagtggggcagagcctgtggaggctccttcaggccttcaggcctcaccgattgggtgtgcagaggctaggagttgtcatggaaactggtatgagcctgcatccacctctgggaggcaggagaccccaaaggacacctgtggactccctaagagccgcgggtttcttatttagccagatcgacagagaggcagtttagccgcctttctgtctgagagaaactgaggcccagcagagggaggcagggcactgcctggccttggctctttgttcnctaattaccatctgaggtgctgattgcacccctgaggtacctctgcccaaactgccctgtaatgaggccacctggctgagaggaccagggacctgtgcttcaagctggtagagaaggcccctccctcacctgagtcctggcctctgtggaggatgcaggattgggcttgggcctgggtctttgctgccaggtggccctgcggtaatcatccaggcctcccatgcctctcagcatctctgctgagtgaattcactcctcagccctgttcagaccagcattgggcagtgtggtttggggcccagggggaattgagattcattccagcncttgaagggggagtcttggtggggatcagggcttgttactgatgtcaaggaggtgtttggtcaggatcagtgggtcaggaggggtctcaaggtggagggactctgacaccactgccctgcttacaggtcgcctgcgaggccgctggccaggcctgagcctctgccaccatggccattgtgcagactctgccagtgccactggagcctgctcctgaagctgccactgccccacaagctccagtcatgggtagtgtgagcagccttatctcaggccggccctgtcccggggggccagctcctccccgccaccacggccctcctgggcccaccttcttccgccagcaggatggcctgctacggggtggctatgaggcacaggagccgctgtgcccagctgtgccccctaggaaggctgtccctgtcaccagcttcacctacatcaatgaggacttccggacagagtcaccccccagcccaagcagtgatgttgaggatgcccgagagcagcgggcacacaatgcccacctccgcggcccaccaccaaagctcatccctgtctctggaaagctggagaagctggagcggcgctgcgccaccttggagcgggagcagcgggagctcgggccgaggcttgaggagaccaagtgggaggtgtgccagaaatcaggcgagatctccctgctgaagcagcagctgaaagagtctcaggcagagctggtgcagaagggcagcgagctggtggctctgcgggtggcgctgcgggaggcccgtgctacgctgcgggtcagtgagggccgtgcgcggggtctacaggaggccgcccgagctcgggagctggagctggaagcctgttcccaggagctgcagcgacaccgccaggaagctgagcagctgcgggagaaagctgggcagttggatgctgaggcggccggactccgggagccccctgtgccacctgccaccgctgacccattcctcctggcagagagtgatgaggccaaagtgcagcgggcagcagccggggttgggggcagcttgcgggcccaggtggagcgattgcgggtggagctgcagcgggagcggcggcggggtgaggagcagcgggacagctttgagggggagcggctggcctggcaggcagagaaggagcaggtgatccgctaccagaagcagctgcagcacaactacatccagatgtaccggcgcaaccggcagctagagcaggagctgcagcagctcagcctggagctggaggcccgggagctcgctgacctgggcctggccgagcaggccccctgcatctgcctggaggagatcactgctactgagatctagggccctcagcaaccagctctgtagggagctctgccagaggggcagcagctgcagatccacttaggccccagggtccacggatggccccaaaggctgagggccccaaagccacttgtctcctaggatccaggcctctgggcttctgccaagaactcagggtggccctatgacttggaggagcaagatcagaccgctcaaaggtccccgtgttcactgttacccagaggctcttgttactacccacttcattccccaccgctgccagtgccactgccaaccctgttcacaggcgcttccagcccactccagccaggggagcagggaagaagaaggggctccctcctcttcacattccccccgaccccaaagccagagaaagccagatggcaccagctgctccggatgtgcctgcccacattgggggacagggccgggcctgggctcggttcccaggtttgagctctgcagcctctctcctggagtgagggggctgaagtcagaccaaaggaagaactcagaaatgtcttgtttatttgtgtttgtgaccaagcagcctctcccttcacccaggtttatggcctcgttttcacttgtatatttttcacactgtaaatttcttgtacaaacccaaagaaaaaattaaaaaaaatttttttgtttaaaaaaaaaaaaaaa

SEQ ID NO: 360464 - DNA, 3267 bp, Homo sapiens
  misc_feature (897)..(897): n is a, c, g, or t
  misc_feature (1240)..(1240): n is a, c, g, or t
  misc_feature (1566)..(1566): n is a, c, g, or t
aaaaggtacagtcaggggaaaatagatctaggcagagtgccttagtcagggaccacgggcgctgaatctgcagtgccaacaccaaactgacacatctccaggtgtacctccaaccctagccttctcccacagctgcctacaacagagtctcccagccttctcagagagctaaaaccagaaatttccagactcatgaaagcaaccccccagcctctccccacacgccgaagagagaaggaaacaggctccccccaccaatgggccctcaagccacccaggctcccaccactctcatacctgcgtgcccacgttcacaggctccactgcaccactcaccttcctagtcacacacaaacacaggagctcacacataaactcatgaacttactgacaagtctgtccaggcaccgtctctcccacacaccacaaattcacttgttagatccacatttataactttcacaggctttctaatgacccctgatccacatactcttctaagatatacacatgtgaattcacacatgaactcatatgtatgtgaatgaactgatatatcaaacatgcatagactcacatgatgttttcacacacattttcatacacacgtgttcattttcatgctcctgtgcatgtagtcacacaacaaataactaaatgcacacactcctactcccagtgcaattctctgtccacttcttggccccgctctgcatgatgacttcagcagatgcctaagtcctggtcatcagcggcctcgggactgggactagggagggggttccgggtggaggcttgcagctgcttccaggaaggagcagagcctggggaggtggagccctcttgcctgggctctgtggaagtgaggttttggagcagcctccagaggtgaaggcngggcatctaccttcctcccctcagggttagtttggggaccttctgaagctgtagggtttcagagaggttggcagtggggcagagcctgtggaggctccttcaggccttcaggcctcaccgattgggtgtgcagaggctaggagttgtcatggaaactggtatgagcctgcatccacctctgggaggcaggagaccccaaaggacacctgtggactccctaagagccgcgggtttcttatttagccagatcgacagagaggcagtttagccgcctttctgtctgagagaaactgaggcccagcagagggaggcagggcactgcctggccttggctctttgttcnctaattaccatctgaggtgctgattgcacccctgaggtacctctgcccaaactgccctgtaatgaggccacctggctgagaggaccagggacctgtgcttcaagctggtagagaaggcccctccctcacctgagtcctggcctctgtggaggatgcaggattgggcttgggcctgggtctttgctgccaggtggccctgcggtaatcatccaggcctcccatgcctctcagcatctctgctgagtgaattcactcctcagccctgttcagaccagcattgggcagtgtggtttggggcccagggggaattgagattcattccagcncttgaagggggagtcttggtggggatcagggcttgttactgatgtcaaggaggtgtttggtcaggatcagtgggtcaggaggggtctcaaggtggagggactctgacaccactgccctgcttacaggtcgcctgcgaggccgctggccaggcctgagcctctgccaccatggccattgtgcagactctgccagtgccactggagcctgctcctgaagctgccactgccccacaagctccagtcatgggtagtgtgagcagccttatctcaggccggccctgtcccggggggccagctcctccccgccaccacggccctcctgggcccaccttcttccgccagcaggatggcctgctacggggtggctatgaggcacaggagccgctgtgcccagctgtgccccctaggaaggctgtccctgtcaccagcttcacctacatcaatgaggacttccggacagagtcaccccccagcccaagcagtgatgttgaggatgcccgagagcagcgggcacacaatgcccacctccgcggcccaccaccaaagctcatccctgtctctggaaagctggagaagaacatggagaagatcctgatccgcccaacagccttcaagccagtgctgcccaaacctcgaggggctccgtccctgcctagcttcatgggtcctcgggccaccgggctgtctgggagccagggcagcctgacgcagctgtttgggggccctgcctcctcctcctcctcttcctcctcctcttcactgcagcgggagcggcggcggggtgaggagcagcgggacagctttgagggggagcggctggcctggcaggcagagaaggagcaggtgatccgctaccagaagcagctgcagcacaactacatccagatgtaccggcgcaaccggcagctagagcaggagctgcagcagctcagcctggagctggaggcccgggagctcgctgacctgggcctggccgagcaggccccctgcatctgcctggaggagatcactgctactgagatctagggccctcagcaaccagctctgtagggagctctgccagaggggcagcagctgcagatccacttaggccccagggtccacggatggccccaaaggctgagggccccaaagccacttgtctcctaggatccaggcctctgggcttctgccaagaactcagggtggccctatgacttggaggagcaagatcagaccgctcaaaggtccccgtgttcactgttacccagaggctcttgttactacccacttcattccccaccgctgccagtgccactgccaaccctgttcacaggcgcttccagcccactccagccaggggagcagggaagaagaaggggctccctcctcttcacattccccccgaccccaaagccagagaaagccagatggcaccagctgctccggatgtgcctgcccacattgggggacagggccgggcctgggctcggttcccaggtttgagctctgcagcctctctcctggagtgagggggctgaagtcagaccaaaggaagaactcagaaatgtcttgtttatttgtgtttgtgaccaagcagcctctcccttcacccaggtttatggcctcgttttcacttgtatatttttcacactgtaaatttcttgtacaaacccaaagaaaaaattaaaaaaaatttttttgtttaaaaaaaaaaaaaaa

SEQ ID NO: 360465 - DNA, 1744 bp, Homo sapiens
gcggccgccgccgcgccgtggccctttgtgctggaacaatgaccagctgccgctggccccggggccccggctggggttgagggtgaccaccgccgccgccgcgtcgagccgaaccgagcccccagacacgcagtcacagggcgtcggagggagggctcccgactgccgccgagcagcccctacgtgcgccccggcggattcgcgtgacgcgggtgcttgcgcgtgtccgcgccccggggcggagacgcccctcggaccctcccctgcgcggtgccgcccactcgcaccgggcgggggctggccagggccgggggcgccgcggaggcggaggcggggctgggccgggcagctccgagtggcggcgcgcgggccagggccggggccggggccggggccggagccggagccggggccgggcggcgcgcctgtggagcgctgggggcggcctggggctgagcatggagcagcgcggcggaggtcgcctgcgaggccgctggccaggcctgagcctctgccaccatggccattgtgcagactctgccagtgccactggagcctgctcctgaagctgccactgccccacaagctccagtcatgggtagtgtgagcagccttatctcaggccggccctgtcccggggggccagctcctccccgccaccacggccctcctgggcccaccttcttccgccagcaggatggcctgctacggggtggctatgaggcacaggagccgctgtgcccagctgtgccccctaggaaggctgtccctgtcaccagcttcacctacatcaatgaggacttccggacagagtcaccccccagcccaagcagtgatgttgaggatgcccgagagcagcgggcacacaatgcccacctccgcggcccaccaccaaagctcatccctgtctctggaaagctggagaagaacatggagaagatcctgatccgcccaacagccttcaagccagtgctgcccaaacctcgaggggctccgtccctgcctagcttcatgggtcctcgggccaccgggctgtctgggagccagggcagcctgacgcagctgtttgggggccctgcctcctcctcctcctcttcctcctcctcttcagctgctgacaaacccctggcatttagtggctgggccagtggctgcccatcagggacgctatccgactctggccgaaactcactgtccagcctgcccacctacagcaccggaggtgccgagccaaccaccagctccccaggcgggcacctgccttcccatggctctgggcgaggggcactgcctgggccagcccgaggggtccctactgggccctcccactcagacaccactgccaaccctgttcacaggcgcttccagcccactccagccaggggagcagggaagaagaaggggctccctcctcttcacattccccccgaccccaaagccagagaaagccagatggcaccagctgctccggatgtgcctgcccacattgggggacagggccgggcctgggctcggttcccaggtttgagctctgcagcctctctcctggagtgagggggctgaagtcagaccaaaggaagaactcagaaatgtcttgtttatttgtgtttgtgaccaagcagcctctcccttcacccaggtttatggcctcgttttcacttgtatatttttcacactgtaaatttcttgtacaaacccaaagaaaaaattaaaaaaaatttttttgtttaaaaaaaaaaaaaaa

SEQ ID NO: 360466 - DNA, 2661 bp, Homo sapiens
gcggccgccgccgcgccgtggccctttgtgctggaacaatgaccagctgccgctggccccggggccccggctggggttgagggtgaccaccgccgccgccgcgtcgagccgaaccgagcccccagacacgcagtcacagggcgtcggagggagggctcccgactgccgccgagcagcccctacgtgcgccccggcggattcgcgtgacgcgggtgcttgcgcgtgtccgcgccccggggcggagacgcccctcggaccctcccctgcgcggtgccgcccactcgcaccgggcgggggctggccagggccgggggcgccgcggaggcggaggcggggctgggccgggcagctccgagtggcggcgcgcgggccagggccggggccggggccggggccggagccggagccggggccgggcggcgcgcctgtggagcgctgggggcggcctggggctgagcatggagcagcgcggcggaggtcgcctgcgaggccgctggccaggcctgagcctctgccaccatggccattgtgcagactctgccagtgccactggagcctgctcctgaagctgccactgccccacaagctccagtcatgggtagtgtgagcagccttatctcaggccggccctgtcccggggggccagctcctccccgccaccacggccctcctgggcccaccttcttccgccagcaggatggcctgctacggggtggctatgaggcacaggagccgctgtgcccagctgtgccccctaggaaggctgtccctgtcaccagcttcacctacatcaatgaggacttccggacagagtcaccccccagcccaagcagtgatgttgaggatgcccgagagcagcgggcacacaatgcccacctccgcggcccaccaccaaagctcatccctgtctctggaaagctggagaagaacatggagaagatcctgatccgcccaacagccttcaagccagtgctgcccaaacctcgaggggctccgtccctgcctagcttcatgggtcctcgggccaccgggctgtctgggagccagggcagcctgacgcagctgtttgggggccctgcctcctcctcctcctcttcctcctcctcttcagctgctgacaaacccctggcatttagtggctgggccagtggctgcccatcagggacgctatccgactctggccgaaactcactgtccagcctgcccacctacagcaccggaggtgccgagccaaccaccagctccccaggcgggcacctgccttcccatggctctgggcgaggggcactgcctgggccagcccgaggggtccctactgggccctcccactcagacagtggccggtcctcctccagcaagagcacaggctccctagggggccgtgtggctggggggcttttgggcagtggtactcgggcctcccctgacagcagctcctgtggggagcgctcaccaccacccccgcctccacctccttcggatgaggccctgctgcactgtgtcctggaaggaaagctccgagaccgggaggcagagcttcagcagctgcgggacagtctggacgagaatgaggctaccatgtgccaggcatacgaggagcggcagcggcactggcagcgagagcgtgaggccctgcgagaggactgtgcggcccaggcacagcgggcacagcgggcccaacagctgctgcagctgcaggtgttccagctgcagcaggagaagcggcaattgcaggacgacttcgcacagctgctgcaggagcgcgaacagctggagcggcgctgcgccaccttggagcgggagcagcgggagctcgggccgaggcttgaggagaccaagtgggaggtgtgccagaaatcaggcgagatctccctgctgaagcagcagctgaaagagtctcaggcagagctggtgcagaagggcagcgagctggtggctctgcgggtggcgctgcgggaggcccgtgctacgctgcgggtcagtgagggccgtgcgcggggtctacaggaggccgcccgagctcgggagctggagctggaagcctgttcccaggagctgcagcgacaccgccaggaagctgagcagctgcgggagaaagctgggcagttggatgctgaggcggccggactccgggagccccctgtgccacctgccaccgctgacccattcctcctggcagagagtgatgaggccaaagtgcagcgggcagcagccggggttgggggcagcttgcgggcccaggtggagcgattgcgggtggagctgcagcgggagcggcggcggggtgaggagcagcgggacagctttgagggggagcggctggcctggcaggcagagaaggagcaggtgatccgctaccagaagcagctgcagcacaactacatccagatgtaccggcgcaaccggcagctagagcaggagcctgggctcggttcccaggtttgagctctgcagcctctctcctggagtgagggggctgaagtcagaccaaaggaagaactcagaaatgtcttgtttatttgtgtttgtgaccaagcagcctctcccttcacccaggtttatggcctcgttttcacttgtatatttttcacactgtaaatttcttgtacaaacccaaagaaaaaattaaaaaaaatttttttgtttaaaaaaaaaaaaaaa

SEQ ID NO: 360467 - DNA, 813 bp, Homo sapiens
gctgggattacaggcgtgagccactgcacccggccaagtgcttgctttttttattttttgagacaaggtctcattctgtcacccaggctagagagcagtggcgtgatttcagctccctgtagcctcaaccccctgggctcaagcagtcctctcaccccagcctcccaagtagctgagactacaggcgcatgccaccacaccaagctaatttttggtctttggagaggcagggttttgctgtgttgcctaggctggtctcgaactccggagcttaagtgatccacccacctcgcgtgagccaccgagcccggtctgcttgctcttgtgtttgtttctatgatcatcataaaagcagttagtattgttgttgcaattactattgttgtttaatggaatccacccttcccactgccaaccctgttcacaggcgcttccagcccactccagccaggggagcagggaagaagaaggggctccctcctcttcacattccccccgaccccaaagccagagaaagccagatggcaccagctgctccggatgtgcctgcccacattgggggacagggccgggcctgggctcggttcccaggtttgagctctgcagcctctctcctggagtgagggggctgaagtcagaccaaaggaagaactcagaaatgtcttgtttatttgtgtttgtgaccaagcagcctctcccttcacccaggtttatggcctcgttttcacttgtatatttttcacactgtaaatttcttgtacaaacccaaagaaaaaattaaaaaaaatttttttgtttaaaaaaaaaaaaaaa

SEQ ID NO: 360468 - DNA, 1990 bp, Homo sapiens
  misc_feature (897)..(897): n is a, c, g, or t
  misc_feature (1240)..(1240): n is a, c, g, or t
  misc_feature (1566)..(1566): n is a, c, g, or t
aaaaggtacagtcaggggaaaatagatctaggcagagtgccttagtcagggaccacgggcgctgaatctgcagtgccaacaccaaactgacacatctccaggtgtacctccaaccctagccttctcccacagctgcctacaacagagtctcccagccttctcagagagctaaaaccagaaatttccagactcatgaaagcaaccccccagcctctccccacacgccgaagagagaaggaaacaggctccccccaccaatgggccctcaagccacccaggctcccaccactctcatacctgcgtgcccacgttcacaggctccactgcaccactcaccttcctagtcacacacaaacacaggagctcacacataaactcatgaacttactgacaagtctgtccaggcaccgtctctcccacacaccacaaattcacttgttagatccacatttataactttcacaggctttctaatgacccctgatccacatactcttctaagatatacacatgtgaattcacacatgaactcatatgtatgtgaatgaactgatatatcaaacatgcatagactcacatgatgttttcacacacattttcatacacacgtgttcattttcatgctcctgtgcatgtagtcacacaacaaataactaaatgcacacactcctactcccagtgcaattctctgtccacttcttggccccgctctgcatgatgacttcagcagatgcctaagtcctggtcatcagcggcctcgggactgggactagggagggggttccgggtggaggcttgcagctgcttccaggaaggagcagagcctggggaggtggagccctcttgcctgggctctgtggaagtgaggttttggagcagcctccagaggtgaaggcngggcatctaccttcctcccctcagggttagtttggggaccttctgaagctgtagggtttcagagaggttggcagtggggcagagcctgtggaggctccttcaggccttcaggcctcaccgattgggtgtgcagaggctaggagttgtcatggaaactggtatgagcctgcatccacctctgggaggcaggagaccccaaaggacacctgtggactccctaagagccgcgggtttcttatttagccagatcgacagagaggcagtttagccgcctttctgtctgagagaaactgaggcccagcagagggaggcagggcactgcctggccttggctctttgttcnctaattaccatctgaggtgctgattgcacccctgaggtacctctgcccaaactgccctgtaatgaggccacctggctgagaggaccagggacctgtgcttcaagctggtagagaaggcccctccctcacctgagtcctggcctctgtggaggatgcaggattgggcttgggcctgggtctttgctgccaggtggccctgcggtaatcatccaggcctcccatgcctctcagcatctctgctgagtgaattcactcctcagccctgttcagaccagcattgggcagtgtggtttggggcccagggggaattgagattcattccagcnacaactacatccagatgtaccggcgcaaccggcagctagagcaggagccccactccagccaggggagcagggaagaagaaggggctccctcctcttcacattccccccgaccccaaagccagagaaagccagatggcaccagctgctccggatgtgcctgcccacattgggggacagggccgggcctgggctcggttcccaggtttgagctctgcagcctctctcctggagtgagggggctgaagtcagaccaaaggaagaactcagaaatgtcttgtttatttgtgtttgtgaccaagcagcctctcccttcacccaggtttatggcctcgttttcacttgtatatttttcacactgtaaatttcttgtacaaacccaaagaaaaaattaaaaaaaatttttttgtttaaaaaaaaaaaaaaa

SEQ ID NO: 360469 - DNA, 3033 bp, Homo sapiens
  misc_feature (897)..(897): n is a, c, g, or t
  misc_feature (1240)..(1240): n is a, c, g, or t
  misc_feature (1566)..(1566): n is a, c, g, or t
aaaaggtacagtcaggggaaaatagatctaggcagagtgccttagtcagggaccacgggcgctgaatctgcagtgccaacaccaaactgacacatctccaggtgtacctccaaccctagccttctcccacagctgcctacaacagagtctcccagccttctcagagagctaaaaccagaaatttccagactcatgaaagcaaccccccagcctctccccacacgccgaagagagaaggaaacaggctccccccaccaatgggccctcaagccacccaggctcccaccactctcatacctgcgtgcccacgttcacaggctccactgcaccactcaccttcctagtcacacacaaacacaggagctcacacataaactcatgaacttactgacaagtctgtccaggcaccgtctctcccacacaccacaaattcacttgttagatccacatttataactttcacaggctttctaatgacccctgatccacatactcttctaagatatacacatgtgaattcacacatgaactcatatgtatgtgaatgaactgatatatcaaacatgcatagactcacatgatgttttcacacacattttcatacacacgtgttcattttcatgctcctgtgcatgtagtcacacaacaaataactaaatgcacacactcctactcccagtgcaattctctgtccacttcttggccccgctctgcatgatgacttcagcagatgcctaagtcctggtcatcagcggcctcgggactgggactagggagggggttccgggtggaggcttgcagctgcttccaggaaggagcagagcctggggaggtggagccctcttgcctgggctctgtggaagtgaggttttggagcagcctccagaggtgaaggcngggcatctaccttcctcccctcagggttagtttggggaccttctgaagctgtagggtttcagagaggttggcagtggggcagagcctgtggaggctccttcaggccttcaggcctcaccgattgggtgtgcagaggctaggagttgtcatggaaactggtatgagcctgcatccacctctgggaggcaggagaccccaaaggacacctgtggactccctaagagccgcgggtttcttatttagccagatcgacagagaggcagtttagccgcctttctgtctgagagaaactgaggcccagcagagggaggcagggcactgcctggccttggctctttgttcnctaattaccatctgaggtgctgattgcacccctgaggtacctctgcccaaactgccctgtaatgaggccacctggctgagaggaccagggacctgtgcttcaagctggtagagaaggcccctccctcacctgagtcctggcctctgtggaggatgcaggattgggcttgggcctgggtctttgctgccaggtggccctgcggtaatcatccaggcctcccatgcctctcagcatctctgctgagtgaattcactcctcagccctgttcagaccagcattgggcagtgtggtttggggcccagggggaattgagattcattccagcncttgaagggggagtcttggtggggatcagggcttgttactgatgtcaaggaggtgtttggtcaggatcagtgggtcaggaggggtctcaaggtggagggactctgacaccactgccctgcttacaggtcgcctgcgaggccgctggccaggcctgagcctctgccaccatggccattgtgcagactctgccagtgccactggagcctgctcctgaagctgccactgccccacaagctccagtcatgggtagtgtgagcagccttatctcaggccggccctgtcccggggggccagctcctccccgccaccacggccctcctgggcccaccttcttccgccagcaggatggcctgctacggggtggctatgaggcacaggagccgctgtgcccagctgtgccccctaggaaggctgtccctgtcaccagcttcacctacatcaatgaggacttccggacagagtcaccccccagcccaagcagtgatgttgaggatgcccgagagcagcgggcacacaatgcccacctccgcggcccaccaccaaagctcatccctgtctctggaaagctggagaagctggagcggcgctgcgccaccttggagcgggagcagcgggagctcgggccgaggcttgaggagaccaagtgggaggtgtgccagaaatcaggcgagatctccctgctgaagcagcagctgaaagagtctcaggcagagctggtgcagaagggcagcgagctggtggctctgcgggtggcgctgcgggaggcccgtgctacgctgcgggtcagtgagggccgtgcgcggggtctacaggaggccgcccgagctcgggagctggagctggaagcctgttcccaggagctgcagcgacaccgccaggaagctgagcagctgcgggagaaagctgggcagttggatgctgaggcggccggactccgggagccccctgtgccacctgccaccgctgacccattcctcctggcagagagtgatgaggccaaagtgcagcgggcagcagccggggttgggggcagcttgcgggcccaggtggagcgattgcgggtggagctgcagcgggagcggcggcggggtgaggagcagcgggacagctttgagggggagcggctggcctggcaggcagagaaggagcaggtgatccgctaccagaagcagctgcagcacaactacatccagatgtaccggcgcaaccggcagctagagcaggagcctgggctcggttcccaggtttgagctctgcagcctctctcctggagtgagggggctgaagtcagaccaaaggaagaactcagaaatgtcttgtttatttgtgtttgtgaccaagcagcctctcccttcacccaggtttatggcctcgttttcacttgtatatttttcacactgtaaatttcttgtacaaacccaaagaaaaaattaaaaaaaatttttttgtttaaaaaaaaaaaaaaa

SEQ ID NO: 360470 - DNA, 808 bp, Homo sapiens
cccagagttcggaacctagagttcggagccggctagggagccggcgttgtcgcggcgaggaggtgggcgcgctggagcaggagcggggccggaagctggagccgaggcgcaggtggcgctgggtcgcctgcgaggccgctggccaggcctgagcctctgccaccatggccattgtgcagactctgccagtgccactggagcctgctcctgaagctgccactgccccacaagctccagtcatgggtagtgtgagcagccttatctcaggccggccctgtcccggggggccagctcctccccgccaccacggccctcctgggcccaccttcttccgccagcaggatggcctgctacggggtggctatgaggcacaggagccgctgtgcccagctgtgccccctaggaaggctgtccctgtcaccagcttcacctacatcaatgaggacttccggacagagtcaccccccagcccaagcagtgatgttgaggatgcccgagagcagcgggcacacaatgcccacctccgcggcccaccaccaaagctcatccctgtctctggaaagctggagaagagaaggtgaggaccggctcttccttgtgggcctgggtagaacgggagtcctcgcttgggaaactggaatttagaagcttatatagaggaaagagtgtgggctccagattcaccagacctgggtcctaatcccagctctctctcattctggatgtgtgacctcagggaagtcacttaacctgagcctcagtttctagaactgacatgaaggtcaaataatgtatagcatagtgccta

SEQ ID NO: 360471 - DNA, 2792 bp, Homo sapiens
gccagaggagggggctctgctggggagaggggctcagtctgttcttgtgaggctgagggtctggggtcgcctgcgaggccgctggccaggcctgagcctctgccaccatggccattgtgcagactctgccagtgccactggagcctgctcctgaagctgccactgccccacaagctccagtcatgggtagtgtgagcagccttatctcaggccggccctgtcccggggggccagctcctccccgccaccacggccctcctgggcccaccttcttccgccagcaggatggcctgctacggggtggctatgaggcacaggagccgctgtgcccagctgtgccccctaggaaggctgtccctgtcaccagcttcacctacatcaatgaggacttccggacagagtcaccccccagcccaagcagtgatgttgaggatgcccgagagcagcgggcacacaatgcccacctccgcggcccaccaccaaagctcatccctgtctctggaaagctggagaagaacatggagaagatcctgatccgcccaacagccttcaagccagtgctgcccaaacctcgaggggctccgtccctgcctagcttcatgggtcctcgggccaccgggctgtctgggagccagggcagcctgacgcagctgtttgggggccctgcctcctcctcctcctcttcctcctcctcttcagctgctgacaaacccctggcatttagtggctgggccagtggctgcccatcagggacgctatccgactctggccgaaactcactgtccagcctgcccacctacagcaccggaggtgccgagccaaccaccagctccccaggcgggcacctgccttcccatggctctgggcgaggggcactgcctgggccagcccgaggggtccctactgggccctcccactcagacagtggccggtcctcctccagcaagagcacaggctccctagggggccgtgtggctggggggcttttgggcagtggtactcgggcctcccctgacagcagctcctgtggggagcgctcaccaccacccccgcctccacctccttcggatgaggccctgctgcactgtgtcctggaaggaaagctccgagaccgggaggcagagcttcagcagctgcgggacagtctggacgagaatgaggctaccatgtgccaggcatacgaggagcggcagcggcactggcagcgagagcgtgaggccctgcgagaggactgtgcggcccaggcacagcgggcacagcgggcccaacagctgctgcagctgcaggtgttccagctgcagcaggagaagcggcaattgcaggacgacttcgcacagctgctgcaggagcgcgaacagctggagcggcgctgcgccaccttggagcgggagcagcgggagctcgggccgaggcttgaggagaccaagtgggaggtgtgccagaaatcaggcgagatctccctgctgaagcagcagctgaaagagtctcaggcagagctggtgcagaagggcagcgagctggtggctctgcgggtggcgctgcgggaggcccgtgctacgctgcgggtcagtgagggccgtgcgcggggtctacaggaggccgcccgagctcgggagctggagctggaagcctgttcccaggagctgcagcgacaccgccaggaagctgagcagctgcgggagaaagctgggcagttggatgctgaggcggccggactccgggagccccctgtgccacctgccaccgctgacccattcctcctggcagagagtgatgaggccaaagtgcagcgggcagcagccggggttgggggcagcttgcgggcccaggtggagcgattgcgggtggagctgcagcgggagcggcggcggggtgaggagcagcgggacagctttgagggggagcggctggcctggcaggcagagaaggagcaggtgatccgctaccagaagcagctgcagcacaactacatccagatgtaccggcgcaaccggcagctagagcaggagctgcagcagctcagcctggagctggaggcccgggagctcgctgacctgggcctggccgagcaggccccctgcatctgcctggaggagatcactgctactgagatctagggccctcagcaaccagctctgtagggagctctgccagaggggcagcagctgcagatccacttaggccccagggtccacggatggccccaaaggctgagggccccaaagccacttgtctcctaggatccaggcctctgggcttctgccaagaactcagggtggccctatgacttggaggagcaagatcagaccgctcaaaggtccccgtgttcactgttacccagaggctcttgttactacccacttcattccccaccgctgccagtgccactgccaaccctgttcacaggcgcttccagcccactccagccaggggagcagggaagaagaaggggctccctcctcttcacattccccccgaccccaaagccagagaaagccagatggcaccagctgctccggatgtgcctgcccacattgggggacagggccgggcctgggctcggttcccaggtttgagctctgcagcctctctcctggagtgagggggctgaagtcagaccaaaggaagaactcagaaatgtcttgtttatttgtgtttgtgaccaagcagcctctcccttcacccaggtttatggcctcgttttcacttgtatatttttcacactgtaaatttcttgtacaaacccaaagaaaaaattaaaaaaaatttttttgtttaaaaaaaaaaaaaaa

SEQ ID NO: 360472 - DNA, 2979 bp, Homo sapiens
ctgtgaatagaggctgtcaatgcgtgaaagatggttaggagactaagtgcacttgagactgtgactgggtgcgaaggactgcggattgttgtggaagcctgtgcccaacaggcctgtgacaccgtgtctgtgtgtgaggtggactggaagattatggaaagaaggaacgcggacccacgtgacggctgagactgcggctgcatgtgggaaaggtcttgtgggtgttagggagactgtattgtgtgcgagaaggtcgcctgcgaggccgctggccaggcctgagcctctgccaccatggccattgtgcagactctgccagtgccactggagcctgctcctgaagctgccactgccccacaagctccagtcatgggtagtgtgagcagccttatctcaggccggccctgtcccggggggccagctcctccccgccaccacggccctcctgggcccaccttcttccgccagcaggatggcctgctacggggtggctatgaggcacaggagccgctgtgcccagctgtgccccctaggaaggctgtccctgtcaccagcttcacctacatcaatgaggacttccggacagagtcaccccccagcccaagcagtgatgttgaggatgcccgagagcagcgggcacacaatgcccacctccgcggcccaccaccaaagctcatccctgtctctggaaagctggagaagaacatggagaagatcctgatccgcccaacagccttcaagccagtgctgcccaaacctcgaggggctccgtccctgcctagcttcatgggtcctcgggccaccgggctgtctgggagccagggcagcctgacgcagctgtttgggggccctgcctcctcctcctcctcttcctcctcctcttcagctgctgacaaacccctggcatttagtggctgggccagtggctgcccatcagggacgctatccgactctggccgaaactcactgtccagcctgcccacctacagcaccggaggtgccgagccaaccaccagctccccaggcgggcacctgccttcccatggctctgggcgaggggcactgcctgggccagcccgaggggtccctactgggccctcccactcagacagtggccggtcctcctccagcaagagcacaggctccctagggggccgtgtggctggggggcttttgggcagtggtactcgggcctcccctgacagcagctcctgtggggagcgctcaccaccacccccgcctccacctccttcggatgaggccctgctgcactgtgtcctggaaggaaagctccgagaccgggaggcagagcttcagcagctgcgggacagtctggacgagaatgaggctaccatgtgccaggcatacgaggagcggcagcggcactggcagcgagagcgtgaggccctgcgagaggactgtgcggcccaggcacagcgggcacagcgggcccaacagctgctgcagctgcaggtgttccagctgcagcaggagaagcggcaattgcaggacgacttcgcacagctgctgcaggagcgcgaacagctggagcggcgctgcgccaccttggagcgggagcagcgggagctcgggccgaggcttgaggagaccaagtgggaggtgtgccagaaatcaggcgagatctccctgctgaagcagcagctgaaagagtctcaggcagagctggtgcagaagggcagcgagctggtggctctgcgggtggcgctgcgggaggcccgtgctacgctgcgggtcagtgagggccgtgcgcggggtctacaggaggccgcccgagctcgggagctggagctggaagcctgttcccaggagctgcagcgacaccgccaggaagctgagcagctgcgggagaaagctgggcagttggatgctgaggcggccggactccgggagccccctgtgccacctgccaccgctgacccattcctcctggcagagagtgatgaggccaaagtgcagcgggcagcagccggggttgggggcagcttgcgggcccaggtggagcgattgcgggtggagctgcagcgggagcggcggcggggtgaggagcagcgggacagctttgagggggagcggctggcctggcaggcagagaaggagcaggtgatccgctaccagaagcagctgcagcacaactacatccagatgtaccggcgcaaccggcagctagagcaggagctgcagcagctcagcctggagctggaggcccgggagctcgctgacctgggcctggccgagcaggccccctgcatctgcctggaggagatcactgctactgagatctagggccctcagcaaccagctctgtagggagctctgccagaggggcagcagctgcagatccacttaggccccagggtccacggatggccccaaaggctgagggccccaaagccacttgtctcctaggatccaggcctctgggcttctgccaagaactcagggtggccctatgacttggaggagcaagatcagaccgctcaaaggtccccgtgttcactgttacccagaggctcttgttactacccacttcattccccaccgctgccagtgccactgccaaccctgttcacaggcgcttccagcccactccagccaggggagcagggaagaagaaggggctccctcctcttcacattccccccgaccccaaagccagagaaagccagatggcaccagctgctccggatgtgcctgcccacattgggggacagggccgggcctgggctcggttcccaggtttgagctctgcagcctctctcctggagtgagggggctgaagtcagaccaaaggaagaactcagaaatgtcttgtttatttgtgtttgtgaccaagcagcctctcccttcacccaggtttatggcctcgttttcacttgtatatttttcacactgtaaatttcttgtacaaacccaaagaaaaaattaaaaaaaatttttttgtttaaaaaaaaaaaaaaa

SEQ ID NO: 360473 - DNA, 3145 bp, Homo sapiens
gcggccgccgccgcgccgtggccctttgtgctggaacaatgaccagctgccgctggccccggggccccggctggggttgagggtgaccaccgccgccgccgcgtcgagccgaaccgagcccccagacacgcagtcacagggcgtcggagggagggctcccgactgccgccgagcagcccctacgtgcgccccggcggattcgcgtgacgcgggtgcttgcgcgtgtccgcgccccggggcggagacgcccctcggaccctcccctgcgcggtgccgcccactcgcaccgggcgggggctggccagggccgggggcgccgcggaggcggaggcggggctgggccgggcagctccgagtggcggcgcgcgggccagggccggggccggggccggggccggagccggagccggggccgggcggcgcgcctgtggagcgctgggggcggcctggggctgagcatggagcagcgcggcggaggtcgcctgcgaggccgctggccaggcctgagcctctgccaccatggccattgtgcagactctgccagtgccactggagcctgctcctgaagctgccactgccccacaagctccagtcatgggtagtgtgagcagccttatctcaggccggccctgtcccggggggccagctcctccccgccaccacggccctcctgggcccaccttcttccgccagcaggatggcctgctacggggtggctatgaggcacaggagccgctgtgcccagctgtgccccctaggaaggctgtccctgtcaccagcttcacctacatcaatgaggacttccggacagagtcaccccccagcccaagcagtgatgttgaggatgcccgagagcagcgggcacacaatgcccacctccgcggcccaccaccaaagctcatccctgtctctggaaagctggagaagaacatggagaagatcctgatccgcccaacagccttcaagccagtgctgcccaaacctcgaggggctccgtccctgcctagcttcatgggtcctcgggccaccgggctgtctgggagccagggcagcctgacgcagctgtttgggggccctgcctcctcctcctcctcttcctcctcctcttcagctgctgacaaacccctggcatttagtggctgggccagtggctgcccatcagggacgctatccgactctggccgaaactcactgtccagcctgcccacctacagcaccggaggtgccgagccaaccaccagctccccaggcgggcacctgccttcccatggctctgggcgaggggcactgcctgggccagcccgaggggtccctactgggccctcccactcagacagtggccggtcctcctccagcaagagcacaggctccctagggggccgtgtggctggggggcttttgggcagtggtactcgggcctcccctgacagcagctcctgtggggagcgctcaccaccacccccgcctccacctccttcggatgaggccctgctgcactgtgtcctggaaggaaagctccgagaccgggaggcagagcttcagcagctgcgggacagtctggacgagaatgaggctaccatgtgccaggcatacgaggagcggcagcggcactggcagcgagagcgtgaggccctgcgagaggactgtgcggcccaggcacagcgggcacagcgggcccaacagctgctgcagctgcaggtgttccagctgcagcaggagaagcggcaattgcaggacgacttcgcacagctgctgcaggagcgcgaacagctggagcggcgctgcgccaccttggagcgggagcagcgggagctcgggccgaggcttgaggagaccaagtgggaggtgtgccagaaatcaggcgagatctccctgctgaagcagcagctgaaagagtctcaggcagagctggtgcagaagggcagcgagctggtggctctgcgggtggcgctgcgggaggcccgtgctacgctgcgggtcagtgagggccgtgcgcggggtctacaggaggccgcccgagctcgggagctggagctggaagcctgttcccaggagctgcagcgacaccgccaggaagctgagcagctgcgggagaaagctgggcagttggatgctgaggcggccggactccgggagccccctgtgccacctgccaccgctgacccattcctcctggcagagagtgatgaggccaaagtgcagcgggcagcagccggggttgggggcagcttgcgggcccaggtggagcgattgcgggtggagctgcagcgggagcggcggcggggtgaggagcagcgggacagctttgagggggagcggctggcctggcaggcagagaaggagcaggtgatccgctaccagaagcagctgcagcacaactacatccagatgtaccggcgcaaccggcagctagagcaggagccaggccccctgcatctgcctggaggagatcactgctactgagatctagggccctcagcaaccagctctgtagggagctctgccagaggggcagcagctgcagatccacttaggccccagggtccacggatggccccaaaggctgagggccccaaagccacttgtctcctaggatccaggcctctgggcttctgccaagaactcagggtggccctatgacttggaggagcaagatcagaccgctcaaaggtccccgtgttcactgttacccagaggctcttgttactacccacttcattccccaccgctgccagtgccactgccaaccctgttcacaggcgcttccagcccactccagccaggggagcagggaagaagaaggggctccctcctcttcacattccccccgaccccaaagccagagaaagccagatggcaccagctgctccggatgtgcctgcccacattgggggacagggccgggcctgggctcggttcccaggtttgagctctgcagcctctctcctggagtgagggggctgaagtcagaccaaaggaagaactcagaaatgtcttgtttatttgtgtttgtgaccaagcagcctctcccttcacccaggtttatggcctcgttttcacttgtatatttttcacactgtaaatttcttgtacaaacccaaagaaaaaattaaaaaaaatttttttgtttaaaaaaaaaaaaaaa

SEQ ID NO: 360474 - DNA, 3072 bp, Homo sapiens
gcggccgccgccgcgccgtggccctttgtgctggaacaatgaccagctgccgctggccccggggccccggctggggttgagggtgaccaccgccgccgccgcgtcgagccgaaccgagcccccagacacgcagtcacagggcgtcggagggagggctcccgactgccgccgagcagcccctacgtgcgccccggcggattcgcgtgacgcgggtgcttgcgcgtgtccgcgccccggggcggagacgcccctcggaccctcccctgcgcggtgccgcccactcgcaccgggcgggggctggccagggccgggggcgccgcggaggcggaggcggggctgggccgggcagctccgagtggcggcgcgcgggccagggccggggccggggccggggccggagccggagccggggccgggcggcgcgcctgtggagcgctgggggcggcctggggctgagcatggagcagcgcggcggaggtcgcctgcgaggccgctggccaggcctgagcctctgccaccatggccattgtgcagactctgccagtgccactggagcctgctcctgaagctgccactgccccacaagctccagtcatgggtagtgtgagcagccttatctcaggccggccctgtcccggggggccagctcctccccgccaccacggccctcctgggcccaccttcttccgccagcaggatggcctgctacggggtggctatgaggcacaggagccgctgtgcccagctgtgccccctaggaaggctgtccctgtcaccagcttcacctacatcaatgaggacttccggacagagtcaccccccagcccaagcagtgatgttgaggatgcccgagagcagcgggcacacaatgcccacctccgcggcccaccaccaaagctcatccctgtctctggaaagctggagaagaacatggagaagatcctgatccgcccaacagccttcaagccagtgctgcccaaacctcgaggggctccgtccctgcctagcttcatgggtcctcgggccaccgggctgtctgggagccagggcagcctgacgcagctgtttgggggccctgcctcctcctcctcctcttcctcctcctcttcagctgctgacaaacccctggcatttagtggctgggccagtggctgcccatcagggacgctatccgactctggccgaaactcactgtccagcctgcccacctacagcaccggaggtgccgagccaaccaccagctccccaggcgggcacctgccttcccatggctctgggcgaggggcactgcctgggccagcccgaggggtccctactgggccctcccactcagacagtggccggtcctcctccagcaagagcacaggctccctagggggccgtgtggctggggggcttttgggcagtggtactcgggcctcccctgacagcagctcctgtggggagcgctcaccaccacccccgcctccacctccttcggatgaggccctgctgcactgtgtcctggaaggaaagctccgagaccgggaggcagagcttcagcagctgcgggacagtctggacgagaatgaggctaccatgtgccaggcatacgaggagcggcagcggcactggcagcgagagcgtgaggccctgcgagaggactgtgcggcccaggcacagcgggcacagcgggcccaacagctgctgcagctgcaggtgttccagctgcagcaggagaagcggcaattgcaggacgacttcgcacagctgctgcaggagcgcgaacagctggagcggcgctgcgccaccttggagcgggagcagcgggagctcgggccgaggcttgaggagaccaagtgggaggtgtgccagaaatcaggcgagatctccctgctgaagcagcagctgaaagagtctcaggcagagctggtgcagaagggcagcgagctggtggctctgcgggtggcgctgcgggaggcccgtgctacgctgcgggtcagtgagggccgtgcgcggggtctacaggaggccgcccgagctcgggagctggagctggaagcctgttcccaggagctgcagcgacaccgccaggaagctgagcagctgcgggagaaagctgggcagttggatgctgaggcggccggactccgggagccccctgtgccacctgccaccgctgacccattcctcctggcagagagtgatgaggccaaagtgcagcgggcagcagccggggttgggggcagcttgcgggcccaggtggagcgattgcgggtggagctgcagcgggagcggcggcggggtgaggagcagcgggacagctttgagggggagcggctggcctggcaggcagagaaggagcaggtgcaggccccctgcatctgcctggaggagatcactgctactgagatctagggccctcagcaaccagctctgtagggagctctgccagaggggcagcagctgcagatccacttaggccccagggtccacggatggccccaaaggctgagggccccaaagccacttgtctcctaggatccaggcctctgggcttctgccaagaactcagggtggccctatgacttggaggagcaagatcagaccgctcaaaggtccccgtgttcactgttacccagaggctcttgttactacccacttcattccccaccgctgccagtgccactgccaaccctgttcacaggcgcttccagcccactccagccaggggagcagggaagaagaaggggctccctcctcttcacattccccccgaccccaaagccagagaaagccagatggcaccagctgctccggatgtgcctgcccacattgggggacagggccgggcctgggctcggttcccaggtttgagctctgcagcctctctcctggagtgagggggctgaagtcagaccaaaggaagaactcagaaatgtcttgtttatttgtgtttgtgaccaagcagcctctcccttcacccaggtttatggcctcgttttcacttgtatatttttcacactgtaaatttcttgtacaaacccaaagaaaaaattaaaaaaaatttttttgtttaaaaaaaaaaaaaaa

SEQ ID NO: 360475 - DNA, 1995 bp, Homo sapiens
gcggccgccgccgcgccgtggccctttgtgctggaacaatgaccagctgccgctggccccggggccccggctggggttgagggtgaccaccgccgccgccgcgtcgagccgaaccgagcccccagacacgcagtcacagggcgtcggagggagggctcccgactgccgccgagcagcccctacgtgcgccccggcggattcgcgtgacgcgggtgcttgcgcgtgtccgcgccccggggcggagacgcccctcggaccctcccctgcgcggtgccgcccactcgcaccgggcgggggctggccagggccgggggcgccgcggaggcggaggcggggctgggccgggcagctccgagtggcggcgcgcgggccagggccggggccggggccggggccggagccggagccggggccgggcggcgcgcctgtggagcgctgggggcggcctggggctgagcatggagcagcgcggcggaggtcgcctgcgaggccgctggccaggcctgagcctctgccaccatggccattgtgcagactctgccagtgccactggagcctgctcctgaagctgccactgccccacaagctccagtcatgggtagtgtgagcagccttatctcaggccggccctgtcccggggggccagctcctccccgccaccacggccctcctgggcccaccttcttccgccagcaggatggcctgctacggggtggctatgaggcacaggagccgctgtgcccagctgtgccccctaggaaggctgtccctgtcaccagcttcacctacatcaatgaggacttccggacagagtcaccccccagcccaagcagtgatgttgaggatgcccgagagcagcgggcacacaatgcccacctccgcggcccaccaccaaagctcatccctgtctctggaaagctggagaagaacatggagaagatcctgatccgcccaacagccttcaagccagtgctgcccaaacctcgaggggctccgtccctgcctagcttcatgggtcctcgggccaccgggctgtctgggagccagggcagcctgacgcagctgtttgggggccctgcctcctcctcctcctcttcctcctcctcttcagctgctgacaaacccctggcatttagtggctgggccagtggctgcccatcagggacgctatccgactctggccgaaactcactgtccagcctgcccacctacagcaccggaggtgccgagccaaccaccagctccccaggcgggcacctgccttcccatggctctgggcgaggggcactgcctgggccagcccgaggggtccctactgggccctcccactcagacagtggccggtcctcctccagcaagagcacaggctccctagggggccgtgtggctggggggcttttgggcagtggtactcgggcctcccctgacagcagctcctgtggggagcgctcaccaccacccccgcctccacctccttcggatgaggccctgctgcactgtgtcctggaaggaaagctccgagaccgggaggcagagcttcagcagctgcgggacagtctggacgagaatgaggctaccatgtgccagccactgccaaccctgttcacaggcgcttccagcccactccagccaggggagcagggaagaagaaggggctccctcctcttcacattccccccgaccccaaagccagagaaagccagatggcaccagctgctccggatgtgcctgcccacattgggggacagggccgggcctgggctcggttcccaggtttgagctctgcagcctctctcctggagtgagggggctgaagtcagaccaaaggaagaactcagaaatgtcttgtttatttgtgtttgtgaccaagcagcctctcccttcacccaggtttatggcctcgttttcacttgtatatttttcacactgtaaatttcttgtacaaacccaaagaaaaaattaaaaaaaatttttttgtttaaaaaaaaaaaaaaa

SEQ ID NO: 360476 - DNA, 1899 bp, Homo sapiens
gcggccgccgccgcgccgtggccctttgtgctggaacaatgaccagctgccgctggccccggggccccggctggggttgagggtgaccaccgccgccgccgcgtcgagccgaaccgagcccccagacacgcagtcacagggcgtcggagggagggctcccgactgccgccgagcagcccctacgtgcgccccggcggattcgcgtgacgcgggtgcttgcgcgtgtccgcgccccggggcggagacgcccctcggaccctcccctgcgcggtgccgcccactcgcaccgggcgggggctggccagggccgggggcgccgcggaggcggaggcggggctgggccgggcagctccgagtggcggcgcgcgggccagggccggggccggggccggggccggagccggagccggggccgggcggcgcgcctgtggagcgctgggggcggcctggggctgagcatggagcagcgcggcggaggtcgcctgcgaggccgctggccaggcctgagcctctgccaccatggccattgtgcagactctgccagtgccactggagcctgctcctgaagctgccactgccccacaagctccagtcatgggtagtgtgagcagccttatctcaggccggccctgtcccggggggccagctcctccccgccaccacggccctcctgggcccaccttcttccgccagcaggatggcctgctacggggtggctatgaggcacaggagccgctgtgcccagctgtgccccctaggaaggctgtccctgtcaccagcttcacctacatcaatgaggacttccggacagagtcaccccccagcccaagcagtgatgttgaggatgcccgagagcagcgggcacacaatgcccacctccgcggcccaccaccaaagctcatccctgtctctggaaagctggagaagaacatggagaagatcctgatccgcccaacagccttcaagccagtgctgcccaaacctcgaggggctccgtccctgcctagcttcatgggtcctcgggccaccgggctgtctgggagccagggcagcctgacgcagctgtttgggggccctgcctcctcctcctcctcttcctcctcctcttcagctgctgacaaacccctggcatttagtggctgggccagtggctgcccatcagggacgctatccgactctggccgaaactcactgtccagcctgcccacctacagcaccggaggtgccgagccaaccaccagctccccaggcgggcacctgccttcccatggctctgggcgaggggcactgcctgggccagcccgaggggtccctactgggccctcccactcagacagtggccggtcctcctccagcaagagcacaggctccctagggggccgtgtggctggggggcttttgggcagtggtactcgggcctcccctgacagcagctcctgtggggagcgctcaccaccacccccgcctccacctccttcggatgaggccctgctgcactgtgtcctggaaggaaagctccgagaccgggaggcagagcttcagcagctgcgggacagtctggacgagaatgaggctaccatgtgccaggcatacgaggagcggcagcggcactggcagcgagagcgtgaggccctgcccacattgggggacagggccgggcctgggctcggttcccaggtttgagctctgcagcctctctcctggagtgagggggctgaagtcagaccaaaggaagaactcagaaatgtcttgtttatttgtgtttgtgaccaagcagcctctcccttcacccaggtttatggcctcgttttcacttgtatatttttcacactgtaaatttcttgtacaaacccaaagaaaaaattaaaaaaaatttttttgtttaaaaaaaaaaaaaaa

SEQ ID NO: 360477 - DNA, 594 bp, Homo sapiens
aatctgtagtccctaatgtagccttttgctatctgacatctgtttgacatatgctttgtcaaattgattcaactcaaacttgaatacttatgttttgccaaatttgtgtgatcacattgtgttactaatgtgtaacatcagcctgtaacttcagccacctactttttatttgtggatgctgcttagaaacttgcaaataacactatgaatatgtggagttccttgactgtccactctgttgtccctttagagagtacattacatgcacatttcttgtgtattttctagttcaattagaattcctccgttctttccagccaattataaaggttttaaaggaactattcaatgcaatgtatttccataagtttagtacctatgtactttctcttgggagtggggagttggcgaggggagtcatgaatttttggcaatgttaagtagtatcttattgcccatatttttcgcatgtctaaatgccaaattttgtgatgtattttgcacaaataactcattactctgaatcttaagtagtgctttatttgccctcacaatgttgccctttataaattgataaatttatgaaaaaagaaa

SEQ ID NO: 360478 - DNA, 490 bp, Homo sapiens
tagaaggctagatgtaccctctcctgggaggcaggggagatgggcggtggactgaataatggcccctctacatcctagtccccccgaacctgatgtttccttatatggtaaaagggactttgctgaatgtaattatattagggttcttgtgatggggtgattatcctggtttatcctggaatgcgggagggcctgtgatgatggaagcagagactggagatctttgaaggtggaagaaggggctgccagccaaggcggctattagaagctgaaaaagacacggaaatataatagattctttcctcagggcctccaggaggaaccagctctgccatccctggacttaagcccagtggaactgatttcacacttctggcctccagaattttaagagaataaatgtggctgggcgtgggggctcatgcctgtaatcccagcactttgggaggtcgaggcagatggatcacttgaggtcaggaatccgagacta

SEQ ID NO: 360479 - DNA, 557 bp, Homo sapiens
attgcttatattataattgggtctgggtccaaatatatattgaacttattttccaaaagaaatactctccttagattgtggcatggcaggaaagcatactgttcctagtagtcctctccaaactcctttaaaaactgagctttatggcaaatttgtaatgaagatgtaacactttcactacttaaaccatgacttcaatttgtgatataattaagggcaattactcctgttagagattgtagactaggttaggctgagttaataaatagctgtttggctctggcattagcaaggatgtcttcattagggtagtaatgtgtcaagagtgctaaataggttgccatggtatttgtgggtttcagcctggactctggctttccctgaaattaaaaatgttcagcctttaataaaaggcacttccttacacagcaaagcagacagaacactaaataggtgaaatgaccagggctcaggaacttgattgcagaggctgatgaatacacacgtggatattttaaagtaagcattgactctgacaggctttgttaaaaaaaaaa

SEQ ID NO: 360480 - DNA, 1576 bp, Homo sapiens
ctctccttccccacttactcagagaatttaaagtctgtagagtcagcacagccccatcagtccaggaacttcccaccaccagcccttgactgtcccattaactgacatggtcagatttccagctccccctactccctgctgtgaaacaatccctctccctgtgagaggaaactgtggagcgtttcttatcgaaggttaaatggactctgctcataaacctcttactgagatgcttcctgatagccaggctggccagagaggggtgcaggggttagatagtaagtggtggtcgtttgtggtcagttacctcaattctgttcattgcagtgcccgtaaaccatgtagaaagctcccagcactgaaaggcaggagtgttagcatctcgctttatccaccataacgtaaagaactgcggtgtgataacagccttcacggggccacggtggaaccaagacagcaggcgaggccatgcctaaacaagtggtctggcacgggcactggccagctgctctctccaagcaggtggcccagatcccacccacgtggactttctcatcaggtgcagcgcctgccactctcagccactgggtgtgtgactctcctcttcatctcagcattctccatcacttcccctccagaaaaacggatggaaggaagccctctgtgacactgcttctgagaagaagcatttccgggaccgatatcatctgtctggtctctgtgaacagcaaggaatcttcttgaccgttcttgggcactggaggctggttaggagttcagtaataaacgtggccttcgtgctgtagggcagagtggatgcagtttgtagctttcagagtgtctcattgagtctagatcattgaaccaacacttaaccaaatgtcccactcccatcacactaggacttgtcattccatgcccctctcctagtggtcatggtttcatatgggcatacaactgctactgaagttatatagccttgaaaactcagtgcaggttgcccttaattttccccaaacccctccatcggcaagtctagttgccctttagcacctaaagatctgcaccccaaaccaatgtcaccataaagagggcacgaagaagagtgggtgtgatcccaacggggttttgtaactgaagaagcccagtgtgagcttctcatcttttcatatacctctaacccccggtactcattgaatcattgatgaggtatctcaattgagatttgcaaggactttgataccatttgaaatggaaaaattttgaacgggctttaacatgtttaagaaatatggatggggccggccacagtggctcacgcctgtaatcccagaactctggaaggctgaggcaggcggatcacctgagatcaggagttcgaggccagcctggccaagatggcaaaaaccccgactctactaaaaatacaaaattagccaggcgtggtggcgtacgcctgtaatcccagctactcgggaggcaggagaatcgcttgagcctgggaggcagaggctgcggtgagccaagatcgtgtcactgcactccagcctgggtgacagagactccatttaaaaaa

SEQ ID NO: 360481 - DNA, 651 bp, Homo sapiens
ctctccttccccacttactcagagaatttaaagtctgtagagtcagcacagccccatcagtccaggaacttcccaccaccagcccttgactgtcccattaactgacatggtcagatttccagctccccctactccctgctgtgaaacaatccctctccctgtgagaggaaactgtggagcgtttcttatcgaaggttaaatggactctgctcataaacctcttactgagatgcttcctgatagccaggctggccagagaggggtgcaggggttagatagtaagtggtggtcaattgagatttgcaaggactttgataccatttgaaatggaaaaattttgaacgggctttaacatgtttaagaaatatggatggggccggccacagtggctcacgcctgtaatcccagaactctggaaggctgaggcaggcggatcacctgagatcaggagttcgaggccagcctggccaagatggcaaaaaccccgactctactaaaaatacaaaattagccaggcgtggtggcgtacgcctgtaatcccagctactcgggaggcaggagaatcgcttgagcctgggaggcagaggctgcggtgagccaagatcgtgtcactgcactccagcctgggtgacagagactccatttaaaaaa

SEQ ID NO: 360482 - DNA, 1341 bp, Homo sapiens
ctctccttccccacttactcagagaatttaaagtctgtagagtcagcacagccccatcagtccaggaacttcccaccaccagcccttgactgtcccattaactgacatggtcagatttccagctccccctactccctgctgtgaaacaatccctctccctgtgagaggaaactgtggagcgtttcttatcgaaggttaaatggactctgctcataaacctcttactgagatgcttcctgatagccaggctggccagagaggggtgcaggggttagatagtaagtggtggtcgtttgtggtcagttacctcaattctgttcattgcagtgcccgtaaaccatgtagaaagctcccagcactgaaaggcaggagtgttagcatctcgctttatccaccataacgtaaagaactgcggtgtgataacagccttcacggggccacggtggaaccaagacagcaggcgaggccatgcctaaacaagtggtctggcacgggcactggccagctgctctctccaagcaggtggcccagatcccacccacgtggactttctcatcaggtgcagcgcctgccactctcagccactgggtgtgtgactctcctcttcatctcagcattctccatcacttcccctccagaaaaacggatggaaggaagccctctgtgacactgcttctgagaagaagcatttccgggaccgatatcatctgtctggtctctgtgaacagcaaggaatcttcttgaccgttcttgggcactggaggctggttaggagttcagtaataaacgtggccttcgtgctgtagggcagagtggatgcagtttgtagctttcagagtgtctcattgagtctagatcattgaaccaacacttaaccaaatgtcccactcccatcacactaggacttgtcattccatgcccctctcctagtggtcatggtttcatatgggcatacaactgctactgaagttatatagccttgaaaactcagtgcaggttgcccttaattttccccaaacccctccatcggcaagtctagttgccctttagcacctaaagatctgcaccccaaaccaatgtcaccataaagagggcacgaagaagagtgggtgtgatcccaacggggttttgtaactgaagaagcccagtgtgagcttctcatcttttcatatacctctaacccccggtactcattgaatcattgatgaggtatctcaattgagatttgcaaggactttgataccatttgaaatggaaaaattttgaacgccctctctctctctcctttctaatggtcacttctatcaagatgatcttccagctgcagttatggatcttggc

SEQ ID NO: 360483 - DNA, 338 bp, Homo sapiens
tttaagcagatctaagcccgttttaggtagaaatgcattcctcttcttggggctgcaacaggaaattctaaaaaccctttgtggaggtgcatcttccgtgaagttaaaggttccaggcccagccttccagccacgtggttcagggttagtagctgatacttctgtggaaaccttgtccataaagggtcagttagcaccaggggaggggcctggcaagaggtgaaactccaagcacatctattaattatgagagagaacaacatgtttttattttgctgttcatttaaactggaactgagaaaggttgctgggtccccacacattatcttcctcctccc

SEQ ID NO: 360484 - DNA, 393 bp, Homo sapiens
gacttacattttggagtaaataaaaggttatactgtattttagttaaaagtattccttttcagtgttaggaggcatggttgatttgtgaaataactttacaagattatttttataactataagtagaccattacttatttttaaagaaccagcatttaaaaaatgtgtgaaattgctttaactgtgaatactgttatatctagtaaataaagttattctatgaattttccagatggtgatagcaactagaataatttgattcatcatttctgtctcattcatgatattaatgaattgtgaataagtacaattaaaatctgcactggattgtcccatataagactctacaggcttggtgtttcttaaatgagaaatatcagtatatatttttag

SEQ ID NO: 360485 - DNA, 703 bp, Homo sapiens
aaagaaggaacggacgcacacctccccaaggagccctggcactaactacaacacacacagggtttggccagacctggaccagcttttggaaaacactaactcaactgtcatccaacttgctgcagttaaccacccgtcagtcacccatcagggggcatgaagctctggtttgatcactttgctaagggctgcacaaggaagaaaaaaagtcataaaacactatattgtcaagcagtactcactgcttctcctcttcactgtcctctaccttgagtccctcaaaatatttcacctgcatgacatttcttcacttgagatgctgtttgccctttaaatggcatcttagcatttgaggtcctctagctgtcttctttcttttccttaggctgacaattctgctgaaagtttgtgaaaagacttgacattcacaaaatctaaggtcttctggtgataccaaatgtaacaggaatggaagcatcatcagcactgtgcaacattatgtttctttagcatggtttggctcaggttacaaaacctgggcagctgtaccacagacagaggctatggccatttcccctctattttatgatcatccctgtttcattactttgtgctttcactacatcctggcctagcagtctgtagcagcaggctagagagataaggccttctggtaataaataaagtagaaggttaaaaccac

SEQ ID NO: 360486 - DNA, 439 bp, Homo sapiens
gaatggaagctctaccaaaaagaagatacattaaaatgcttcacccccggagtaactgctcctagagtggcagctgtgtctgggagtgggatgctcctcccacagacaagcagcagaagagccacttacacagaacctacaagggagcagcccatcagtgaaatgggcccacacaatttcagagaagctctgagtaccagctgtccaagctaatcgatgcactctgtcattcacaaatatgaacagataacctaggaacacttgaaactaaggaaaatgagcagcatggaagagaaggaccaaagggaacaaacagaataactaacttcagaagaaacgtataatttagggaacaaaaggaacttctgaaaacctcacatcaatatccttagaaaaatctgagaaaatatagtatccataaaacaaaaaaagtgatatg

SEQ ID NO: 360487 - DNA, 216 bp, Homo sapiens
gctagcaacccgacaaaatattttctgatggtttttcgtgtatgtggtttttgtttttgagggagagaataattaacaccttggttaaattgtactgagatacaatggctgtttttaaaaattgctgttaactgaagggttgaagctagtataattcccaggctcagcctcttgggaggctgagtctccaatagcatagtcttcaatagactatgc

SEQ ID NO: 360488 - DNA, 306 bp, Homo sapiens
  misc_feature (68)..(68): n is a, c, g, or t
  misc_feature (72)..(73): n is a, c, g, or t
  misc_feature (75)..(75): n is a, c, g, or t
  misc_feature (78)..(79): n is a, c, g, or t
  misc_feature (84)..(84): n is a, c, g, or t
  misc_feature (92)..(92): n is a, c, g, or t
  misc_feature (113)..(113): n is a, c, g, or t
  misc_feature (116)..(116): n is a, c, g, or t
ccccctccccgggtatctaatcccagttggggtcttagctattgtgtgttcagatatgttaaagccantttnntngtnnatttngtgtcaantggagttttttacaactcagntgngttttagctttattggggagggggtgatctaaaacactctttacgccggtttctattgacttgggttaatcgtgtgaccgcggtggctggcacgaaattgaccaaccctggggttagtatagcttagttaaactttcgtttattgctaaaggttaatcactgctgtttcccgtgggggtgtggctaggct

SEQ ID NO: 360489 - DNA, 587 bp, Homo sapiens
gacttgaactccttcctcggctgaagtgatcctcctgcctcagcgtcctgaataggaagtggagccagaatccacagatgtcattatccatctgcacactttgtttactacccagaaggcaagaatattgcattttaaaagtgcccggacttttgttctttcttatcacaaatgacttgggaagctccgaccactcatgtttaccccgagtgaaagtcccattcaaagccttgcttcctggagagctttgagattctggtacaaaaggcattttataagcacaaagtggaaaagcatcattcatattcatttgctgctgcggcatttctccctggaatcttcctcttgtctgtcaacattgggcaaaaggactggcctcatctacattacagatatccttgtgatggtctggaggtaggaaaaggacacccagcacaagagtgagaagggaaactcaagctctcctgttggagagtctcaggcttctttatccataaaactgattggacataattggtgtgggtttatgatttgttttggaaaaacctgagtatgaaatcaatactgtgctttgtgcaaaatggctg

SEQ ID NO: 360490 - DNA, 738 bp, Homo sapiens
taaattaatgttgagttatgttctgtttattatcctgtttgccttacgtttcctgtcgttttccagttgtctgcttgaattctgtttttcaatagtgatttagcaactgataatgtatattgatttcagttttgcttctaatttacatttgtatctgtttggttgatgtatttggcttaatcattttatttttataagcagttgtacaatttgttaatttagctagatgattaaatttggcttctaaagagtttgttttagaaaatagtccctgaagtaaattagtgtttggcatttccaacatgtcaaaggagctggtctcttaaagataactagaaatgtaactctgaattcttaaaagtggttttgtaattttaaacctctgactatatggagctgtatattccagtaggtggtgcaaatcgactccatttcaaatggaaatgtaatttaaacttgtgatgtaactgttttcactgtaaaaataatatttcaacatgtttcgcaactgcaaaattattttcctctctttctaaaggaagcttgatttaccctctcaatgctcatttttcttatggtttattcctcaggtatcattctgatcattgttgttacaggagagatgagaggaagttagaggggctagaagaaccaggagacctgttgaaaatcatgaatacaaagagaggtcgtttgcttctgtgcttcaattctataataaaatgagtacaacgtcag

SEQ ID NO: 360491 - DNA, 713 bp, Homo sapiens
gacttgaactccttcctcggctgaagtgatcctcctgcctcagcgtcctgaataggaagtggagccagaatccacagatgtcattatccatctgcacactttgtttactacccagaaggcaagaatattgcattttaaaagtgcccggacttttgttctttcttatcacaaatgacttgggaagctccgaccactcatgtttaccccgagtgaaagtcccattcaaagccttgcttcctggagagctttgagattctggtacaaaaggcattttataagcacaaagtggaaaagcatcattcatattcatttgctgctgcggcatttctccctggaatcttcctcttgtctgtcaacattgggcaaaaggactggcctcatctacattacagatatccttgtgatggtctggagggacctgtgggagaggcggccatccagagggctctctgaggggtcatttagaatgcaactcttctgggcagaggatggtctgcactggcctccaccacgcaggaaggcttccagagtggagaaatgtccactaacatggcttctgtgaggtcatgtgctgggtgctgggaacacaaaggagagatgagaggaagttagaggggctagaagaaccaggagacctgttgaaaatcatgaatacaaagagaggtcgtttgcttctgtgcttcaattctataataaaatgagtacaacgtcag

SEQ ID NO: 360492 - DNA, 2838 bp, Homo sapiens
taccatggtaggacacaaggcccctgactctccgctttcagcttactgaagatcctcaaaaccaacagcacacagcttccagcgcatgctcctttccccaagaccctgtgggggaacccgccgccagcgcggagccaccgtgactcgtagcctgacttccgtttccgggggcggcttccggcggcgtgacctgaccgcaagaggccaatggagtgtgggagctgaaagggtcttcgctggcggccggacagtactgcttttaaagagacagtgttagggatcttggaagcacagccaacatgtgtgacattgaagaagccactaaccaactcctagatgtgaaccttcatgagaaccagaagtctgtacaagtgacagaaagtgacctcggaagtgaatctgagcttctagtcactattggagccactgtacctactggctttgagcaaacagctgcagatgaagtcagagagaaacttgggtcatcatgcaaaatcagcagagaccgtggcaagatatattttgtcatttcagtggaaagtctggcacaggttcattgtctgagatcagttgataacttatttgtggtggttcaggagtttcaagattaccagttcaaacaaacaaaggaagaagttctaaaggattttgaagacttggctggaaaactcccatggtcaaaccccttaaaagtgtggaaaattaatgccagttttaaaaagaaaaaagcaaagcgcaaaaagataaatcagaattcaagtaaagagaagattaataatggacaagaagtcaaaatcgatcagagaaatgttaaaaaagagttcactagccatgctttagattctcatatcttagattattatgaaaatccagccatcaaagaggatgtatcaacattaataggtgatgatttggcatcttgcaaagatgagactgatgaaagctcaaaagaagaaactgagcctcaagtgctgaagtttagagtcacatgcaacagggcaggagagaaacattgctttacctcaaatgaggctgcaagagattttgggggtgctgttcaagattattttaagtggaaggccgacatgaccaactttgatgtggaggttcttttgaacatccatgataatgaagtcattgtgggcattgcattgactgaagagagtctccaccgaagaaatataacacattttggacctacaactcttagatcaactcttgcctatgggatgctcaggctctgtgatcctctaccttatgatataatagtcgatccaatgtgtggaactggggcaataccaatagagggggccactgaatggtctgactgcttccatattgctggtgataataatccactggctgtgaatagagcagcaaataacattgcatctttattgaccaagagccaaattaaagaaggcaaaccctcctggggcttgcccatagatgctgttcagtgggatatctgcaatctgccattgagaactggctctgtggatattattgtaacagatttgccatttggaaaaaggatgggatccaagaagagaaactggaacctttatccagcttgcctacgggagatgagccgtgtctgcacacctaccacaggccgagctgtactacttactcaagacacaaaatgctttaccaaggcgttatctggaatgcgacacgtatggcgaaaggtggatacagtctgggtgaacgttggtggtcttcgtgctgcagtttacgttctgatacgtacacctcaagcttttgttcatccttcagaacaagacggagaaagaggaactctttggcaatgcaaagaatgaagatgactaatagtacttgtacttcccaccactggaaatgttagcataaaagaacttggagaggaaaaaagtattaacaaaactgcagtctgcactctttaaacctgtttaaggctcttcatcctggttagcaaaaggtgtgaatgtaatgtgatggaatttaaaagttttatgagaccaggcacagtggctcacgactgtaattccagcagtttaggaagccgaagtgtgcagatcacctgaggtccggagaccagcctggccaacatggtgaaaccctgtctctactagaaatacaaaaattagccaggtgtggtggcgggcgcctgtaatcccaactactcaggaggctgaggctagagaatcacttgaacccagcaggcggaggttgcggtgagtcgagatcacgccattgcactccagcctgtgcgacaagagcgaaactctgtctcaaaaagattttataagaaagcagagcttttccttgaagctcttttgaagtggtagcttaattagtattttgttgaaaatactttaaagatgcctagtgaaaagcctactaaagtgctgtgagattggggtttagaacattttattttcaggctttatggcctattttccattgtgtcaagtgcaaaactaccctggcccaaaggaagggcagagaacataattacatcttaggccacatttcattctttgcagctttgctaatccagttgctcaagttctttacctcaacctgaaggaatgaagcattattacattttgtgaatggtgttcagcctataagacgaagtctcacaagacctataggaaagtttaccatctgccttaaatattaaaatatccatctgttattcacattaatacacagaatgaaaatagaggtctaggaattatcaaaggtactgcaaaaatactgtatagaacttatttgtaaatagcacatacattgatagatggggtgtgggaccaacaaaccaaattaaaagaaattgtttttctttcagta

SEQ ID NO: 360493 - DNA, 992 bp, Homo sapiens
tccagtgctccaagacatctgaaacattgtttaatttctgtgtatttgtatagggtccaaaactatccttgctattaatttctatttttattccattgtggccagagaatatgcttgatattatttcaatttttttttttttttttttttttgaaacagggagcagctctgtcacataggcttcttttttgctttgggtacagggtctcattttgtcacccaggctggagtgcagtgacatgatcatggctcactgtagcctcaacctactgagctcaagcaatcctcctgccttggcctccctagtagctaggaatacaggcatgtgccaccatgcccagctaattttttaaaatcttcgtagagatgggggtcttgctgttttgtccaggctggtgtcaaactcctggcctcaagagattctgccgcttcagccttccaaattgctgggattagagacgagtcaccacacctggaccatagtctttaaagtcactacataaattccatcgtatagaaatactgcagtttatatagccttgcctctattttattactaagtcattggttatatatttcattgtctctctgatctaattttttaggacagtgcttctcaaacattaatgtacatgtgaatcacctgggagtactgttaacacagatctgatttagtagtttgggatgggacctaagagtctgcattttccaggaaactccaggacaatgctgatgctgctggtctatgtatcaacattaaatccttttacgtgtattaagacaagtagttggaaggcttcaattttcttaaatactgatttattgtgatgaattaattttgaatggttgtttcatatttattgagggttttttttaatgagcctagtatatggccagtctttttttttttttaattaaaactgataaacatttaaacaaacgtacctttctagcttctgaatattttatcttgtttgtacctacactgtctg

SEQ ID NO: 360494 - DNA, 672 bp, Homo sapiens
  misc_feature (6)..(6): n is a, c, g, or t
acctanaggatcccctcgaatcgacggtttctctctgagcttctagtcactattggagccactgtacctactggctttgagcaaacagctgcagatgaagtcagagagaaacttgggtcatcatgcaaaatcagcagagaccgtggcaagatatattttgtcatttcagtggaaagtctggcacaggttcattgtctgagatcagttgataacttatttgtggtggttcaggagtttcaagattaccagttcaaacaaacaaaggaagaagttctaaaggattttgaagacttggctggaaaactcccatggtcaaaccccttaaaagtgtggaaaattaatgccagttttaaaaagaaaaaagcaaagcgcaaaaagataaatcagaattcaagtaaagagaagattaataatggacaagaagtcaaaatctcttgcagcctcatttgaggtaaagcaatgtttctctcctgccctgttgcatgtgactctaaacttcagcacttgaggctcagtttcttcttttgagctttcatcagtctcatctttgcaagatgccaaatcatcacctattaatgttgatacatcctcattgatggctggattttcataataatctaagatatgagaatctaaagcatggtaagtgaactctttttaacattctctgat

SEQ ID NO: 360495 - DNA, 3444 bp, Homo sapiens
taccatggtaggacacaaggcccctgactctccgctttcagcttactgaagatcctcaaaaccaacagcacacagcttccagcgcatgctcctttccccaagaccctgtgggggaacccgccgccagcgcggagccaccgtgactcgtagcctgacttccgtttccgggggcggcttccggcggcgtgacctgaccgcaagaggccaatggagtgtgggagctgaaagggtcttcgctggcggccggtaactggcggcggttgggaacggccgagtgtggctcttctggtgtttcagcttggggagagaggggtggccttcctcttgcagttgaggccggcgccgagccggacttcagccggatctcgtggcggagcccatcttgctccctctcccaggcctttacccgctccctaggattcccgggccctgtaggtgggagttgggagacgtgagttctctttcattctgcgcctctcattggctctctgaccttgtgcggaacgcgtcctttagctgacctcagctgcattttttagaagatggagattgtattcacagtgactgtcagctttttaacggcgggaactgacgtagtgttaaacactgtcgtgtatcgctggcacagcacaaggacattataggtattctgtactcaattaagttattttgagtcacagaccttttgaaaatctcgtgtaagctatggcccctccacctctctaatacttcccccggcccccaccccaagcacacacaaaagcttatgcataggaaatttgttttactatttcggattacttccaagatctctctcctgatgcccatctatggatcccagagtctggacaagacagtactgcttttaaagagacagtgttagggatcttggaagcacagccaacatgtgtgacattgaagaagccactaaccaactcctagatgtgaaccttcatgagaaccagaagtctgtacaagtgacagaaagtgacctcggaagtgaatctgagcttctagtcactattggagccactgtacctactggctttgagcaaacagctgcagatgaagtcagagagaaacttgggtcatcatgcaaaatcagcagagaccgtggcaagatatattttgtcatttcagtggaaagtctggcacaggttcattgtctgagatcagttgataacttatttgtggtggttcaggagtttcaagattaccagttcaaacaaacaaaggaagaagttctaaaggattttgaagacttggctggaaaactcccatggtcaaaccccttaaaagtgtggaaaattaatgccagttttaaaaagaaaaaagcaaagcgcaaaaagataaatcagaattcaagtaaagagaagattaataatggacaagaagtcaaaatcgatcagagaaatgttaaaaaagagttcactagccatgctttagattctcatatcttagattattatgaaaatccagccatcaaagaggatgtatcaacattaataggtgatgatttggcatcttgcaaagatgagactgatgaaagctcaaaagaagaaactgagcctcaagtgctgaagtttagagtcacatgcaacagggcaggagagaaacattgctttacctcaaatgaggctgcaagagattttgggggtgctgttcaagattattttaagtggaaggccgacatgaccaactttgatgtggaggttcttttgaacatccatgataatgaagtcattgtgggcattgcattgactgaagagagtctccaccgaagaaatataacacattttggacctacaactcttagatcaactcttgcctatgggatgctcaggctctgtgatcctctaccttatgatataatagtcgatccaatgtgtggaactggggcaataccaatagagggggccactgaatggtctgactgcttccatattgctggtgataataatccactggctgtgaatagagcagcaaataacattgcatctttattgaccaagagccaaattaaagaaggcaaaccctcctggggcttgcccatagatgctgttcagtgggatatctgcaatctgccattgagaactggctctgtggatattattgtaacagatttgccatttggaaaaaggatgggatccaagaagagaaactggaacctttatccagcttgcctacgggagatgagccgtgtctgcacacctaccacaggccgagctgtactacttactcaagacacaaaatgctttaccaaggcgttatctggaatgcgacacgtatggcgaaaggtggatacagtctgggtgaacgttggtggtcttcgtgctgcagtttacgttctgatacgtacacctcaagcttttgttcatccttcagaacaagacggagaaagaggaactctttggcaatgcaaagaatgaagatgactaatagtacttgtacttcccaccactggaaatgttagcataaaagaacttggagaggaaaaaagtattaacaaaactgcagtctgcactctttaaacctgtttaaggctcttcatcctggttagcaaaaggtgtgaatgtaatgtgatggaatttaaaagttttatgagaccaggcacagtggctcacgactgtaattccagcagtttaggaagccgaagtgtgcagatcacctgaggtccggagaccagcctggccaacatggtgaaaccctgtctctactagaaatacaaaaattagccaggtgtggtggcgggcgcctgtaatcccaactactcaggaggctgaggctagagaatcacttgaacccagcaggcggaggttgcggtgagtcgagatcacgccattgcactccagcctgtgcgacaagagcgaaactctgtctcaaaaagattttataagaaagcagagcttttccttgaagctcttttgaagtggtagcttaattagtattttgttgaaaatactttaaagatgcctagtgaaaagcctactaaagtgctgtgagattggggtttagaacattttattttcaggctttatggcctattttccattgtgtcaagtgcaaaactaccctggcccaaaggaagggcagagaacataattacatcttaggccacatttcattctttgcagctttgctaatccagttgctcaagttctttacctcaacctgaaggaatgaagcattattacattttgtgaatggtgttcagcctataagacgaagtctcacaagacctataggaaagtttaccatctgccttaaatattaaaatatccatctgttattcacattaatacacagaatgaaaatagaggtctaggaattatcaaaggtactgcaaaaatactgtatagaacttatttgtaaatagcacatacattgatagatggggtgtgggaccaacaaaccaaattaaaagaaattgtttttctttcagta

SEQ ID NO: 360496 - DNA, 2352 bp, Homo sapiens
taccatggtaggacacaaggcccctgactctccgctttcagcttactgaagatcctcaaaaccaacagcacacagcttccagcgcatgctcctttccccaagaccctgtgggggaacccgccgccagcgcggagccaccgtgactcgtagcctgacttccgtttccgggggcggcttccggcggcgtgacctgaccgcaagaggccaatggagtgtgggagctgaaagggtcttcgctggcggccggacagtactgcttttaaagagacagtgttagggatcttggaagcacagccaacatgtgtgacattgaagaagccactaaccaactcctagatgtgaaccttcatgagaaccagaagtctgtacaagtgacagaaagtgacctcggaagtgaatctgagcttctagtcactattggagccactgtacctactggctttgagcaaacagctgcagatgaagtcagagagaaacttgggtcatcatgcaaaatcagcagagaccgtggcaagatatattttgtcatttcagtggaaagtctggcacaggttcattgtctgagatcagttgataacttatttgtggtggttcaggagtttcaagattaccagttcaaacaaacaaaggaagaagttctaaaggattttgaagacttggctggaaaactcccatggtcaaaccccttaaaagtgtggaaaattaatgccagttttaaaaagaaaaaagcaaagcgcaaaaagataaatcagaattcaagtaaagagaagattaataatggacaagaagtcaaaatcgatcagagaaatgttaaaaaagagttcactagccatgctttagattctcatatcttagattattatgaaaatccagccatcaaagaggatgtatcaacattaataggtgatgatttggcatcttgcaaagatgagactgatgaaagctcaaaagaagaaactgagcctcaagtgctgaagtttagagtcacatgcaacagggcaggagagaaacattgctttacctcaaatgaggctgcaagagattttgggggtgctgttcaagattattttaagtggaaggccgacatgaccaactttgatgtggaggttcttttgaacatccatgataatgaagtcattgtgggcattgcattgactgaagagagtctccaccgaagaaatataacacattttggacctacaactcttagatcaactcttgcctatgggatgctcaggctctgtgatcctctaccttatgatataatagtcgatccaatgtgtggaactggggcaataccaatagagggggccactgaatggtctgactgcttccatattgctggtgataataatccactggctgtgaatagagcagcaaataacattgcatctttattgaccaagagccaaattaaagaaggcaaaccctcctggggcttgcccatagatgctgttcagtgggatatctgcaatctgccattgagaactggctctgtggatattattgtaacagatttgccatttggaaaaaggatgggatccaagaagagaaactggaacctttatccagcttgcctacgggagatgagccgtgtctgcacacctaccacaggccgagctgtactacttactcaagacacaaaatgctttaccaaggcgttatctggaatgcgacacgtatggcgaaaggtggatacagtctgggtgaacgttggtggtcttcgtgctgcagtttacgttctgatacgtacacctcaagcttttgttcatccttcagaacaagacggagaaagaggaactctttggcaatgcaaagaatgaagatgactaatagtacttgtacttcccaccactggaaatgttagcataaaagaacttggagaggaaaaaagtattaacaaaactgcagtctgcactctttaaacctgtttaaggctcttcatcctggttagcaaaaggtgtgaatgtaatgtgatggaatttaaaagttttatgagaccaggcacagtggctcacgactgtaattccagcagtttaggaagccgaagtgtgcagatcaccatgttggccaggctagtctcgaactcctgacctcaggagatccgcccacctcggcttcccaaagtgctgggattacaggcatgagccactgcgctagccgtcaatttcttaacaagcatgaaaggggttcatcttgtttggtcttgactgcgtcagatggtggaaatggttgtgtatgtcatgcttttggtgccaatgcttcctgtgcattaccttatgcagagaacaagtagcaactaaatatgtggtgtaagggtaataactaaaacattttggttcggaactgtta

SEQ ID NO: 360497 - DNA, 3236 bp, Homo sapiens
taccatggtaggacacaaggcccctgactctccgctttcagcttactgaagatcctcaaaaccaacagcacacagcttccagcgcatgctcctttccccaagaccctgtgggggaacccgccgccagcgcggagccaccgtgactcgtagcctgacttccgtttccgggggcggcttccggcggcgtgacctgaccgcaagaggccaatggagtgtgggagctgaaagggtcttcgctggcggccggtaactggcggcggttgggaacggccgagtgtggctcttctggtgtttcagcttggggagagaggggtggccttcctcttgcagttgaggccggcgccgagccggacttcagccggatctcgtggcggagcccatcttgctccctctcccaggcctttacccgctccctaggattcccgggccctgtaggtgggagttgggagacgtgagttctctttcattctgcgcctctcattggctctctgaccttgtgcggaacgcgtcctttagctgacctcagctgcattttttagaagatggagattgtattcacagtgactgtcagctttttaacggcgggaactgacgtagtgttaaacactgtcgtgtatcgctggcacagcacaaggacattataggacagtactgcttttaaagagacagtgttagggatcttggaagcacagccaacatgtgtgacattgaagaagccactaaccaactcctagatgtgaaccttcatgagaaccagaagtctgtacaagtgacagaaagtgacctcggaagtgaatctgagcttctagtcactattggagccactgtacctactggctttgagcaaacagctgcagatgaagtcagagagaaacttgggtcatcatgcaaaatcagcagagaccgtggcaagatatattttgtcatttcagtggaaagtctggcacaggttcattgtctgagatcagttgataacttatttgtggtggttcaggagtttcaagattaccagttcaaacaaacaaaggaagaagttctaaaggattttgaagacttggctggaaaactcccatggtcaaaccccttaaaagtgtggaaaattaatgccagttttaaaaagaaaaaagcaaagcgcaaaaagataaatcagaattcaagtaaagagaagattaataatggacaagaagtcaaaatcgatcagagaaatgttaaaaaagagttcactagccatgctttagattctcatatcttagattattatgaaaatccagccatcaaagaggatgtatcaacattaataggtgatgatttggcatcttgcaaagatgagactgatgaaagctcaaaagaagaaactgagcctcaagtgctgaagtttagagtcacatgcaacagggcaggagagaaacattgctttacctcaaatgaggctgcaagagattttgggggtgctgttcaagattattttaagtggaaggccgacatgaccaactttgatgtggaggttcttttgaacatccatgataatgaagtcattgtgggcattgcattgactgaagagagtctccaccgaagaaatataacacattttggacctacaactcttagatcaactcttgcctatgggatgctcaggctctgtgatcctctaccttatgatataatagtcgatccaatgtgtggaactggggcaataccaatagagggggccactgaatggtctgactgcttccatattgctggtgataataatccactggctgtgaatagagcagcaaataacattgcatctttattgaccaagagccaaattaaagaaggcaaaccctcctggggcttgcccatagatgctgttcagtgggatatctgcaatctgccattgagaactggctctgtggatattattgtaacagatttgccatttggaaaaaggatgggatccaagaagagaaactggaacctttatccagcttgcctacgggagatgagccgtgtctgcacacctaccacaggccgagctgtactacttactcaagacacaaaatgctttaccaaggcgttatctggaatgcgacacgtatggcgaaaggtggatacagtctgggtgaacgttggtggtcttcgtgctgcagtttacgttctgatacgtacacctcaagcttttgttcatccttcagaacaagacggagaaagaggaactctttggcaatgcaaagaatgaagatgactaatagtacttgtacttcccaccactggaaatgttagcataaaagaacttggagaggaaaaaagtattaacaaaactgcagtctgcactctttaaacctgtttaaggctcttcatcctggttagcaaaaggtgtgaatgtaatgtgatggaatttaaaagttttatgagaccaggcacagtggctcacgactgtaattccagcagtttaggaagccgaagtgtgcagatcacctgaggtccggagaccagcctggccaacatggtgaaaccctgtctctactagaaatacaaaaattagccaggtgtggtggcgggcgcctgtaatcccaactactcaggaggctgaggctagagaatcacttgaacccagcaggcggaggttgcggtgagtcgagatcacgccattgcactccagcctgtgcgacaagagcgaaactctgtctcaaaaagattttataagaaagcagagcttttccttgaagctcttttgaagtggtagcttaattagtattttgttgaaaatactttaaagatgcctagtgaaaagcctactaaagtgctgtgagattggggtttagaacattttattttcaggctttatggcctattttccattgtgtcaagtgcaaaactaccctggcccaaaggaagggcagagaacataattacatcttaggccacatttcattctttgcagctttgctaatccagttgctcaagttctttacctcaacctgaaggaatgaagcattattacattttgtgaatggtgttcagcctataagacgaagtctcacaagacctataggaaagtttaccatctgccttaaatattaaaatatccatctgttattcacattaatacacagaatgaaaatagaggtctaggaattatcaaaggtactgcaaaaatactgtatagaacttatttgtaaatagcacatacattgatagatggggtgtgggaccaacaaaccaaattaaaagaaattgtttttctttcagta

SEQ ID NO: 360498 - DNA, 2652 bp, Homo sapiens
taccatggtaggacacaaggcccctgactctccgctttcagcttactgaagatcctcaaaaccaacagcacacagcttccagcgcatgctcctttccccaagaccctgtgggggaacccgccgccagcgcggagccaccgtgactcgtagcctgacttccgtttccgggggcggcttccggcggcgtgacctgaccgcaagaggccaatggagtgtgggagctgaaagggtcttcgctggcggccggacagtactgcttttaaagagacagtgttagggatcttggaagcacagccaacatgtgtgacattgaagaagccactaaccaactcctagatgtgaaccttcatgagaaccagaagtctgtacaagtgacagaaagtgacctcggaagtgaatctgagcttctagtcactattggagccactgtacctactggctttgagcaaacagctgcagatgaagtcagagagaaacttgggtcatcatgcaaaatcagcagagaccgtggcaagatatattttgtcatttcagtggaaagtctggcacaggttcattgtctgagatcagttgataacttatttgtggtggttcaggagtttcaagattaccagttcaaacaaacaaaggaagaagttctaaaggattttgaagacttggctggaaaactcccatggtcaaaccccttaaaagtgtggaaaattaatgccagttttaaaaagaaaaaagcaaagcgcaaaaagataaatcagaattcaagtaaagagaagattaataatggacaagaagtcaaaatcgatcagagaaatgttaaaaaagagttcactagccatgctttagattctcatatcttagattattatgaaaatccagccatcaaagaggatgtatcaacattaataggtgatgatttggcatcttgcaaagatgagactgatgaaagctcaaaagaagaaactgagcctcaagtgctgaagtttagagtcacatgcaacagggcaggagagaaacattgctttacctcaaatgaggctgcaagagattttgggggtgctgttcaagattattttaagtggaaggccgacatgaccaactttgatgtggaggttcttttgaacatccatgataatgaagtcattgtgggcattgcattgactgaagagagtctccaccgaagaaatataacacattttggacctacaactcttagatcaactcttgcctatgggatgctcagcaaaccctcctggggcttgcccatagatgctgttcagtgggatatctgcaatctgccattgagaactggctctgtggatattattgtaacagatttgccatttggaaaaaggatgggatccaagaagagaaactggaacctttatccagcttgcctacgggagatgagccgtgtctgcacacctaccacaggccgagctgtactacttactcaagacacaaaatgctttaccaaggcgttatctggaatgcgacacgtatggcgaaaggtggatacagtctgggtgaacgttggtggtcttcgtgctgcagtttacgttctgatacgtacacctcaagcttttgttcatccttcagaacaagacggagaaagaggaactctttggcaatgcaaagaatgaagatgactaatagtacttgtacttcccaccactggaaatgttagcataaaagaacttggagaggaaaaaagtattaacaaaactgcagtctgcactctttaaacctgtttaaggctcttcatcctggttagcaaaaggtgtgaatgtaatgtgatggaatttaaaagttttatgagaccaggcacagtggctcacgactgtaattccagcagtttaggaagccgaagtgtgcagatcacctgaggtccggagaccagcctggccaacatggtgaaaccctgtctctactagaaatacaaaaattagccaggtgtggtggcgggcgcctgtaatcccaactactcaggaggctgaggctagagaatcacttgaacccagcaggcggaggttgcggtgagtcgagatcacgccattgcactccagcctgtgcgacaagagcgaaactctgtctcaaaaagattttataagaaagcagagcttttccttgaagctcttttgaagtggtagcttaattagtattttgttgaaaatactttaaagatgcctagtgaaaagcctactaaagtgctgtgagattggggtttagaacattttattttcaggctttatggcctattttccattgtgtcaagtgcaaaactaccctggcccaaaggaagggcagagaacataattacatcttaggccacatttcattctttgcagctttgctaatccagttgctcaagttctttacctcaacctgaaggaatgaagcattattacattttgtgaatggtgttcagcctataagacgaagtctcacaagacctataggaaagtttaccatctgccttaaatattaaaatatccatctgttattcacattaatacacagaatgaaaatagaggtctaggaattatcaaaggtactgcaaaaatactgtatagaacttatttgtaaatagcacatacattgatagatggggtgtgggaccaacaaaccaaattaaaagaaattgtttttctttcagta

SEQ ID NO: 360499 - DNA, 2473 bp, Homo sapiens
  misc_feature (6)..(6): n is a, c, g, or t
acctanaggatcccctcgaatcgacggtttctctctgagcttctagtcactattggagccactgtacctactggctttgagcaaacagctgcagatgaagtcagagagaaacttgggtcatcatgcaaaatcagcagagaccgtggcaagatatattttgtcatttcagtggaaagtctggcacaggttcattgtctgagatcagttgataacttatttgtggtggttcaggagtttcaagattaccagttcaaacaaacaaaggaagaagttctaaaggattttgaagacttggctggaaaactcccatggtcaaaccccttaaaagtgtggaaaattaatgccagttttaaaaagaaaaaagcaaagcgcaaaaagataaatcagaattcaagtaaagagaagattaataatggacaagaagtcaaaatcgatcagagaaatgttaaaaaagagttcactagccatgctttagattctcatatcttagattattatgaaaatccagccatcaaagaggatgtatcaacattaataggtgatgatttggcatcttgcaaagatgagactgatgaaagctcaaaagaagaaactgagcctcaagtgctgaagtttagagtcacatgcaacagggcaggagagaaacattgctttacctcaaatgaggctgcaagagattttgggggtgctgttcaagattattttaagtggaaggccgacatgaccaactttgatgtggaggttcttttgaacatccatgataatgaagtcattgtgggcattgcattgactgaagagagtctccaccgaagaaatataacacattttggacctacaactcttagatcaactcttgcctatgggatgctcaggctctgtgatcctctaccttatgatataatagtcgatccaatgtgtggaactggggcaataccaatagagggggccactgaatggtctgactgcttccatattgctggtgataataatccactggctgtgaatagagcagcaaataacattgcatctttattgaccaagagccaaattaaagaaggcaaaccctcctggggcttgcccatagatgctgttcagtgggatatctgcaatctgccattgagaactggctctgtggatattattgtaacagatttgccatttggaaaaaggatgggatccaagaagagaaactggaacctttatccagcttgcctacgggagatgagccgtgtctgcacacctaccacaggccgagctgtactacttactcaagacacaaaatgctttaccaaggcgttatctggaatgcgacacgtatggcgaaaggtggatacagtctgggtgaacgttggtggtcttcgtgctgcagtttacgttctgatacgtacacctcaagcttttgttcatccttcagaacaagacggagaaagaggaactctttggcaatgcaaagaatgaagatgactaatagtacttgtacttcccaccactggaaatgttagcataaaagaacttggagaggaaaaaagtattaacaaaactgcagtctgcactctttaaacctgtttaaggctcttcatcctggttagcaaaaggtgtgaatgtaatgtgatggaatttaaaagttttatgagaccaggcacagtggctcacgactgtaattccagcagtttaggaagccgaagtgtgcagatcacctgaggtccggagaccagcctggccaacatggtgaaaccctgtctctactagaaatacaaaaattagccaggtgtggtggcgggcgcctgtaatcccaactactcaggaggctgaggctagagaatcacttgaacccagcaggcggaggttgcggtgagtcgagatcacgccattgcactccagcctgtgcgacaagagcgaaactctgtctcaaaaagattttataagaaagcagagcttttccttgaagctcttttgaagtggtagcttaattagtattttgttgaaaatactttaaagatgcctagtgaaaagcctactaaagtgctgtgagattggggtttagaacattttattttcaggctttatggcctattttccattgtgtcaagtgcaaaactaccctggcccaaaggaagggcagagaacataattacatcttaggccacatttcattctttgcagctttgctaatccagttgctcaagttctttacctcaacctgaaggaatgaagcattattacattttgtgaatggtgttcagcctataagacgaagtctcacaagacctataggaaagtttaccatctgccttaaatattaaaatatccatctgttattcacattaatacacagaatgaaaatagaggtctaggaattatcaaaggtactgcaaaaatactgtatagaacttatttgtaaatagcacatacattgatagatggggtgtgggaccaacaaaccaaattaaaagaaattgtttttctttcagta

SEQ ID NO: 360500 - DNA, 2769 bp, Homo sapiens
taccatggtaggacacaaggcccctgactctccgctttcagcttactgaagatcctcaaaaccaacagcacacagcttccagcgcatgctcctttccccaagaccctgtgggggaacccgccgccagcgcggagccaccgtgactcgtagcctgacttccgtttccgggggcggcttccggcggcgtgacctgaccgcaagaggccaatggagtgtgggagctgaaagggtcttcgctggcggccggacagtactgcttttaaagagacagtgttagggatcttggaagcacagccaacatgtgtgacattgaagaagccactaaccaactcctagatgtgaaccttcatgagaaccagaagtctgtacaagtgacagaaagtgacctcggaagtgaatctgagcttctagtcactattggagccactgtacctactggctttgagcaaacagctgcagatgaagtcagagagaaacttgggtcatcatgcaaaatcagcagagaccgtggcaagatatattttgtcatttcagtggaaagtctggcacaggttcattgtctgagatcagttgataacttatttgtggtggttcaggagtttcaagattaccagttcaaacaaacaaaggaagaagttctaaaggattttgaagacttggctggaaaactcccatggtcaaaccccttaaaagtgtggaaaattaatgccagttttaaaaagaaaaaagcaaagcgcaaaaagataaatcagaattcaagtaaagagaagattaataatggacaagaagtcaaaatcgatcagagaaatgttaaaaaagagttcactagccatgctttagattctcatatcttagattattatgaaaatccagccatcaaagaggatgtatcaacattaataggtgatgatttggcatcttgcaaagatgagactgatgaaagctcaaaagaagaaactgagcctcaagtgctgaagtttagagtcacatgcaacagggcaggagagaaacattgctttacctcaaatgaggctgcaagagattttgggggtgctgttcaagattattttaagtggaaggccgacatgaccaactttgatgtggaggttcttttgaacatccatgataatgaagtcattgtgggcattgcattgactgaagagagtctccaccgaagaaatataacacattttggacctacaactcttagatcaactcttgcctatgggatgctcaggctctgtgatcctctaccttatgatataatagtcgatccaatgtgtggaactggggcaataccaatagagggggccactgaatggtctgactgcttccatattgctggtgataataatccactggctgtgaatagagcagcaaataacattgcatctttattgaccaagagccaaattaaagaaggcaaaccctcctggggcttgcccatagatgctgttcagtgggatatctgcaatctgccattgagaactggctctgtggatattattgtaacagatttgccatttggaaaaagacctaccacaggccgagctgtactacttactcaagacacaaaatgctttaccaaggcgttatctggaatgcgacacgtatggcgaaaggtggatacagtctgggtgaacgttggtggtcttcgtgctgcagtttacgttctgatacgtacacctcaagcttttgttcatccttcagaacaagacggagaaagaggaactctttggcaatgcaaagaatgaagatgactaatagtacttgtacttcccaccactggaaatgttagcataaaagaacttggagaggaaaaaagtattaacaaaactgcagtctgcactctttaaacctgtttaaggctcttcatcctggttagcaaaaggtgtgaatgtaatgtgatggaatttaaaagttttatgagaccaggcacagtggctcacgactgtaattccagcagtttaggaagccgaagtgtgcagatcacctgaggtccggagaccagcctggccaacatggtgaaaccctgtctctactagaaatacaaaaattagccaggtgtggtggcgggcgcctgtaatcccaactactcaggaggctgaggctagagaatcacttgaacccagcaggcggaggttgcggtgagtcgagatcacgccattgcactccagcctgtgcgacaagagcgaaactctgtctcaaaaagattttataagaaagcagagcttttccttgaagctcttttgaagtggtagcttaattagtattttgttgaaaatactttaaagatgcctagtgaaaagcctactaaagtgctgtgagattggggtttagaacattttattttcaggctttatggcctattttccattgtgtcaagtgcaaaactaccctggcccaaaggaagggcagagaacataattacatcttaggccacatttcattctttgcagctttgctaatccagttgctcaagttctttacctcaacctgaaggaatgaagcattattacattttgtgaatggtgttcagcctataagacgaagtctcacaagacctataggaaagtttaccatctgccttaaatattaaaatatccatctgttattcacattaatacacagaatgaaaatagaggtctaggaattatcaaaggtactgcaaaaatactgtatagaacttatttgtaaatagcacatacattgatagatggggtgtgggaccaacaaaccaaattaaaagaaattgtttttctttcagta

SEQ ID NO: 360501 - DNA, 2548 bp, Homo sapiens
taccatggtaggacacaaggcccctgactctccgctttcagcttactgaagatcctcaaaaccaacagcacacagcttccagcgcatgctcctttccccaagaccctgtgggggaacccgccgccagcgcggagccaccgtgactcgtagcctgacttccgtttccgggggcggcttccggcggcgtgacctgaccgcaagaggccaatggagtgtgggagctgaaagggtcttcgctggcggccggacagtactgcttttaaagagacagtgttagggatcttggaagcacagccaacatgtgtgacattgaagaagccactaaccaactcctagatgtgaaccttcatgagaaccagaagtctgtacaagtgacagaaagtgacctcggaagtgaatctgagcttctagtcactattggagccactgtacctactggctttgagcaaacagctgcagatgaagtcagagagaaacttgggtcatcatgcaaaatcagcagagaccgtggcaagatatattttgtcatttcagtggaaagtctggcacaggttcattgtctgagatcagttgataacttatttgtggtggttcaggagtttcaagattaccagttcaaacaaacaaaggaagaagttctaaaggattttgaagacttggctggaaaactcccatggtcaaaccccttaaaagtgtggaaaattaatgccagttttaaaaagaaaaaagcaaagcgcaaaaagataaatcagaattcaagtaaagagaagattaataatggacaagaagtcaaaatcgatcagagaaatgttaaaaaagagttcactagccatgctttagattctcatatcttagattattatgaaaatccagccatcaaagaggatgtatcaacattaataggtgatgatttggcatcttgcaaagatgagactgatgaaagctcaaaagaagaaactgagcctcaagtgctgaagtttagagtcacatgcaacagggcaggagagaaacattgctttacctcaaatgaggctgcaagagattttgggggtgctgttcaagattattttaagtggaaggccgacatgaccaactttgatgtggaggttcttttgaacatccatgataatgaagtcattgtgggcattgcattgactgaagagagtctccaccgaagaaatataacacattttggacctacaactcttagatcaactcttgcctatgggatgctcaggctctgtgatcctctaccttatgatataatagtcgatccaatgtgtggaactggggcaataccaatagagggggccactgaatggtctgactgcttccatattgctggtgataataatccactggctgtgaatagagcagcaaataacattgcatctttattgaccaagagccaaattaaagaagggtaaaaatttaaaagatttcttagcatcttttagttagagaatcactttttatattgactttatgaattaaaactcccagtgcattgtgacgtcattgtaaccaaaatgaatatactatgagactccatttacatttttaaagtttattgaaaataagttatatttttaaaatattattttagcgataatttccccaccatatgcaatttttcatttgtcttattcatatgtcttttcccctacatattggaagaatattttatagactcattttaatttcacaaaattttaaacagtatatttttacataggcttcttttttgctttgggtacagggtctcattttgtcacccaggctggagtgcagtgacatgatcatggctcactgtagcctcaacctactgagctcaagcaatcctcctgccttggcctccctagtagctaggaatacaggcatgtgccaccatgcccagctaattttttaaaatcttcgtagagatgggggtcttgctgttttgtccaggctggtgtcaaactcctggcctcaagagattctgccgcttcagccttccaaattgctgggattagagacgagtcaccacacctggaccatagtctttaaagtcactacataaattccatcgtatagaaatactgcagtttatatagccttgcctctattttattactaagtcattggttatatatttcattgtctctctgatctaattttttaggacagtgcttctcaaacattaatgtacatgtgaatcacctgggagtactgttaacacagatctgatttagtagtttgggatgggacctaagagtctgcattttccaggaaactccaggacaatgctgatgctgctggtctatgtatcaacattaaatccttttacgtgtattaagacaagtagttggaaggcttcaattttcttaaatactgatttattgtgatgaattaattttgaatggttgtttcatatttattgagggttttttttaatgagcctagtatatggccagtctttttttttttttaattaaaactgataaacatttaaacaaacgtacctttctagcttctgaatattttatcttgtttgtacctacactgtctg

SEQ ID NO: 360502 - DNA, 305 bp, Homo sapiens
aaactagggagatgggacattttaaaaatacaaaatatagttagtagctgctttaaaactatcattcctaattttttaaatacttaattgttgatagcttgtgctgttcaaaagctttctcagaaatgtgtttctttttttttcacccagttcattgtctgagatcagttgataacttatttgtggtggttcaggagtttcaagattaccagttcaaacaaacaaaggtgagctatcctaaacatggtggctgatttttggctgtcttccacaaagagattatttccatttttcatagtctgtga

SEQ ID NO: 360503 - DNA, 183 bp, Homo sapiens
gttttaacatacactcttatcttttagggggccactgaatggtctgactgcttccatattgctggtgataataatccactggctgtgaatagagcagcaaataacattgcatctttattgaccaagagccaaattaaagaagggtaaaaatttaaaagatttcttagcatcttttagttagag

SEQ ID NO: 360504 - DNA, 286 bp, Homo sapiens
cagaattctaagcagtttactaactcaacttatttcatagacatgtaatggcaaaggtctggtttctaaaactacagctatttttcatgcctcaggatgcatgaaactgtttttgtttcatatagtccttctattttgtatcttttgcaagtgtttgactcatgagaccttctattataggatgggatccaagaagagaaactggaacctttatccagcttgcctacgggagatgagccgtgtctgcacacctaccacaggccgagctgtactacttactcaagac

SEQ ID NO: 360505 - DNA, 3378 bp, Homo sapiens
taccatggtaggacacaaggcccctgactctccgctttcagcttactgaagatcctcaaaaccaacagcacacagcttccagcgcatgctcctttccccaagaccctgtgggggaacccgccgccagcgcggagccaccgtgactcgtagcctgacttccgtttccgggggcggcttccggcggcgtgacctgaccgcaagaggccaatggagtgtgggagctgaaagggtcttcgctggcggccggtaactggcggcggttgggaacggccgagtgtggctcttctggtgtttcagcttggggagagaggggtggccttcctcttgcagttgaggccggcgccgagccggacttcagccggatctcgtggcggagcccatcttgctccctctcccaggcctttacccgctccctaggattcccgggccctgtaggtgggagttgggagacgacagtactgcttttaaagagacagtgttagggatcttggaagcacagccaacatgtgtgacattgaagaagccactaaccaactcctagatgtgaaccttcatgagaaccagaagtctgtacaagtgacagaaagtgacctcggaagtgaatctgagcttctagtcactattggagccactgtacctactggctttgagcaaacagctgcagatgaagtcagagagaaacttgggtcatcatgcaaaatcagcagagaccgtggcaagatatattttgtcatttcagtggaaagtctggcacaggttcattgtctgagatcagttgataacttatttgtggtggttcaggagtttcaagattaccagttcaaacaaacaaaggaagaagttctaaaggattttgaagacttggctggaaaactcccatggtcaaaccccttaaaagtgtggaaaattaatgccagttttaaaaagaaaaaagcaaagcgcaaaaagataaatcagaattcaagtaaagagaagattaataatggacaagaagtcaaaatcgatcagagaaatgttaaaaaagagttcactagccatgctttagattctcatatcttagattattatgaaaatccagccatcaaagaggatgtatcaacattaataggtgatgatttggcatcttgcaaagatgagactgatgaaagctcaaaagaagaaactgagcctcaagtgctgaagtttagagtcacatgcaacagggcaggagagaaacattgctttacctcaaatgaggctgcaagagattttgggggtgctgttcaagattattttaagtggaaggccgacatgaccaactttgatgtggaggttcttttgaacatccatgataatgaagtcattgtgggcattgcattgactgaagagagtctccaccgaagaaatataacacattttggacctacaactcttagatcaactcttgcctatgggatgctcaggctctgtgatcctctaccttatgatataatagtcgatccaatgtgtggaactggggcaataccaatagagggggccactgaatggtctgactgcttccatattgctggtgataataatccactggctgtgaatagagcagcaaataacattgcatctttattgaccaagagccaaattaaagaaggcaaaccctcctggggcttgcccatagatgctgttcagtgggatatctgcaatctgccattgagaactggctctgtggatattattgtaacagatttgccatttggaaaaaggatgggatccaagaagagaaactggaacctttatccagcttgcctacgggagatgagccgtgtctgcacacctaccacaggccgagctgtactacttactcaagacacaaaatgctttaccaaggcgttatctggaatgcgacacgtatggcgaaaggtggatacagtctgggtgaacgttggtggtcttcgtgctgcagtttacgttctgatacgtacacctcaagcttttgttcatccttcagaacaagacggagaaagaggaactctttggcaatgcaaagaatgaagatgactaatagtacttgtacttcccaccactggaaatgttagcataaaagaacttggagaggaaaaaagtattaacaaaactgcagtctgcactctttaaacctgtttaaggctcttcatcctggttagcaaaaggtgtgaatgtaatgtgatggaatttaaaagttttatgagaccaggcacagtggctcacgactgtaattccagcagtttaggaagccgaagtgtgcagatcacctgaggtccggagaccagcctggccaacatggtgaaaccctgtctctactagaaatacaaaaattagccaggtgtggtggcgggcgcctgtaatcccaactactcaggaggctgaggctagagaatcacttgaacccagcaggcggaggttgcggtgagtcgagatcacgccattgcactccagcctgtgcgacaagagcgaaactctgtctcaaaaagattttataagaaagcagagcttttccttgaagctcttttgaagtggtagcttaattagtattttgttgaaaatactttaaagatgcctagtgaaaagcctactaaagtgctgtgagattggggtttagaacattttattttcaggctttatggcctattttccattgtgtcaagtgcaaaactaccctggcccaaaggaagggcagagaacataattacatcttaggccacatttcattctttgcagctttgctaatccagttgctcaagttctttacctcaacctgaaggaatgaagcattattacattttgtgaatggtgttcagcctataagacgaagtctcacaagacctataggaaagtttaccatctgccttaaatattaaaatatccatctgttattcacattaatacacagaatgaaaatagaggtctaggaattatcaaaggtactgcaaaaatactgtatagaacttatttgtaaatagcacatacattgatagatggggtgtgggaccaacaaaccaaattaaaagaaattgtttttctttcagtacactaaggtgtgtgttttcaaaaccaaacacaaacctgtcaagagtatttgttggctagtttcttaaaaggccaagagaaaaaaaatgatatatctttggaaaacttttaatttgggagttatgtgagttgttactttctcctggatcacgattcacatttaattgcttttccagttgcaacaagtccttcttgagagttttgtggaaaatggtgcttccctgtagtcccagttatgcaggaggctgagactacaggcgcccaccaccatgcccagctaatttttcgtatttttagtagagacggggtttcaccatgttagccaggatggtctcg

SEQ ID NO: 360506 - DNA, 2850 bp, Homo sapiens
taccatggtaggacacaaggcccctgactctccgctttcagcttactgaagatcctcaaaaccaacagcacacagcttccagcgcatgctcctttccccaagaccctgtgggggaacccgccgccagcgcggagccaccgtgactcgtagcctgacttccgtttccgggggcggcttccggcggcgtgacctgaccgcaagaggccaatggagtgtgggagctgaaagggtcttcgctggcggccggacagtactgcttttaaagagacagtgttagggatcttggaagcacagccaacatgtgtgacattgaagaagccactaaccaactcctagatgtgaaccttcatgagaaccagaagtctgtacaagtgacagaaagtgacctcggaagtgaatctgagcttctagtcactattggagccactgtacctactggctttgagcaaacagctgcagatgaagtcagagagaaacttgggtcatcatgcaaaatcagcagagaccgtggcaagatatattttgtcatttcagtggaaagtctggcacaggttcattgtctgagatcagttgataacttatttgtggtggttcaggagtttcaagattaccagttcaaacaaacaaaggaagaagttctaaaggattttgaagacttggctggaaaactcccatggtcaaaccccttaaaagtgtggaaaattaatgccagttttaaaaagaaaaaagcaaagcgcaaaaagataaatcagaattcaagtaaagagaagattaataatggacaagaagtcaaaatcgatcagagaaatgttaaaaaagagttcactagccatgctttagattctcatatcttagattattatgaaaatccagccatcaaagaggatgtatcaacattaataggtgatgatttggcatcttgcaaagatgagactgatgaaagctcaaaagaagaaactgagcctcaagtgctgaagtttagagtcacatgcaacagggcaggagagaaacattgctttacctcaaatgaggctgcaagagattttgggggtgctgttcaagattattttaagtggaaggccgacatgaccaactttgatgtggaggttcttttgaacatccatgataatgaagtcattgtgggcattgcattgactgaagagagtctccaccgaagaaatataacacattttggacctacaactcttagatcaactcttgcctatgggatgctcaggctctgtgatcctctaccttatgatataatagtcgatccaatgtgtggaactggggcaataccaatagagggggccactgaatggtctgactgcttccatattgctggtgataataatccactggctgtgaatagagcagcaaataacattgcatctttattgaccaagagccaaattaaagaaggcaaaccctcctggggcttgcccatagatgctgttcagtgggatatctgcaatctgccattgagaactggctctgtggatattattgtaacagatttgccatttggaaaaaggatgggatccaagaagagaaactggaacctttatccagcttgcctacgggagatgagccgtgtctgcacacctaccacaggccgagctgtactacttactcaagacacaaaatgctttaccaaggcgttatctggaatgcgacacgtatggcgaaaggtggatacagtctgggtgaacgttggtggtcttcgtgctgcagtttacgttctgatacgtacacctcaagcttttgttcatccttcagaacaagacggagaaagaggaactctttggcaatgcaaagaatgaagatgactaatagtacttgtacttcccaccactggaaatgttagcataaaagaacttggagaggaaaaaagtattaacaaaactgcagtctgcactctttaaacctgtttaaggctcttcatcctggttagcaaaaggtgtgaatgtaatgtgatggaatttaaaagttttatgagaccaggcacagtggctcacgactgtaattccagcagtttaggaagccgaagtgtgcagatcacctgaggtccggagaccagcctggccaacatggtgaaaccctgtctctactagaaatacaaaaattagccaggtgtggtggcgggcgcctgtaatcccaactactcaggaggctgaggctagagaatcacttgaacccagcaggcggaggttgcggtgagtcgagatcacgccattgcactccagcctgtgcgacaagagcgaaactctgtctcaaaaagattttataagaaagcagagcttttccttgaagctcttttgaagtggtagcttaattagtattttgttgaaaatactttaaagatgcctagtgaaaagcctactaaagtgctgtgagattggggtttagaacattttattttcaggctttatggcctattttccattgtgtcaagtgcaaaactaccctggcccaaaggaagggcagagaacataattacatcttaggccacatttcattctttgcagctttgctaatccagttgctcaagttctttacctcaacctgaaggaatgaagcattattacattttgtgaatggtgttcagcctataagacgaagtctcacaagacctataggaaagtttaccatctgccttaaatattaaaatatccatctgttattcacattaatacacagaatgaaaatagaggtctaggaattatcaaaggtactgcaaaaatactgtatagaactttattgggaaaccgcccatccttgggtaggggggggggggcccccccccacccaattggaaaaaattttttgtttctccaaaccccgtgggtg

SEQ ID NO: 360507 - DNA, 2627 bp, Homo sapiens
taatatttgggctttatttctttttcttttaaagggacagtactgcttttaaagagacagtgttagggatcttggaagcacagccaacatgtgtgacattgaagaagccactaaccaactcctagatgtgaaccttcatgagaaccagaagtctgtacaagtgacagaaagtgacctcggaagtgaatctgagcttctagtcactattggagccactgtacctactggctttgagcaaacagctgcagatgaagtcagagagaaacttgggtcatcatgcaaaatcagcagagaccgtggcaagatatattttgtcatttcagtggaaagtctggcacaggttcattgtctgagatcagttgataacttatttgtggtggttcaggagtttcaagattaccagttcaaacaaacaaaggaagaagttctaaaggattttgaagacttggctggaaaactcccatggtcaaaccccttaaaagtgtggaaaattaatgccagttttaaaaagaaaaaagcaaagcgcaaaaagataaatcagaattcaagtaaagagaagattaataatggacaagaagtcaaaatcgatcagagaaatgttaaaaaagagttcactagccatgctttagattctcatatcttagattattatgaaaatccagccatcaaagaggatgtatcaacattaataggtgatgatttggcatcttgcaaagatgagactgatgaaagctcaaaagaagaaactgagcctcaagtgctgaagtttagagtcacatgcaacagggcaggagagaaacattgctttacctcaaatgaggctgcaagagattttgggggtgctgttcaagattattttaagtggaaggccgacatgaccaactttgatgtggaggttcttttgaacatccatgataatgaagtcattgtgggcattgcattgactgaagagagtctccaccgaagaaatataacacattttggacctacaactcttagatcaactcttgcctatgggatgctcaggctctgtgatcctctaccttatgatataatagtcgatccaatgtgtggaactggggcaataccaatagagggggccactgaatggtctgactgcttccatattgctggtgataataatccactggctgtgaatagagcagcaaataacattgcatctttattgaccaagagccaaattaaagaaggcaaaccctcctggggcttgcccatagatgctgttcagtgggatatctgcaatctgccattgagaactggctctgtggatattattgtaacagatttgccatttggaaaaaggatgggatccaagaagagaaactggaacctttatccagcttgcctacgggagatgagccgtgtctgcacacctaccacaggccgagctgtactacttactcaagacacaaaatgctttaccaaggcgttatctggaatgcgacacgtatggcgaaaggtggatacagtctgggtgaacgttggtggtcttcgtgctgcagtttacgttctgatacgtacacctcaagcttttgttcatccttcagaacaagacggagaaagaggaactctttggcaatgcaaagaatgaagatgactaatagtacttgtacttcccaccactggaaatgttagcataaaagaacttggagaggaaaaaagtattaacaaaactgcagtctgcactctttaaacctgtttaaggctcttcatcctggttagcaaaaggtgtgaatgtaatgtgatggaatttaaaagttttatgagaccaggcacagtggctcacgactgtaattccagcagtttaggaagccgaagtgtgcagatcacctgaggtccggagaccagcctggccaacatggtgaaaccctgtctctactagaaatacaaaaattagccaggtgtggtggcgggcgcctgtaatcccaactactcaggaggctgaggctagagaatcacttgaacccagcaggcggaggttgcggtgagtcgagatcacgccattgcactccagcctgtgcgacaagagcgaaactctgtctcaaaaagattttataagaaagcagagcttttccttgaagctcttttgaagtggtagcttaattagtattttgttgaaaatactttaaagatgcctagtgaaaagcctactaaagtgctgtgagattggggtttagaacattttattttcaggctttatggcctattttccattgtgtcaagtgcaaaactaccctggcccaaaggaagggcagagaacataattacatcttaggccacatttcattctttgcagctttgctaatccagttgctcaagttctttacctcaacctgaaggaatgaagcattattacattttgtgaatggtgttcagcctataagacgaagtctcacaagacctataggaaagtttaccatctgccttaaatattaaaatatccatctgttattcacattaatacacagaatgaaaatagaggtctaggaattatcaaaggtactgcaaaaatactgtatagaacttatttgtaaatagcacatacattgatagatggggtgtgggaccaacaaaccaaattaaaagaaattgtttttctttcagta

SEQ ID NO: 360508 - DNA, 2722 bp, Homo sapiens
taccatggtaggacacaaggcccctgactctccgctttcagcttactgaagatcctcaaaaccaacagcacacagcttccagcgcatgctcctttccccaagaccctgtgggggaacccgccgccagcgcggagccaccgtgactcgtagcctgacttccgtttccgggggcggcttccggcggcgtgacctgaccgcaagaggccaatggagtgtgggagctgaaagggtcttcgctggcggccggacagtactgcttttaaagagacagtgttagggatcttggaagcacagccaacatgtgtgacattgaagaagccactaaccaactcctagatgtgaaccttcatgagaaccagaagtctgtacaagtgacagaaagtgacctcggaagtgaatctgagcttctagtcactattggagccactgtacctactggctttgagcaaacagctgcagatgaagtcagagagaaacttgggtcatcatgcaaaatcagcagagaccgtggcaagatatattttgtcatttcagtggaaagtctggcacaggttcattgtctgagatcagttgataacttatttgtggtggttcaggagtttcaagattaccagttcaaacaaacaaaggaagaagttctaaaggattttgaagacttggctggaaaactcccatggtcaaaccccttaaaagtgtggaaaattaatgccagttttaaaaagaaaaaagcaaagcgcaaaaagataaatcagaattcaagtaaagagaagattaataatggacaagaagtcaaaatcgatcagagaaatgttaaaaaagagttcactagccatgctttagattctcatatcttagattattatgaaaatccagccatcaaagaggatgtatcaacattaataggtgatgatttggcatcttgcaaagatgagactgatgaaagctcaaaagaagaaactgagcctcaagtgctgaagtttagagtcacatgcaacagggcaggagagaaacattgctttacctcaaatgaggctgcaagagattttgggggtgctgttcaagattattttaagtggaaggccgacatgaccaactttgatgtggaggttcttttgaacatccatgataatgaagtcattgtgggcattgcattgactgaagagagtctccaccgaagaaatataacacattttggacctacaactcttagatcaactcttgcctatgggatgctcaggctctgtgatcctctaccttatgatataatagtcgatccaatgtgtggaactggggcaataccaatagagcaaaccctcctggggcttgcccatagatgctgttcagtgggatatctgcaatctgccattgagaactggctctgtggatattattgtaacagatttgccatttggaaaaaggatgggatccaagaagagaaactggaacctttatccagcttgcctacgggagatgagccgtgtctgcacacctaccacaggccgagctgtactacttactcaagacacaaaatgctttaccaaggcgttatctggaatgcgacacgtatggcgaaaggtggatacagtctgggtgaacgttggtggtcttcgtgctgcagtttacgttctgatacgtacacctcaagcttttgttcatccttcagaacaagacggagaaagaggaactctttggcaatgcaaagaatgaagatgactaatagtacttgtacttcccaccactggaaatgttagcataaaagaacttggagaggaaaaaagtattaacaaaactgcagtctgcactctttaaacctgtttaaggctcttcatcctggttagcaaaaggtgtgaatgtaatgtgatggaatttaaaagttttatgagaccaggcacagtggctcacgactgtaattccagcagtttaggaagccgaagtgtgcagatcacctgaggtccggagaccagcctggccaacatggtgaaaccctgtctctactagaaatacaaaaattagccaggtgtggtggcgggcgcctgtaatcccaactactcaggaggctgaggctagagaatcacttgaacccagcaggcggaggttgcggtgagtcgagatcacgccattgcactccagcctgtgcgacaagagcgaaactctgtctcaaaaagattttataagaaagcagagcttttccttgaagctcttttgaagtggtagcttaattagtattttgttgaaaatactttaaagatgcctagtgaaaagcctactaaagtgctgtgagattggggtttagaacattttattttcaggctttatggcctattttccattgtgtcaagtgcaaaactaccctggcccaaaggaagggcagagaacataattacatcttaggccacatttcattctttgcagctttgctaatccagttgctcaagttctttacctcaacctgaaggaatgaagcattattacattttgtgaatggtgttcagcctataagacgaagtctcacaagacctataggaaagtttaccatctgccttaaatattaaaatatccatctgttattcacattaatacacagaatgaaaatagaggtctaggaattatcaaaggtactgcaaaaatactgtatagaacttatttgtaaatagcacatacattgatagatggggtgtgggaccaacaaaccaaattaaaagaaattgtttttctttcagta

SEQ ID NO: 360509 - DNA, 2984 bp, Homo sapiens
taccatggtaggacacaaggcccctgactctccgctttcagcttactgaagatcctcaaaaccaacagcacacagcttccagcgcatgctcctttccccaagaccctgtgggggaacccgccgccagcgcggagccaccgtgactcgtagcctgacttccgtttccgggggcggcttccggcggcgtgacctgaccgcaagaggccaatggagtgtgggagctgaaagggtcttcgctggcggccggtaactggcggcggttgggaacggccgagtgtggctcttctggtgtttcagcttggggagagaggggtggccttcctcttgcagttgaggccggcgccgagccggacttcagccggatctcgtggcggagcccatcttgctccctctcccaggcctttacccgctccctaggattcccgggccctgtaggtgggagttgggagacgacagtactgcttttaaagagacagtgttagggatcttggaagcacagccaacatgtgtgacattgaagaagccactaaccaactcctagatgtgaaccttcatgagaaccagaagtctgtacaagtgacagaaagtgacctcggaagtgaatctgagcttctagtcactattggagccactgtacctactggctttgagcaaacagctgcagatgaagtcagagagaaacttgggtcatcatgcagttcattgtctgagatcagttgataacttatttgtggtggttcaggagtttcaagattaccagttcaaacaaacaaaggaagaagttctaaaggattttgaagacttggctggaaaactcccatggtcaaaccccttaaaagtgtggaaaattaatgccagttttaaaaagaaaaaagcaaagcgcaaaaagataaatcagaattcaagtaaagagaagattaataatggacaagaagtcaaaatcgatcagagaaatgttaaaaaagagttcactagccatgctttagattctcatatcttagattattatgaaaatccagccatcaaagaggatgtatcaacattaataggtgatgatttggcatcttgcaaagatgagactgatgaaagctcaaaagaagaaactgagcctcaagtgctgaagtttagagtcacatgcaacagggcaggagagaaacattgctttacctcaaatgaggctgcaagagattttgggggtgctgttcaagattattttaagtggaaggccgacatgaccaactttgatgtggaggttcttttgaacatccatgataatgaagtcattgtgggcattgcattgactgaagagagtctccaccgaagaaatataacacattttggacctacaactcttagatcaactcttgcctatgggatgctcaggctctgtgatcctctaccttatgatataatagtcgatccaatgtgtggaactggggcaataccaatagagggggccactgaatggtctgactgcttccatattgctggtgataataatccactggctgtgaatagagcagcaaataacattgcatctttattgaccaagagccaaattaaagaaggcaaaccctcctggggcttgcccatagatgctgttcagtgggatatctgcaatctgccattgagaactggctctgtggatattattgtaacagatttgccatttggaaaaaggatgggatccaagaagagaaactggaacctttatccagcttgcctacgggagatgagccgtgtctgcacacctaccacaggccgagctgtactacttactcaagacacaaaatgctttaccaaggcgttatctggaatgcgacacgtatggcgaaaggtggatacagtctgggtgaacgttggtggtcttcgtgctgcagtttacgttctgatacgtacacctcaagcttttgttcatccttcagaacaagacggagaaagaggaactctttggcaatgcaaagaatgaagatgactaatagtacttgtacttcccaccactggaaatgttagcataaaagaacttggagaggaaaaaagtattaacaaaactgcagtctgcactctttaaacctgtttaaggctcttcatcctggttagcaaaaggtgtgaatgtaatgtgatggaatttaaaagttttatgagaccaggcacagtggctcacgactgtaattccagcagtttaggaagccgaagtgtgcagatcacctgaggtccggagaccagcctggccaacatggtgaaaccctgtctctactagaaatacaaaaattagccaggtgtggtggcgggcgcctgtaatcccaactactcaggaggctgaggctagagaatcacttgaacccagcaggcggaggttgcggtgagtcgagatcacgccattgcactccagcctgtgcgacaagagcgaaactctgtctcaaaaagattttataagaaagcagagcttttccttgaagctcttttgaagtggtagcttaattagtattttgttgaaaatactttaaagatgcctagtgaaaagcctactaaagtgctgtgagattggggtttagaacattttattttcaggctttatggcctattttccattgtgtcaagtgcaaaactaccctggcccaaaggaagggcagagaacataattacatcttaggccacatttcattctttgcagctttgctaatccagttgctcaagttctttacctcaacctgaaggaatgaagcattattacattttgtgaatggtgttcagcctataagacgaagtctcacaagacctataggaaagtttaccatctgccttaaatattaaaatatccatctgttattcacattaatacacagaatgaaaatagaggtctaggaattatcaaaggtactgcaaaaatactgtatagaacttatttgtaaatagcacatacattgatagatggggtgtgggaccaacaaaccaaattaaaagaaattgtttttctttcagta

SEQ ID NO: 360510 - DNA, 1829 bp, Homo sapiens
gtaaactgagggcagctgcaaatgaggggcagagatagggggtgcagtacaagagaatgtaagtggaaggccgacatgagcaacatagagtgtggaggttcttttgaacatccatgataatgaagtcattgtgggcattgcattgactgaagagagtctccaccgaagaaatataacacattttggacctacaactcttagatcaactcttgcctatgggatgctcaggctctgtgatcctctaccttatgatataatagtcgatccaatgtgtggaactggggcaataccaatagagggggccactgaatggtctgactgcttccatattgctggtgataataatccactggctgtgaatagagcagcaaataacattgcatctttattgaccaagagccaaattaaagaaggcaaaccctcctggggcttgcccatagatgctgttcagtgggatatctgcaatctgccattgagaactggctctgtggatattattgtaacagatttgccatttggaaaaaggatgggatccaagaagagaaactggaacctttatccagcttgcctacgggagatgagccgtgtctgcacacctaccacaggccgagctgtactacttactcaagacacaaaatgctttaccaaggcgttatctggaatgcgacacgtatggcgaaaggtggatacagtctgggtgaacgttggtggtcttcgtgctgcagtttacgttctgatacgtacacctcaagcttttgttcatccttcagaacaagacggagaaagaggaactctttggcaatgcaaagaatgaagatgactaatagtacttgtacttcccaccactggaaatgttagcataaaagaacttggagaggaaaaaagtattaacaaaactgcagtctgcactctttaaacctgtttaaggctcttcatcctggttagcaaaaggtgtgaatgtaatgtgatggaatttaaaagttttatgagaccaggcacagtggctcacgactgtaattccagcagtttaggaagccgaagtgtgcagatcacctgaggtccggagaccagcctggccaacatggtgaaaccctgtctctactagaaatacaaaaattagccaggtgtggtggcgggcgcctgtaatcccaactactcaggaggctgaggctagagaatcacttgaacccagcaggcggaggttgcggtgagtcgagatcacgccattgcactccagcctgtgcgacaagagcgaaactctgtctcaaaaagattttataagaaagcagagcttttccttgaagctcttttgaagtggtagcttaattagtattttgttgaaaatactttaaagatgcctagtgaaaagcctactaaagtgctgtgagattggggtttagaacattttattttcaggctttatggcctattttccattgtgtcaagtgcaaaactaccctggcccaaaggaagggcagagaacataattacatcttaggccacatttcattctttgcagctttgctaatccagttgctcaagttctttacctcaacctgaaggaatgaagcattattacattttgtgaatggtgttcagcctataagacgaagtctcacaagacctataggaaagtttaccatctgccttaaatattaaaatatccatctgttattcacattaatacacagaatgaaaatagaggtctaggaattatcaaaggtactgcaaaaatactgtatagaacttatttgtaaatagcacatacattgatagatggggtgtgggaccaacaaaccaaattaaaagaaattgtttttctttcagta

SEQ ID NO: 360511 - DNA, 3239 bp, Homo sapiens
tgattccccgctcgcgactccccaccccccagggctccctaaagagggccacgagctgcgaaagggcgggaaaggcagttggagaagaggtaagcggttactcactccatggctgcagcaaggagaggcggcggcggcctcggctgaagaaagaaggtgggagcggagagcgcaggcgtgaaatcttcccaaggctgcagacaccgacggatttgctttgggagccagagtagctgccgccaccagagtccggagccatgagcgggtttaattttggaggcactggggcccctacaggcgggttcacgtttggcactgcaaagacggcaacaaccacacctgctacagggttttctttctccacctctggcactggagggtttaattttggggctcccttccaaccagccacaagtaccccttccaccggcctgttctcacttgccacccagactccggccacacagacgacaggcttcacttttggaacagcgactcttgcttcggggggaactggattttctttggggatcggtgcttcaaagctcaacttgagcaacacagctgccaccccagccatggcaaaccccagcggctttgggctgggcagcagcaacctcactaatgccatatcgagcaccgtcacctccagccagggcacagcacccaccggctttgtgtttggcccctccaccacctctgtggctccagctaccacatctggaggcttctcattcactggtggaagcacggcccaaccctccggtttcaacattggctcagcagggaattcagcccagcccacggcacctgccacgttgcccttcactccggccacgccagcagccaccacagcaggtgccacacagccagctgctcccacacccacagccaccatcaccagtactgggcccagcctctttgcgtcaatagcaactgctccaacctcatctgccaccactggactctccctctgtacccctgtgaccacagcgggcgcccccactgctgggacacagggcttcagcttaaaggcacctggagcagcttccggcacctccacaacaacatccaccgctgccaccgccaccgccaccaccaccagcagcagcagcaccaccggctttgccttgaatttaaaaccactggcgccagccgggatccccagcaatacagcagctgccgtgaccgctccacctggccctggcgcagctgcaggggcggctgccagctccgccatgacctacgcgcagctggagagcctgatcaacaaatggagcctggagctagaggaccaggagcggcacttcctccagcaggccacccaggtcaacgcctgggaccgcacgctgatcgagaatggagaaaagatcaccagcctgcaccgcgaggtggagaaggtgaagctggaccagaagaggctggaccaggagctcgacttcatcctgtcccagcagaaggagctggaagacctgctgagcccactggaggagttggtcaaggagcagagcgggaccatctacctgcagcacgcggatgaggagcgtgagaaaacctacaagctggctgagaacatcgacgcacagctcaagcgcatggcccaggatctcaaggacatcatcgagcacctgaacacgtccggggcccccgccgacaccagtgacccactgcagcagatctgcaagatcctcaatgcgcacatggactcactgcagtggatcgaccagaactcggccctgctgcagaggaaggtggaggaggtgaccaaggtgtgcgagggccggcgcaaggagcaggagcgcagcttccggatcacctttgactgagcgacagcagccctggggcccgcaggtccctagggagttcatgaggggaatgcgccctgttgtctgtagtttggggttgtggcaagatacttgtttgtttgtttctttctttcacatgactgcccttgacatgatcgctgtgtgctttgcgtttttccatttaggagggtattctgggccttctgcccaggcagcagcctcatgggtgtggcttctgtggctttcatttgagtatctttggccccttttcacctactgcgaccacccacctcatcctggctcagcctggtgatggagaagtgctgatggtcttggtcccagccagggtcgtgggggcagccactctctccaaagcatagtcataggtgtcatgaaaaaataccaaatgtaagagaacctccaagtcagggcgcagtggctcacccctgtaatctcagcactttgggtggccaaggcgggcagatgacttgaggtcaggagttcgagaccagcctggccaacatggtgaaaccccgtctctactaaaaatacaaaaattagtcaggtgtggtggacgcctgtgatctcaatctcagctactcgggaggctgaggcaggagaatcacttgaacccaggaggtgttgcagtgaaccaagatcacaccactgcactccagcctaggcaacagagactctgtctcaaaaaaaaaaaaaaaaaaaagaaactcccaggagacagcagcctagttttcgagtgtgagcttgtgcttgtgaaagctaaccatgctaaccaccaaggcaaagcagcacagtgtgaatagaacagagcgggatcaagaatttcacagaagacaggtcagctgaggggcctgcacacacagggtgttgaggaaccacagatgggcgccgagaggcctgccttttgcctggcccaggctcacccccaccttgggcctcacctcctccaggaagccttcccagctacccgaagctcaggtggccttcttgcaggtccccgtagcaccctgagcctgtaccttgggtggcacttgttatgctatcctgtgctagccgtttgtgcctcgtctcgctgttagattgtgagttcccatgggcagagacccactgtcgttccccgtgtgtccccagcccggtccctgtcacatttgttaaatgaaagaacaatgaagcccagtgtaacgtcagtccacagaaatagccacagcttccagtggtggccgtagacttggctcggaacttagtggcaccagagtaactctagtcagttacagtaaaatccactgtgtgtggaaggcagaagctagcggttgtatcccaagcatcttttgtatttgtctttatactttgctgaattctctgaaatacctattactgtatgttgcttttctaaataaatgtattgtgaaaccaaaa

SEQ ID NO: 360512 - DNA, 386 bp, Homo sapiens
gcacgagcagtggactgacgttacactggaagctgtggctatttctgtggactgacgttacactgggcttcattgttctttcatttaacaaatgtgacagggaccgggctggggacacacggggaacgacagtgggtctctgcccatgggaactcacaatctaacagcgagacgaggcttccagtggtggccgtagacttggctcggaacttagtggcaccagagtaactctagtcagttacagtaaaatccactgtgtgtggaaggcagaagctagcggttgtatcccaagcatcttttgtatttgtctttatactttgctgaattctctgaaatacctattactgtatgttgcttttctaaataaatgtattgtgaaaccaaaa

SEQ ID NO: 360513 - DNA, 3178 bp, Homo sapiens
ctaggtggaggccccgtctgaatcggccgagagcggttactcactccatggctgcagcaaggagaggcggcggcggcctcggctgaagaaagaaggtgggagcggagagcgcaggcgtgaaatcttcccaaggctgcagacaccgacggatttgctttgggagccagagtagctgccgccaccagagtccggagccatgagcgggtttaattttggaggcactggggcccctacaggcgggttcacgtttggcactgcaaagacggcaacaaccacacctgctacagggttttctttctccacctctggcactggagggtttaattttggggctcccttccaaccagccacaagtaccccttccaccggcctgttctcacttgccacccagactccggccacacagacgacaggcttcacttttggaacagcgactcttgcttcggggggaactggattttctttggggatcggtgcttcaaagctcaacttgagcaacacagctgccaccccagccatggcaaaccccagcggctttgggctgggcagcagcaacctcactaatgccatatcgagcaccgtcacctccagccagggcacagcacccaccggctttgtgtttggcccctccaccacctctgtggctccagctaccacatctggaggcttctcattcactggtggaagcacggcccaaccctccggtttcaacattggctcagcagggaattcagcccagcccacggcacctgccacgttgcccttcactccggccacgccagcagccaccacagcaggtgccacacagccagctgctcccacacccacagccaccatcaccagtactgggcccagcctctttgcgtcaatagcaactgctccaacctcatctgccaccactggactctccctctgtacccctgtgaccacagcgggcgcccccactgctgggacacagggcttcagcttaaaggcacctggagcagcttccggcacctccacaacaacatccaccgctgccaccgccaccgccaccaccaccagcagcagcagcaccaccggctttgccttgaatttaaaaccactggcgccagccgggatccccagcaatacagcagctgccgtgaccgctccacctggccctggcgcagctgcaggggcggctgccagctccgccatgacctacgcgcagctggagagcctgatcaacaaatggagcctggagctagaggaccaggagcggcacttcctccagcaggccacccaggtcaacgcctgggaccgcacgctgatcgagaatggagaaaagatcaccagcctgcaccgcgaggtggagaaggtgaagctggaccagaagaggctggaccaggagctcgacttcatcctgtcccagcagaaggagctggaagacctgctgagcccactggaggagttggtcaaggagcagagcgggaccatctacctgcagcacgcggatgaggagcgtgagaaaacctacaagctggctgagaacatcgacgcacagctcaagcgcatggcccaggatctcaaggacatcatcgagcacctgaacacgtccggggcccccgccgacaccagtgacccactgcagcagatctgcaagatcctcaatgcgcacatggactcactgcagtggatcgaccagaactcggccctgctgcagaggaaggtggaggaggtgaccaaggtgtgcgagggccggcgcaaggagcaggagcgcagcttccggatcacctttgactgagcgacagcagccctggggcccgcaggtccctagggagttcatgaggggaatgcgccctgttgtctgtagtttggggttgtggcaagatacttgtttgtttgtttctttctttcacatgactgcccttgacatgatcgctgtgtgctttgcgtttttccatttaggagggtattctgggccttctgcccaggcagcagcctcatgggtgtggcttctgtggctttcatttgagtatctttggccccttttcacctactgcgaccacccacctcatcctggctcagcctggtgatggagaagtgctgatggtcttggtcccagccagggtcgtgggggcagccactctctccaaagcatagtcataggtgtcatgaaaaaataccaaatgtaagagaacctccaagtcagggcgcagtggctcacccctgtaatctcagcactttgggtggccaaggcgggcagatgacttgaggtcaggagttcgagaccagcctggccaacatggtgaaaccccgtctctactaaaaatacaaaaattagtcaggtgtggtggacgcctgtgatctcaatctcagctactcgggaggctgaggcaggagaatcacttgaacccaggaggtgttgcagtgaaccaagatcacaccactgcactccagcctaggcaacagagactctgtctcaaaaaaaaaaaaaaaaaaaagaaactcccaggagacagcagcctagttttcgagtgtgagcttgtgcttgtgaaagctaaccatgctaaccaccaaggcaaagcagcacagtgtgaatagaacagagcgggatcaagaatttcacagaagacaggtcagctgaggggcctgcacacacagggtgttgaggaaccacagatgggcgccgagaggcctgccttttgcctggcccaggctcacccccaccttgggcctcacctcctccaggaagccttcccagctacccgaagctcaggtggccttcttgcaggtccccgtagcaccctgagcctgtaccttgggtggcacttgttatgctatcctgtgctagccgtttgtgcctcgtctcgctgttagattgtgagttcccatgggcagagacccactgtcgttccccgtgtgtccccagcccggtccctgtcacatttgttaaatgaaagaacaatgaagcccagtgtaacgtcagtccacagaaatagccacagcttccagtggtggccgtagacttggctcggaacttagtggcaccagagtaactctagtcagttacagtaaaatccactgtgtgtggaaggcagaagctagcggttgtatcccaagcatcttttgtatttgtctttatactttgctgaattctctgaaatacctattactgtatgttgcttttctaaataaatgtattgtgaaaccaaaa

SEQ ID NO: 360514 - DNA, 3154 bp, Homo sapiens
ctaggtggaggccccgtctgaatcggccgagagcggttactcactccatggctgcagcaaggagaggcggcggcggcctcggctgaagaaagaagaaatcttcccaaggctgcagacaccgacggatttgctttgggagccagagtagctgccgccaccagagtccggagccatgagcgggtttaattttggaggcactggggcccctacaggcgggttcacgtttggcactgcaaagacggcaacaaccacacctgctacagggttttctttctccacctctggcactggagggtttaattttggggctcccttccaaccagccacaagtaccccttccaccggcctgttctcacttgccacccagactccggccacacagacgacaggcttcacttttggaacagcgactcttgcttcggggggaactggattttctttggggatcggtgcttcaaagctcaacttgagcaacacagctgccaccccagccatggcaaaccccagcggctttgggctgggcagcagcaacctcactaatgccatatcgagcaccgtcacctccagccagggcacagcacccaccggctttgtgtttggcccctccaccacctctgtggctccagctaccacatctggaggcttctcattcactggtggaagcacggcccaaccctccggtttcaacattggctcagcagggaattcagcccagcccacggcacctgccacgttgcccttcactccggccacgccagcagccaccacagcaggtgccacacagccagctgctcccacacccacagccaccatcaccagtactgggcccagcctctttgcgtcaatagcaactgctccaacctcatctgccaccactggactctccctctgtacccctgtgaccacagcgggcgcccccactgctgggacacagggcttcagcttaaaggcacctggagcagcttccggcacctccacaacaacatccaccgctgccaccgccaccgccaccaccaccagcagcagcagcaccaccggctttgccttgaatttaaaaccactggcgccagccgggatccccagcaatacagcagctgccgtgaccgctccacctggccctggcgcagctgcaggggcggctgccagctccgccatgacctacgcgcagctggagagcctgatcaacaaatggagcctggagctagaggaccaggagcggcacttcctccagcaggccacccaggtcaacgcctgggaccgcacgctgatcgagaatggagaaaagatcaccagcctgcaccgcgaggtggagaaggtgaagctggaccagaagaggctggaccaggagctcgacttcatcctgtcccagcagaaggagctggaagacctgctgagcccactggaggagttggtcaaggagcagagcgggaccatctacctgcagcacgcggatgaggagcgtgagaaaacctacaagctggctgagaacatcgacgcacagctcaagcgcatggcccaggatctcaaggacatcatcgagcacctgaacacgtccggggcccccgccgacaccagtgacccactgcagcagatctgcaagatcctcaatgcgcacatggactcactgcagtggatcgaccagaactcggccctgctgcagaggaaggtggaggaggtgaccaaggtgtgcgagggccggcgcaaggagcaggagcgcagcttccggatcacctttgactgagcgacagcagccctggggcccgcaggtccctagggagttcatgaggggaatgcgccctgttgtctgtagtttggggttgtggcaagatacttgtttgtttgtttctttctttcacatgactgcccttgacatgatcgctgtgtgctttgcgtttttccatttaggagggtattctgggccttctgcccaggcagcagcctcatgggtgtggcttctgtggctttcatttgagtatctttggccccttttcacctactgcgaccacccacctcatcctggctcagcctggtgatggagaagtgctgatggtcttggtcccagccagggtcgtgggggcagccactctctccaaagcatagtcataggtgtcatgaaaaaataccaaatgtaagagaacctccaagtcagggcgcagtggctcacccctgtaatctcagcactttgggtggccaaggcgggcagatgacttgaggtcaggagttcgagaccagcctggccaacatggtgaaaccccgtctctactaaaaatacaaaaattagtcaggtgtggtggacgcctgtgatctcaatctcagctactcgggaggctgaggcaggagaatcacttgaacccaggaggtgttgcagtgaaccaagatcacaccactgcactccagcctaggcaacagagactctgtctcaaaaaaaaaaaaaaaaaaaagaaactcccaggagacagcagcctagttttcgagtgtgagcttgtgcttgtgaaagctaaccatgctaaccaccaaggcaaagcagcacagtgtgaatagaacagagcgggatcaagaatttcacagaagacaggtcagctgaggggcctgcacacacagggtgttgaggaaccacagatgggcgccgagaggcctgccttttgcctggcccaggctcacccccaccttgggcctcacctcctccaggaagccttcccagctacccgaagctcaggtggccttcttgcaggtccccgtagcaccctgagcctgtaccttgggtggcacttgttatgctatcctgtgctagccgtttgtgcctcgtctcgctgttagattgtgagttcccatgggcagagacccactgtcgttccccgtgtgtccccagcccggtccctgtcacatttgttaaatgaaagaacaatgaagcccagtgtaacgtcagtccacagaaatagccacagcttccagtggtggccgtagacttggctcggaacttagtggcaccagagtaactctagtcagttacagtaaaatccactgtgtgtggaaggcagaagctagcggttgtatcccaagcatcttttgtatttgtctttatactttgctgaattctctgaaatacctattactgtatgttgcttttctaaataaatgtattgtgaaaccaaaa

SEQ ID NO: 360515 - DNA, 3459 bp, Homo sapiens
tgattccccgctcgcgactccccaccccccagggctccctaaagagggccacgagctgcgaaagggcgggaaaggcagttggagaagaggtaagcggttactcactccatggctgcagcaaggagaggcggcggcggcctcggctgaagaaagaaggtgggagcggagagcgcaggcgtgaaatcttcccaaggctgcagacaccgacggatttgctttgggagccagagtagctgccgccaccagagtccggagccatgagcgggtttaattttggaggcactggggcccctacaggcgggttcacgtttggcactgcaaagacggcaacaaccacacctgctacagggttttctttctccacctctggcactggagggtttaattttggggctcccttccaaccagccacaagtaccccttccaccggcctgttctcacttgccacccagactccggccacacagacgacaggcttcacttttggaacagcgactcttgcttcggggggaactggattttctttggggatcggtgcttcaaagctcaacttgagcaacacagctgccaccccagccatggcaaaccccagcggctttgggctgggcagcagcaacctcactaatgccatatcgagcaccgtcacctccagccagggcacagcacccaccggctttgtgtttggcccctccaccacctctgtggctccagctaccacatctggaggcttctcattcactggtggaagcacggcccaaccctccggtttcaacattggctcagcagggaattcagcccagcccacggcacctgccacgttgcccttcactccggccacgccagcagccaccacagcaggtgccacacagccagctgctcccacacccacagccaccatcaccagtactgggcccagcctctttgcgtcaatagcaactgctccaacctcatctgccaccactggactctccctctgtacccctgtgaccacagcgggcgcccccactgctgggacacagggcttcagcttaaaggcacctggagcagcttccggcacctccacaacaacatccaccgctgccaccgccaccgccaccaccaccagcagcagcagcaccaccggctttgccttgaatttaaaaccactggcgccagccgggatccccagcaatacagcagctgccgtgaccgctccacctggccctggcgcagctgcaggggcggctgccagctccgccatgacctacgcgcagctggagagcctgatcaacaaatggagcctggagctagaggaccaggagcggcacttcctccagcaggccacccaggtcaacgcctgggaccgcacgctgatcgagaatggagaaaagatcaccagcctgcaccgcgaggtggagaaggtgaagctggaccagaagaggctggaccaggagctcgacttcatcctgtcccagcagaaggagctggaagacctgctgagcccactggaggagttggtcaaggagcagagcgggaccatctacctgcagcacgcggatgaggagcgtgagaaaacctacaagctggctgagaacatcgacgcacagctcaagcgcatggcccaggatctcaaggacatcatcgagcacctgaacacgtccggggcccccgccgacaccagtgacccactgcagcagatctgcaagatcctcaatgcgcacatggactcactgcagtggatcgaccagaactcggccctgctgcagaggaaggtggaggaggtgaccaaggtgtgcgagggccggcgcaaggagcaggagcgcagcttccggatcacctttgactgagcgacagcagccctggggcccgcaggtccctagggagttcatgaggggaatgcgccctgttgtctgtagtttggggttgtggcaagatacttgtttgtttgtttctttctttcacatgactgcccttgacatgatcgctgtgtgctttgcgtttttccatttaggagggtattctgggccttctgcccaggcagcagcctcatgggtgtggcttctgtggctttcatttgagtatctttggccccttttcacctactgcgaccacccacctcatcctggctcagcctggtgatggagaagtgctgatggtcttggtcccagccagggtcgtgggggcagccactctctccaaagcatagtcataggtgtcatgaaaaaataccaaatgtaagagaacctccaagtcagggcgcagtggctcacccctgtaatctcagcactttgggtggccaaggcgggcagatgacttgaggtcaggagttcgagaccagcctggccaacatggtgaaaccccgtctctactaaaaatacaaaaattagtcaggtgtggtggacgcctgtgatctcaatctcagctactcgggaggctgaggcaggagaatcacttgaacccaggaggtgttgcagtgaaccaagatcacaccactgcactccagcctaggcaacagagactctgtctcaaaaaaaaaaaaaaaaaaaagaaactcccaggagacagcagcctagttttcgagtgtgagcttgtgcttgtgaaagctaaccatgctaaccaccaaggcaaagcagcacagtgtgaatagaacagagcgggatcaagaatttcacagaagacaggtcagctgaggggcctgcacacacagggtgttgaggaaccacagatgggcgccgagaggcctgccttttgcctggcccaggctcacccccaccttgggcctcacctcctccaggaagccttcccagctacccgaagctcaggtggccttcttgcaggtccccgtagcaccctgagcctgtaccttgggtggcacttgttatgctatcctgtgctagccgtttgtgcctcgtctcgctgttagattgtgagttcccatgggcagagacccactgtcgttccccgtgtgtccccagcccggtccctgtcacatttgttaaatgaaagaacaatgaagcccagtgtaacgtcagtccacagaaatagccacagcttccagtggtggccgtagacttggctcggaacttagtggcaccagagtaactctagtcagttacagtaaaatccactgtgtgtggaaggcagaagctagcggttgtatcccaagcatcttttgtatttgtctttatactttgctgaattctctgaaatacctattactgtatgttgcttttctaaataaatgtattgtgaaaccaaaaaaaaaaaaaaaaagctgaaaaaaacagtcaactagattgtgttccccttttgtgttgacttcttagctccgctttattagaatgtgataaaaatgagacctaagtggaaacgatcactgtccattgttttccactcttatcattactgtatccaaaatagtctttctcaatgccaaaccatagtcatttctttattaaactcctcgccaggttctccccg

SEQ ID NO: 360516 - DNA, 3276 bp, Homo sapiens
ctaggtggaggccccgtctgaatcggccgagagcggttactcactccatggctgcagcaaggagaggcggcggcggcctcggctgaagaaagaagaaacccaccttgtcccatccacatcaggacatcccagctggagttcaaccttcatcccttctgtggcagttaggagactgaatcaaggtccagagaaggtggaggaatcctgatactgagcgaaatcttcccaaggctgcagacaccgacggatttgctttgggagccagagtagctgccgccaccagagtccggagccatgagcgggtttaattttggaggcactggggcccctacaggcgggttcacgtttggcactgcaaagacggcaacaaccacacctgctacagggttttctttctccacctctggcactggagggtttaattttggggctcccttccaaccagccacaagtaccccttccaccggcctgttctcacttgccacccagactccggccacacagacgacaggcttcacttttggaacagcgactcttgcttcggggggaactggattttctttggggatcggtgcttcaaagctcaacttgagcaacacagctgccaccccagccatggcaaaccccagcggctttgggctgggcagcagcaacctcactaatgccatatcgagcaccgtcacctccagccagggcacagcacccaccggctttgtgtttggcccctccaccacctctgtggctccagctaccacatctggaggcttctcattcactggtggaagcacggcccaaccctccggtttcaacattggctcagcagggaattcagcccagcccacggcacctgccacgttgcccttcactccggccacgccagcagccaccacagcaggtgccacacagccagctgctcccacacccacagccaccatcaccagtactgggcccagcctctttgcgtcaatagcaactgctccaacctcatctgccaccactggactctccctctgtacccctgtgaccacagcgggcgcccccactgctgggacacagggcttcagcttaaaggcacctggagcagcttccggcacctccacaacaacatccaccgctgccaccgccaccgccaccaccaccagcagcagcagcaccaccggctttgccttgaatttaaaaccactggcgccagccgggatccccagcaatacagcagctgccgtgaccgctccacctggccctggcgcagctgcaggggcggctgccagctccgccatgacctacgcgcagctggagagcctgatcaacaaatggagcctggagctagaggaccaggagcggcacttcctccagcaggccacccaggtcaacgcctgggaccgcacgctgatcgagaatggagaaaagatcaccagcctgcaccgcgaggtggagaaggtgaagctggaccagaagaggctggaccaggagctcgacttcatcctgtcccagcagaaggagctggaagacctgctgagcccactggaggagttggtcaaggagcagagcgggaccatctacctgcagcacgcggatgaggagcgtgagaaaacctacaagctggctgagaacatcgacgcacagctcaagcgcatggcccaggatctcaaggacatcatcgagcacctgaacacgtccggggcccccgccgacaccagtgacccactgcagcagatctgcaagatcctcaatgcgcacatggactcactgcagtggatcgaccagaactcggccctgctgcagaggaaggtggaggaggtgaccaaggtgtgcgagggccggcgcaaggagcaggagcgcagcttccggatcacctttgactgagcgacagcagccctggggcccgcaggtccctagggagttcatgaggggaatgcgccctgttgtctgtagtttggggttgtggcaagatacttgtttgtttgtttctttctttcacatgactgcccttgacatgatcgctgtgtgctttgcgtttttccatttaggagggtattctgggccttctgcccaggcagcagcctcatgggtgtggcttctgtggctttcatttgagtatctttggccccttttcacctactgcgaccacccacctcatcctggctcagcctggtgatggagaagtgctgatggtcttggtcccagccagggtcgtgggggcagccactctctccaaagcatagtcataggtgtcatgaaaaaataccaaatgtaagagaacctccaagtcagggcgcagtggctcacccctgtaatctcagcactttgggtggccaaggcgggcagatgacttgaggtcaggagttcgagaccagcctggccaacatggtgaaaccccgtctctactaaaaatacaaaaattagtcaggtgtggtggacgcctgtgatctcaatctcagctactcgggaggctgaggcaggagaatcacttgaacccaggaggtgttgcagtgaaccaagatcacaccactgcactccagcctaggcaacagagactctgtctcaaaaaaaaaaaaaaaaaaaagaaactcccaggagacagcagcctagttttcgagtgtgagcttgtgcttgtgaaagctaaccatgctaaccaccaaggcaaagcagcacagtgtgaatagaacagagcgggatcaagaatttcacagaagacaggtcagctgaggggcctgcacacacagggtgttgaggaaccacagatgggcgccgagaggcctgccttttgcctggcccaggctcacccccaccttgggcctcacctcctccaggaagccttcccagctacccgaagctcaggtggccttcttgcaggtccccgtagcaccctgagcctgtaccttgggtggcacttgttatgctatcctgtgctagccgtttgtgcctcgtctcgctgttagattgtgagttcccatgggcagagacccactgtcgttccccgtgtgtccccagcccggtccctgtcacatttgttaaatgaaagaacaatgaagcccagtgtaacgtcagtccacagaaatagccacagcttccagtggtggccgtagacttggctcggaacttagtggcaccagagtaactctagtcagttacagtaaaatccactgtgtgtggaaggcagaagctagcggttgtatcccaagcatcttttgtatttgtctttatactttgctgaattctctgaaatacctattactgtatgttgcttttctaaataaatgtattgtgaaaccaaaa

SEQ ID NO: 360517 - DNA, 3273 bp, Homo sapiens
tgattccccgctcgcgactccccaccccccagggctccctaaagagggccacgagctgcgaaagggcgggaaaggcagttggagaagaggtaaaacccaccttgtcccatccacatcaggacatcccagctggagttcaaccttcatcccttctgtggcagttaggagactgaatcaaggtccagagaaggtggaggaatcctgatactgagcgaaatcttcccaaggctgcagacaccgacggatttgctttgggagccagagtagctgccgccaccagagtccggagccatgagcgggtttaattttggaggcactggggcccctacaggcgggttcacgtttggcactgcaaagacggcaacaaccacacctgctacagggttttctttctccacctctggcactggagggtttaattttggggctcccttccaaccagccacaagtaccccttccaccggcctgttctcacttgccacccagactccggccacacagacgacaggcttcacttttggaacagcgactcttgcttcggggggaactggattttctttggggatcggtgcttcaaagctcaacttgagcaacacagctgccaccccagccatggcaaaccccagcggctttgggctgggcagcagcaacctcactaatgccatatcgagcaccgtcacctccagccagggcacagcacccaccggctttgtgtttggcccctccaccacctctgtggctccagctaccacatctggaggcttctcattcactggtggaagcacggcccaaccctccggtttcaacattggctcagcagggaattcagcccagcccacggcacctgccacgttgcccttcactccggccacgccagcagccaccacagcaggtgccacacagccagctgctcccacacccacagccaccatcaccagtactgggcccagcctctttgcgtcaatagcaactgctccaacctcatctgccaccactggactctccctctgtacccctgtgaccacagcgggcgcccccactgctgggacacagggcttcagcttaaaggcacctggagcagcttccggcacctccacaacaacatccaccgctgccaccgccaccgccaccaccaccagcagcagcagcaccaccggctttgccttgaatttaaaaccactggcgccagccgggatccccagcaatacagcagctgccgtgaccgctccacctggccctggcgcagctgcaggggcggctgccagctccgccatgacctacgcgcagctggagagcctgatcaacaaatggagcctggagctagaggaccaggagcggcacttcctccagcaggccacccaggtcaacgcctgggaccgcacgctgatcgagaatggagaaaagatcaccagcctgcaccgcgaggtggagaaggtgaagctggaccagaagaggctggaccaggagctcgacttcatcctgtcccagcagaaggagctggaagacctgctgagcccactggaggagttggtcaaggagcagagcgggaccatctacctgcagcacgcggatgaggagcgtgagaaaacctacaagctggctgagaacatcgacgcacagctcaagcgcatggcccaggatctcaaggacatcatcgagcacctgaacacgtccggggcccccgccgacaccagtgacccactgcagcagatctgcaagatcctcaatgcgcacatggactcactgcagtggatcgaccagaactcggccctgctgcagaggaaggtggaggaggtgaccaaggtgtgcgagggccggcgcaaggagcaggagcgcagcttccggatcacctttgactgagcgacagcagccctggggcccgcaggtccctagggagttcatgaggggaatgcgccctgttgtctgtagtttggggttgtggcaagatacttgtttgtttgtttctttctttcacatgactgcccttgacatgatcgctgtgtgctttgcgtttttccatttaggagggtattctgggccttctgcccaggcagcagcctcatgggtgtggcttctgtggctttcatttgagtatctttggccccttttcacctactgcgaccacccacctcatcctggctcagcctggtgatggagaagtgctgatggtcttggtcccagccagggtcgtgggggcagccactctctccaaagcatagtcataggtgtcatgaaaaaataccaaatgtaagagaacctccaagtcagggcgcagtggctcacccctgtaatctcagcactttgggtggccaaggcgggcagatgacttgaggtcaggagttcgagaccagcctggccaacatggtgaaaccccgtctctactaaaaatacaaaaattagtcaggtgtggtggacgcctgtgatctcaatctcagctactcgggaggctgaggcaggagaatcacttgaacccaggaggtgttgcagtgaaccaagatcacaccactgcactccagcctaggcaacagagactctgtctcaaaaaaaaaaaaaaaaaaaagaaactcccaggagacagcagcctagttttcgagtgtgagcttgtgcttgtgaaagctaaccatgctaaccaccaaggcaaagcagcacagtgtgaatagaacagagcgggatcaagaatttcacagaagacaggtcagctgaggggcctgcacacacagggtgttgaggaaccacagatgggcgccgagaggcctgccttttgcctggcccaggctcacccccaccttgggcctcacctcctccaggaagccttcccagctacccgaagctcaggtggccttcttgcaggtccccgtagcaccctgagcctgtaccttgggtggcacttgttatgctatcctgtgctagccgtttgtgcctcgtctcgctgttagattgtgagttcccatgggcagagacccactgtcgttccccgtgtgtccccagcccggtccctgtcacatttgttaaatgaaagaacaatgaagcccagtgtaacgtcagtccacagaaatagccacagcttccagtggtggccgtagacttggctcggaacttagtggcaccagagtaactctagtcagttacagtaaaatccactgtgtgtggaaggcagaagctagcggttgtatcccaagcatcttttgtatttgtctttatactttgctgaattctctgaaatacctattactgtatgttgcttttctaaataaatgtattgtgaaaccaaaa

SEQ ID NO: 360518 - DNA, 2602 bp, Homo sapiens
cggctaggtagcgagggctgggtgttgcaccaccggctttgtgtttggcccctccaccacctctgtggctccagctaccacatctggaggcttctcattcactggtggaagcacggcccaaccctccggtttcaacattggctcagcagggaattcagcccagcccacggcacctgccacgttgcccttcactccggccacgccagcagccaccacagcaggtgccacacagccagctgctcccacacccacagccaccatcaccagtactgggcccagcctctttgcgtcaatagcaactgctccaacctcatctgccaccactggactctccctctgtacccctgtgaccacagcgggcgcccccactgctgggacacagggcttcagcttaaaggcacctggagcagcttccggcacctccacaacaacatccaccgctgccaccgccaccgccaccaccaccagcagcagcagcaccaccggctttgccttgaatttaaaaccactggcgccagccgggatccccagcaatacagcagctgccgtgaccgctccacctggccctggcgcagctgcaggggcggctgccagctccgccatgacctacgcgcagctggagagcctgatcaacaaatggagcctggagctagaggaccaggagcggcacttcctccagcaggccacccaggtcaacgcctgggaccgcacgctgatcgagaatggagaaaagatcaccagcctgcaccgcgaggtggagaaggtgaagctggaccagaagaggctggaccaggagctcgacttcatcctgtcccagcagaaggagctggaagacctgctgagcccactggaggagttggtcaaggagcagagcgggaccatctacctgcagcacgcggatgaggagcgtgagaaaacctacaagctggctgagaacatcgacgcacagctcaagcgcatggcccaggatctcaaggacatcatcgagcacctgaacacgtccggggcccccgccgacaccagtgacccactgcagcagatctgcaagatcctcaatgcgcacatggactcactgcagtggatcgaccagaactcggccctgctgcagaggaaggtggaggaggtgaccaaggtgtgcgagggccggcgcaaggagcaggagcgcagcttccggatcacctttgactgagcgacagcagccctggggcccgcaggtccctagggagttcatgaggggaatgcgccctgttgtctgtagtttggggttgtggcaagatacttgtttgtttgtttctttctttcacatgactgcccttgacatgatcgctgtgtgctttgcgtttttccatttaggagggtattctgggccttctgcccaggcagcagcctcatgggtgtggcttctgtggctttcatttgagtatctttggccccttttcacctactgcgaccacccacctcatcctggctcagcctggtgatggagaagtgctgatggtcttggtcccagccagggtcgtgggggcagccactctctccaaagcatagtcataggtgtcatgaaaaaataccaaatgtaagagaacctccaagtcagggcgcagtggctcacccctgtaatctcagcactttgggtggccaaggcgggcagatgacttgaggtcaggagttcgagaccagcctggccaacatggtgaaaccccgtctctactaaaaatacaaaaattagtcaggtgtggtggacgcctgtgatctcaatctcagctactcgggaggctgaggcaggagaatcacttgaacccaggaggtgttgcagtgaaccaagatcacaccactgcactccagcctaggcaacagagactctgtctcaaaaaaaaaaaaaaaaaaaagaaactcccaggagacagcagcctagttttcgagtgtgagcttgtgcttgtgaaagctaaccatgctaaccaccaaggcaaagcagcacagtgtgaatagaacagagcgggatcaagaatttcacagaagacaggtcagctgaggggcctgcacacacagggtgttgaggaaccacagatgggcgccgagaggcctgccttttgcctggcccaggctcacccccaccttgggcctcacctcctccaggaagccttcccagctacccgaagctcaggtggccttcttgcaggtccccgtagcaccctgagcctgtaccttgggtggcacttgttatgctatcctgtgctagccgtttgtgcctcgtctcgctgttagattgtgagttcccatgggcagagacccactgtcgttccccgtgtgtccccagcccggtccctgtcacatttgttaaatgaaagaacaatgaagcccagtgtaacgtcagtccacagaaatagccacagcttccagtggtggccgtagacttggctcggaacttagtggcaccagagtaactctagtcagttacagtaaaatccactgtgtgtggaaggcagaagctagcggttgtatcccaagcatcttttgtatttgtctttatactttgctgaattctctgaaatacctattactgtatgttgcttttctaaataaatgtattgtgaaaccaaaa

SEQ ID NO: 360519 - DNA, 2823 bp, Homo sapiens
tgattccccgctcgcgactccccaccccccagggctccctaaagagggccacgagctgcgaaagggcgggaaaggcagttggagaagaggtaagcggttactcactccatggctgcagcaaggagaggcggcggcggcctcggctgaagaaagaaggtgggagcggagagcgcaggcgtgccgaggtggatgtccgtcttttctctgttgcagaaacccaccttgtcccatccacatcaggacatcccagctggagttcaaccttcatccccctccaccacctctgtggctccagctaccacatctggaggcttctcattcactggtggaagcacggcccaaccctccggtttcaacattggctcagcagggaattcagcccagcccacggcacctgccacgttgcccttcactccggccacgccagcagccaccacagcaggtgccacacagccagctgctcccacacccacagccaccatcaccagtactgggcccagcctctttgcgtcaatagcaactgctccaacctcatctgccaccactggactctccctctgtacccctgtgaccacagcgggcgcccccactgctgggacacagggcttcagcttaaaggcacctggagcagcttccggcacctccacaacaacatccaccgctgccaccgccaccgccaccaccaccagcagcagcagcaccaccggctttgccttgaatttaaaaccactggcgccagccgggatccccagcaatacagcagctgccgtgaccgctccacctggccctggcgcagctgcaggggcggctgccagctccgccatgacctacgcgcagctggagagcctgatcaacaaatggagcctggagctagaggaccaggagcggcacttcctccagcaggccacccaggtcaacgcctgggaccgcacgctgatcgagaatggagaaaagatcaccagcctgcaccgcgaggtggagaaggtgaagctggaccagaagaggctggaccaggagctcgacttcatcctgtcccagcagaaggagctggaagacctgctgagcccactggaggagttggtcaaggagcagagcgggaccatctacctgcagcacgcggatgaggagcgtgagaaaacctacaagctggctgagaacatcgacgcacagctcaagcgcatggcccaggatctcaaggacatcatcgagcacctgaacacgtccggggcccccgccgacaccagtgacccactgcagcagatctgcaagatcctcaatgcgcacatggactcactgcagtggatcgaccagaactcggccctgctgcagaggaaggtggaggaggtgaccaaggtgtgcgagggccggcgcaaggagcaggagcgcagcttccggatcacctttgactgagcgacagcagccctggggcccgcaggtccctagggagttcatgaggggaatgcgccctgttgtctgtagtttggggttgtggcaagatacttgtttgtttgtttctttctttcacatgactgcccttgacatgatcgctgtgtgctttgcgtttttccatttaggagggtattctgggccttctgcccaggcagcagcctcatgggtgtggcttctgtggctttcatttgagtatctttggccccttttcacctactgcgaccacccacctcatcctggctcagcctggtgatggagaagtgctgatggtcttggtcccagccagggtcgtgggggcagccactctctccaaagcatagtcataggtgtcatgaaaaaataccaaatgtaagagaacctccaagtcagggcgcagtggctcacccctgtaatctcagcactttgggtggccaaggcgggcagatgacttgaggtcaggagttcgagaccagcctggccaacatggtgaaaccccgtctctactaaaaatacaaaaattagtcaggtgtggtggacgcctgtgatctcaatctcagctactcgggaggctgaggcaggagaatcacttgaacccaggaggtgttgcagtgaaccaagatcacaccactgcactccagcctaggcaacagagactctgtctcaaaaaaaaaaaaaaaaaaaagaaactcccaggagacagcagcctagttttcgagtgtgagcttgtgcttgtgaaagctaaccatgctaaccaccaaggcaaagcagcacagtgtgaatagaacagagcgggatcaagaatttcacagaagacaggtcagctgaggggcctgcacacacagggtgttgaggaaccacagatgggcgccgagaggcctgccttttgcctggcccaggctcacccccaccttgggcctcacctcctccaggaagccttcccagctacccgaagctcaggtggccttcttgcaggtccccgtagcaccctgagcctgtaccttgggtggcacttgttatgctatcctgtgctagccgtttgtgcctcgtctcgctgttagattgtgagttcccatgggcagagacccactgtcgttccccgtgtgtccccagcccggtccctgtcacatttgttaaatgaaagaacaatgaagcccagtgtaacgtcagtccacagaaatagccacagcttccagtggtggccgtagacttggctcggaacttagtggcaccagagtaactctagtcagttacagtaaaatccactgtgtgtggaaggcagaagctagcggttgtatcccaagcatcttttgtatttgtctttatactttgctgaattctctgaaatacctattactgtatgttgcttttctaaataaatgtattgtgaaaccaaaa

SEQ ID NO: 360520 - DNA, 503 bp, Homo sapiens
attcaacaaagtataaagacaaatacaaaagatgcttgggatacaaccgctagcttctgccttccacacacagtggattttactgtaactgactagagttactctggtgccactaagttccgagccaagtctaccgccaccggggggagcctcgtctcgctgttagattgtgagttcccatgggcagagacccactgtcgttccccgtgtgtccccagcccggtccctgtcacatttgttaaatgaaagaacaatgaagcccagtgtaacgtcagtccacagaaatagccacagcttccagtggtggccgtagacttggctcggaacttagtggcaccagagtaactctagtcagttacagtaaaatccactgtgtgtggaaggcagaagctagcggttgtatcccaagcatcttttgtatttgtctttatactttgctgaattctctgaaatacctattactgtatgttgcttttctaaataaatgtattgtgaaaccaaaa

SEQ ID NO: 360521 - DNA, 626 bp, Homo sapiens
ctaggtggaggccccgtctgaatcggccgagagcggttactcactccatggctgcagcaaggagaggcggcggcggcctcggctgaagaaagaaggtgggagcggagagcgcaggcgtgccgaggtggatgtccgtcttttctctgttgcagaaacccaccttgtcccatccacatcaggacatcccagctggagttcaaccttcatcccttctgtggcagttaggagactgaatcaaggtccagagaaggtggaggaatcctgatactgagcgaaatcttcccaaggctgcagacaccgacggatttgctttgggagccagagtagctgccgccaccagacccggtccctgtcacatttgttaaatgaaagaacaatgaagcccagtgtaacgtcagtccacagaaatagccacagcttccagtggtggccgtagacttggctcggaacttagtggcaccagagtaactctagtcagttacagtaaaatccactgtgtgtggaaggcagaagctagcggttgtatcccaagcatcttttgtatttgtctttatactttgctgaattctctgaaatacctattactgtatgttgcttttctaaataaatgtattgtgaaaccaaaa

SEQ ID NO: 360522 - DNA, 881 bp, Homo sapiens
tgattccccgctcgcgactccccaccccccagggctccctaaagagggccacgagctgcgaaagggcgggaaaggcagttggagaagaggtaaaacccaccttgtcccatccacatcaggacatcccagctggagttcaaccttcatcccttctgtggcagttaggagactgaatcaaggtccagagaaggtggaggaatcctgatactgagcgaaatcttcccaaggctgcagacaccgacggatttgctttgggagccagagtagctgccgccaccagagtccggagccatgagcgggtttaattttggaggcactggggcccctacaggcgggttcacgtttggcactgcaaagacggcaacaaccacacctgctacagggttttctttctccacctctggcactggagggtttaattttggggctcccttccaaccagccacaagtaccccttccaccggcctgttctcacttgccacccagactccggccacacagacgacaggcttcacttttggaacagcgactcttgcttcggggggaactggattttctttggggatcggtgcttcaaagctcaacttgagcaacacagctgccaccccagccatggcaaaccccagcggctttgggctgggcagcagcaacctcactaatgccatatcgagcaccgtcacctccagccagggcacagcacccaccggctttgtgtttggcccctccaccacctctgtggctccagctaccacatctggaggcttctcattcactggtggaagcacggcccaaccctccggtttcaacatggtcaggggatcagccgccaggcggccgtgcctaccagcggaaagggcgatcctttaaaaaggggtaggccg

SEQ ID NO: 360523 - DNA, 3361 bp, Homo sapiens
tgattccccgctcgcgactccccaccccccagggctccctaaagagggccacgagctgcgaaagggcgggaaaggcagttggagaagaggtaagcggttactcactccatggctgcagcaaggagaggcggcggcggcctcggctgaagaaagaaggtgggagcggagagcgcaggcgtgaaacccaccttgtcccatccacatcaggacatcccagctggagttcaaccttcatcccttctgtggcagttaggagactgaatcaaggtccagagaaggtggaggaatcctgatactgagcgaaatcttcccaaggctgcagacaccgacggatttgctttgggagccagagtagctgccgccaccagagtccggagccatgagcgggtttaattttggaggcactggggcccctacaggcgggttcacgtttggcactgcaaagacggcaacaaccacacctgctacagggttttctttctccacctctggcactggagggtttaattttggggctcccttccaaccagccacaagtaccccttccaccggcctgttctcacttgccacccagactccggccacacagacgacaggcttcacttttggaacagcgactcttgcttcggggggaactggattttctttggggatcggtgcttcaaagctcaacttgagcaacacagctgccaccccagccatggcaaaccccagcggctttgggctgggcagcagcaacctcactaatgccatatcgagcaccgtcacctccagccagggcacagcacccaccggctttgtgtttggcccctccaccacctctgtggctccagctaccacatctggaggcttctcattcactggtggaagcacggcccaaccctccggtttcaacattggctcagcagggaattcagcccagcccacggcacctgccacgttgcccttcactccggccacgccagcagccaccacagcaggtgccacacagccagctgctcccacacccacagccaccatcaccagtactgggcccagcctctttgcgtcaatagcaactgctccaacctcatctgccaccactggactctccctctgtacccctgtgaccacagcgggcgcccccactgctgggacacagggcttcagcttaaaggcacctggagcagcttccggcacctccacaacaacatccaccgctgccaccgccaccgccaccaccaccagcagcagcagcaccaccggctttgccttgaatttaaaaccactggcgccagccgggatccccagcaatacagcagctgccgtgaccgctccacctggccctggcgcagctgcaggggcggctgccagctccgccatgacctacgcgcagctggagagcctgatcaacaaatggagcctggagctagaggaccaggagcggcacttcctccagcaggccacccaggtcaacgcctgggaccgcacgctgatcgagaatggagaaaagatcaccagcctgcaccgcgaggtggagaaggtgaagctggaccagaagaggctggaccaggagctcgacttcatcctgtcccagcagaaggagctggaagacctgctgagcccactggaggagttggtcaaggagcagagcgggaccatctacctgcagcacgcggatgaggagcgtgagaaaacctacaagctggctgagaacatcgacgcacagctcaagcgcatggcccaggatctcaaggacatcatcgagcacctgaacacgtccggggcccccgccgacaccagtgacccactgcagcagatctgcaagatcctcaatgcgcacatggactcactgcagtggatcgaccagaactcggccctgctgcagaggaaggtggaggaggtgaccaaggtgtgcgagggccggcgcaaggagcaggagcgcagcttccggatcacctttgactgagcgacagcagccctggggcccgcaggtccctagggagttcatgaggggaatgcgccctgttgtctgtagtttggggttgtggcaagatacttgtttgtttgtttctttctttcacatgactgcccttgacatgatcgctgtgtgctttgcgtttttccatttaggagggtattctgggccttctgcccaggcagcagcctcatgggtgtggcttctgtggctttcatttgagtatctttggccccttttcacctactgcgaccacccacctcatcctggctcagcctggtgatggagaagtgctgatggtcttggtcccagccagggtcgtgggggcagccactctctccaaagcatagtcataggtgtcatgaaaaaataccaaatgtaagagaacctccaagtcagggcgcagtggctcacccctgtaatctcagcactttgggtggccaaggcgggcagatgacttgaggtcaggagttcgagaccagcctggccaacatggtgaaaccccgtctctactaaaaatacaaaaattagtcaggtgtggtggacgcctgtgatctcaatctcagctactcgggaggctgaggcaggagaatcacttgaacccaggaggtgttgcagtgaaccaagatcacaccactgcactccagcctaggcaacagagactctgtctcaaaaaaaaaaaaaaaaaaaagaaactcccaggagacagcagcctagttttcgagtgtgagcttgtgcttgtgaaagctaaccatgctaaccaccaaggcaaagcagcacagtgtgaatagaacagagcgggatcaagaatttcacagaagacaggtcagctgaggggcctgcacacacagggtgttgaggaaccacagatgggcgccgagaggcctgccttttgcctggcccaggctcacccccaccttgggcctcacctcctccaggaagccttcccagctacccgaagctcaggtggccttcttgcaggtccccgtagcaccctgagcctgtaccttgggtggcacttgttatgctatcctgtgctagccgtttgtgcctcgtctcgctgttagattgtgagttcccatgggcagagacccactgtcgttccccgtgtgtccccagcccggtccctgtcacatttgttaaatgaaagaacaatgaagcccagtgtaacgtcagtccacagaaatagccacagcttccagtggtggccgtagacttggctcggaacttagtggcaccagagtaactctagtcagttacagtaaaatccactgtgtgtggaaggcagaagctagcggttgtatcccaagcatcttttgtatttgtctttatactttgctgaattctctgaaatacctattactgtatgttgcttttctaaataaatgtattgtgaaaccaaaa

SEQ ID NO: 360524 - DNA, 3394 bp, Homo sapiens
tgattccccgctcgcgactccccaccccccagggctccctaaagagggccacgagctgcgaaagggcgggaaaggcagttggagaagaggtaagcggttactcactccatggctgcagcaaggagaggcggcggcggcctcggctgaagaaagaaggtgggagcggagagcgcaggcgtgccgaggtggatgtccgtcttttctctgttgcagaaacccaccttgtcccatccacatcaggacatcccagctggagttcaaccttcatcccttctgtggcagttaggagactgaatcaaggtccagagaaggtggaggaatcctgatactgagcgaaatcttcccaaggctgcagacaccgacggatttgctttgggagccagagtagctgccgccaccagagtccggagccatgagcgggtttaattttggaggcactggggcccctacaggcgggttcacgtttggcactgcaaagacggcaacaaccacacctgctacagggttttctttctccacctctggcactggagggtttaattttggggctcccttccaaccagccacaagtaccccttccaccggcctgttctcacttgccacccagactccggccacacagacgacaggcttcacttttggaacagcgactcttgcttcggggggaactggattttctttggggatcggtgcttcaaagctcaacttgagcaacacagctgccaccccagccatggcaaaccccagcggctttgggctgggcagcagcaacctcactaatgccatatcgagcaccgtcacctccagccagggcacagcacccaccggctttgtgtttggcccctccaccacctctgtggctccagctaccacatctggaggcttctcattcactggtggaagcacggcccaaccctccggtttcaacattggctcagcagggaattcagcccagcccacggcacctgccacgttgcccttcactccggccacgccagcagccaccacagcaggtgccacacagccagctgctcccacacccacagccaccatcaccagtactgggcccagcctctttgcgtcaatagcaactgctccaacctcatctgccaccactggactctccctctgtacccctgtgaccacagcgggcgcccccactgctgggacacagggcttcagcttaaaggcacctggagcagcttccggcacctccacaacaacatccaccgctgccaccgccaccgccaccaccaccagcagcagcagcaccaccggctttgccttgaatttaaaaccactggcgccagccgggatccccagcaatacagcagctgccgtgaccgctccacctggccctggcgcagctgcaggggcggctgccagctccgccatgacctacgcgcagctggagagcctgatcaacaaatggagcctggagctagaggaccaggagcggcacttcctccagcaggccacccaggtcaacgcctgggaccgcacgctgatcgagaatggagaaaagatcaccagcctgcaccgcgaggtggagaaggtgaagctggaccagaagaggctggaccaggagctcgacttcatcctgtcccagcagaaggagctggaagacctgctgagcccactggaggagttggtcaaggagcagagcgggaccatctacctgcagcacgcggatgaggagcgtgagaaaacctacaagctggctgagaacatcgacgcacagctcaagcgcatggcccaggatctcaaggacatcatcgagcacctgaacacgtccggggcccccgccgacaccagtgacccactgcagcagatctgcaagatcctcaatgcgcacatggactcactgcagtggatcgaccagaactcggccctgctgcagaggaaggtggaggaggtgaccaaggtgtgcgagggccggcgcaaggagcaggagcgcagcttccggatcacctttgactgagcgacagcagccctggggcccgcaggtccctagggagttcatgaggggaatgcgccctgttgtctgtagtttggggttgtggcaagatacttgtttgtttgtttctttctttcacatgactgcccttgacatgatcgctgtgtgctttgcgtttttccatttaggagggtattctgggccttctgcccaggcagcagcctcatgggtgtggcttctgtggctttcatttgagtatctttggccccttttcacctactgcgaccacccacctcatcctggctcagcctggtgatggagaagtgctgatggtcttggtcccagccagggtcgtgggggcagccactctctccaaagcatagtcataggtgtcatgaaaaaataccaaatgtaagagaacctccaagtcagggcgcagtggctcacccctgtaatctcagcactttgggtggccaaggcgggcagatgacttgaggtcaggagttcgagaccagcctggccaacatggtgaaaccccgtctctactaaaaatacaaaaattagtcaggtgtggtggacgcctgtgatctcaatctcagctactcgggaggctgaggcaggagaatcacttgaacccaggaggtgttgcagtgaaccaagatcacaccactgcactccagcctaggcaacagagactctgtctcaaaaaaaaaaaaaaaaaaaagaaactcccaggagacagcagcctagttttcgagtgtgagcttgtgcttgtgaaagctaaccatgctaaccaccaaggcaaagcagcacagtgtgaatagaacagagcgggatcaagaatttcacagaagacaggtcagctgaggggcctgcacacacagggtgttgaggaaccacagatgggcgccgagaggcctgccttttgcctggcccaggctcacccccaccttgggcctcacctcctccaggaagccttcccagctacccgaagctcaggtggccttcttgcaggtccccgtagcaccctgagcctgtaccttgggtggcacttgttatgctatcctgtgctagccgtttgtgcctcgtctcgctgttagattgtgagttcccatgggcagagacccactgtcgttccccgtgtgtccccagcccggtccctgtcacatttgttaaatgaaagaacaatgaagcccagtgtaacgtcagtccacagaaatagccacagcttccagtggtggccgtagacttggctcggaacttagtggcaccagagtaactctagtcagttacagtaaaatccactgtgtgtggaaggcagaagctagcggttgtatcccaagcatcttttgtatttgtctttatactttgctgaattctctgaaatacctattactgtatgttgcttttctaaataaatgtattgtgaaaccaaaa

SEQ ID NO: 360525 - DNA, 3151 bp, Homo sapiens
tgattccccgctcgcgactccccaccccccagggctccctaaagagggccacgagctgcgaaagggcgggaaaggcagttggagaagaggtaaaatcttcccaaggctgcagacaccgacggatttgctttgggagccagagtagctgccgccaccagagtccggagccatgagcgggtttaattttggaggcactggggcccctacaggcgggttcacgtttggcactgcaaagacggcaacaaccacacctgctacagggttttctttctccacctctggcactggagggtttaattttggggctcccttccaaccagccacaagtaccccttccaccggcctgttctcacttgccacccagactccggccacacagacgacaggcttcacttttggaacagcgactcttgcttcggggggaactggattttctttggggatcggtgcttcaaagctcaacttgagcaacacagctgccaccccagccatggcaaaccccagcggctttgggctgggcagcagcaacctcactaatgccatatcgagcaccgtcacctccagccagggcacagcacccaccggctttgtgtttggcccctccaccacctctgtggctccagctaccacatctggaggcttctcattcactggtggaagcacggcccaaccctccggtttcaacattggctcagcagggaattcagcccagcccacggcacctgccacgttgcccttcactccggccacgccagcagccaccacagcaggtgccacacagccagctgctcccacacccacagccaccatcaccagtactgggcccagcctctttgcgtcaatagcaactgctccaacctcatctgccaccactggactctccctctgtacccctgtgaccacagcgggcgcccccactgctgggacacagggcttcagcttaaaggcacctggagcagcttccggcacctccacaacaacatccaccgctgccaccgccaccgccaccaccaccagcagcagcagcaccaccggctttgccttgaatttaaaaccactggcgccagccgggatccccagcaatacagcagctgccgtgaccgctccacctggccctggcgcagctgcaggggcggctgccagctccgccatgacctacgcgcagctggagagcctgatcaacaaatggagcctggagctagaggaccaggagcggcacttcctccagcaggccacccaggtcaacgcctgggaccgcacgctgatcgagaatggagaaaagatcaccagcctgcaccgcgaggtggagaaggtgaagctggaccagaagaggctggaccaggagctcgacttcatcctgtcccagcagaaggagctggaagacctgctgagcccactggaggagttggtcaaggagcagagcgggaccatctacctgcagcacgcggatgaggagcgtgagaaaacctacaagctggctgagaacatcgacgcacagctcaagcgcatggcccaggatctcaaggacatcatcgagcacctgaacacgtccggggcccccgccgacaccagtgacccactgcagcagatctgcaagatcctcaatgcgcacatggactcactgcagtggatcgaccagaactcggccctgctgcagaggaaggtggaggaggtgaccaaggtgtgcgagggccggcgcaaggagcaggagcgcagcttccggatcacctttgactgagcgacagcagccctggggcccgcaggtccctagggagttcatgaggggaatgcgccctgttgtctgtagtttggggttgtggcaagatacttgtttgtttgtttctttctttcacatgactgcccttgacatgatcgctgtgtgctttgcgtttttccatttaggagggtattctgggccttctgcccaggcagcagcctcatgggtgtggcttctgtggctttcatttgagtatctttggccccttttcacctactgcgaccacccacctcatcctggctcagcctggtgatggagaagtgctgatggtcttggtcccagccagggtcgtgggggcagccactctctccaaagcatagtcataggtgtcatgaaaaaataccaaatgtaagagaacctccaagtcagggcgcagtggctcacccctgtaatctcagcactttgggtggccaaggcgggcagatgacttgaggtcaggagttcgagaccagcctggccaacatggtgaaaccccgtctctactaaaaatacaaaaattagtcaggtgtggtggacgcctgtgatctcaatctcagctactcgggaggctgaggcaggagaatcacttgaacccaggaggtgttgcagtgaaccaagatcacaccactgcactccagcctaggcaacagagactctgtctcaaaaaaaaaaaaaaaaaaaagaaactcccaggagacagcagcctagttttcgagtgtgagcttgtgcttgtgaaagctaaccatgctaaccaccaaggcaaagcagcacagtgtgaatagaacagagcgggatcaagaatttcacagaagacaggtcagctgaggggcctgcacacacagggtgttgaggaaccacagatgggcgccgagaggcctgccttttgcctggcccaggctcacccccaccttgggcctcacctcctccaggaagccttcccagctacccgaagctcaggtggccttcttgcaggtccccgtagcaccctgagcctgtaccttgggtggcacttgttatgctatcctgtgctagccgtttgtgcctcgtctcgctgttagattgtgagttcccatgggcagagacccactgtcgttccccgtgtgtccccagcccggtccctgtcacatttgttaaatgaaagaacaatgaagcccagtgtaacgtcagtccacagaaatagccacagcttccagtggtggccgtagacttggctcggaacttagtggcaccagagtaactctagtcagttacagtaaaatccactgtgtgtggaaggcagaagctagcggttgtatcccaagcatcttttgtatttgtctttatactttgctgaattctctgaaatacctattactgtatgttgcttttctaaataaatgtattgtgaaaccaaaa

SEQ ID NO: 360526 - DNA, 3306 bp, Homo sapiens
tgattccccgctcgcgactccccaccccccagggctccctaaagagggccacgagctgcgaaagggcgggaaaggcagttggagaagaggtaccgaggtggatgtccgtcttttctctgttgcagaaacccaccttgtcccatccacatcaggacatcccagctggagttcaaccttcatcccttctgtggcagttaggagactgaatcaaggtccagagaaggtggaggaatcctgatactgagcgaaatcttcccaaggctgcagacaccgacggatttgctttgggagccagagtagctgccgccaccagagtccggagccatgagcgggtttaattttggaggcactggggcccctacaggcgggttcacgtttggcactgcaaagacggcaacaaccacacctgctacagggttttctttctccacctctggcactggagggtttaattttggggctcccttccaaccagccacaagtaccccttccaccggcctgttctcacttgccacccagactccggccacacagacgacaggcttcacttttggaacagcgactcttgcttcggggggaactggattttctttggggatcggtgcttcaaagctcaacttgagcaacacagctgccaccccagccatggcaaaccccagcggctttgggctgggcagcagcaacctcactaatgccatatcgagcaccgtcacctccagccagggcacagcacccaccggctttgtgtttggcccctccaccacctctgtggctccagctaccacatctggaggcttctcattcactggtggaagcacggcccaaccctccggtttcaacattggctcagcagggaattcagcccagcccacggcacctgccacgttgcccttcactccggccacgccagcagccaccacagcaggtgccacacagccagctgctcccacacccacagccaccatcaccagtactgggcccagcctctttgcgtcaatagcaactgctccaacctcatctgccaccactggactctccctctgtacccctgtgaccacagcgggcgcccccactgctgggacacagggcttcagcttaaaggcacctggagcagcttccggcacctccacaacaacatccaccgctgccaccgccaccgccaccaccaccagcagcagcagcaccaccggctttgccttgaatttaaaaccactggcgccagccgggatccccagcaatacagcagctgccgtgaccgctccacctggccctggcgcagctgcaggggcggctgccagctccgccatgacctacgcgcagctggagagcctgatcaacaaatggagcctggagctagaggaccaggagcggcacttcctccagcaggccacccaggtcaacgcctgggaccgcacgctgatcgagaatggagaaaagatcaccagcctgcaccgcgaggtggagaaggtgaagctggaccagaagaggctggaccaggagctcgacttcatcctgtcccagcagaaggagctggaagacctgctgagcccactggaggagttggtcaaggagcagagcgggaccatctacctgcagcacgcggatgaggagcgtgagaaaacctacaagctggctgagaacatcgacgcacagctcaagcgcatggcccaggatctcaaggacatcatcgagcacctgaacacgtccggggcccccgccgacaccagtgacccactgcagcagatctgcaagatcctcaatgcgcacatggactcactgcagtggatcgaccagaactcggccctgctgcagaggaaggtggaggaggtgaccaaggtgtgcgagggccggcgcaaggagcaggagcgcagcttccggatcacctttgactgagcgacagcagccctggggcccgcaggtccctagggagttcatgaggggaatgcgccctgttgtctgtagtttggggttgtggcaagatacttgtttgtttgtttctttctttcacatgactgcccttgacatgatcgctgtgtgctttgcgtttttccatttaggagggtattctgggccttctgcccaggcagcagcctcatgggtgtggcttctgtggctttcatttgagtatctttggccccttttcacctactgcgaccacccacctcatcctggctcagcctggtgatggagaagtgctgatggtcttggtcccagccagggtcgtgggggcagccactctctccaaagcatagtcataggtgtcatgaaaaaataccaaatgtaagagaacctccaagtcagggcgcagtggctcacccctgtaatctcagcactttgggtggccaaggcgggcagatgacttgaggtcaggagttcgagaccagcctggccaacatggtgaaaccccgtctctactaaaaatacaaaaattagtcaggtgtggtggacgcctgtgatctcaatctcagctactcgggaggctgaggcaggagaatcacttgaacccaggaggtgttgcagtgaaccaagatcacaccactgcactccagcctaggcaacagagactctgtctcaaaaaaaaaaaaaaaaaaaagaaactcccaggagacagcagcctagttttcgagtgtgagcttgtgcttgtgaaagctaaccatgctaaccaccaaggcaaagcagcacagtgtgaatagaacagagcgggatcaagaatttcacagaagacaggtcagctgaggggcctgcacacacagggtgttgaggaaccacagatgggcgccgagaggcctgccttttgcctggcccaggctcacccccaccttgggcctcacctcctccaggaagccttcccagctacccgaagctcaggtggccttcttgcaggtccccgtagcaccctgagcctgtaccttgggtggcacttgttatgctatcctgtgctagccgtttgtgcctcgtctcgctgttagattgtgagttcccatgggcagagacccactgtcgttccccgtgtgtccccagcccggtccctgtcacatttgttaaatgaaagaacaatgaagcccagtgtaacgtcagtccacagaaatagccacagcttccagtggtggccgtagacttggctcggaacttagtggcaccagagtaactctagtcagttacagtaaaatccactgtgtgtggaaggcagaagctagcggttgtatcccaagcatcttttgtatttgtctttatactttgctgaattctctgaaatacctattactgtatgttgcttttctaaataaatgtattgtgaaaccaaaa

SEQ ID NO: 360527 - DNA, 3414 bp, Homo sapiens
ctaggtggaggccccgtctgaatcggccgagagcggttactcactccatggctgcagcaaggagaggcggcggcggcctcggctgaagaaagaaggtgggagcggagagcgcaggcgtgaaacccaccttgtcccatccacatcaggacatcccagctggagttcaaccttcatcccttctgtggcagttaggagactgaatcaaggtccagagaaggtggaggaatcctgatactgagcggtccttaatgcaagtcggttatgcctgtaggttgaaaggcatcagggaggaaaatgggaccagaatgccaggtgacctaaggaggagagagagaggacagttgaaaacccacagaaatcttcccaaggctgcagacaccgacggatttgctttgggagccagagtagctgccgccaccagagtccggagccatgagcgggtttaattttggaggcactggggcccctacaggcgggttcacgtttggcactgcaaagacggcaacaaccacacctgctacagggttttctttctccacctctggcactggagggtttaattttggggctcccttccaaccagccacaagtaccccttccaccggcctgttctcacttgccacccagactccggccacacagacgacaggcttcacttttggaacagcgactcttgcttcggggggaactggattttctttggggatcggtgcttcaaagctcaacttgagcaacacagctgccaccccagccatggcaaaccccagcggctttgggctgggcagcagcaacctcactaatgccatatcgagcaccgtcacctccagccagggcacagcacccaccggctttgtgtttggcccctccaccacctctgtggctccagctaccacatctggaggcttctcattcactggtggaagcacggcccaaccctccggtttcaacattggctcagcagggaattcagcccagcccacggcacctgccacgttgcccttcactccggccacgccagcagccaccacagcaggtgccacacagccagctgctcccacacccacagccaccatcaccagtactgggcccagcctctttgcgtcaatagcaactgctccaacctcatctgccaccactggactctccctctgtacccctgtgaccacagcgggcgcccccactgctgggacacagggcttcagcttaaaggcacctggagcagcttccggcacctccacaacaacatccaccgctgccaccgccaccgccaccaccaccagcagcagcagcaccaccggctttgccttgaatttaaaaccactggcgccagccgggatccccagcaatacagcagctgccgtgaccgctccacctggccctggcgcagctgcaggggcggctgccagctccgccatgacctacgcgcagctggagagcctgatcaacaaatggagcctggagctagaggaccaggagcggcacttcctccagcaggccacccaggtcaacgcctgggaccgcacgctgatcgagaatggagaaaagatcaccagcctgcaccgcgaggtggagaaggtgaagctggaccagaagaggctggaccaggagctcgacttcatcctgtcccagcagaaggagctggaagacctgctgagcccactggaggagttggtcaaggagcagagcgggaccatctacctgcagcacgcggatgaggagcgtgagaaaacctacaagctggctgagaacatcgacgcacagctcaagcgcatggcccaggatctcaaggacatcatcgagcacctgaacacgtccggggcccccgccgacaccagtgacccactgcagcagatctgcaagatcctcaatgcgcacatggactcactgcagtggatcgaccagaactcggccctgctgcagaggaaggtggaggaggtgaccaaggtgtgcgagggccggcgcaaggagcaggagcgcagcttccggatcacctttgactgagcgacagcagccctggggcccgcaggtccctagggagttcatgaggggaatgcgccctgttgtctgtagtttggggttgtggcaagatacttgtttgtttgtttctttctttcacatgactgcccttgacatgatcgctgtgtgctttgcgtttttccatttaggagggtattctgggccttctgcccaggcagcagcctcatgggtgtggcttctgtggctttcatttgagtatctttggccccttttcacctactgcgaccacccacctcatcctggctcagcctggtgatggagaagtgctgatggtcttggtcccagccagggtcgtgggggcagccactctctccaaagcatagtcataggtgtcatgaaaaaataccaaatgtaagagaacctccaagtcagggcgcagtggctcacccctgtaatctcagcactttgggtggccaaggcgggcagatgacttgaggtcaggagttcgagaccagcctggccaacatggtgaaaccccgtctctactaaaaatacaaaaattagtcaggtgtggtggacgcctgtgatctcaatctcagctactcgggaggctgaggcaggagaatcacttgaacccaggaggtgttgcagtgaaccaagatcacaccactgcactccagcctaggcaacagagactctgtctcaaaaaaaaaaaaaaaaaaaagaaactcccaggagacagcagcctagttttcgagtgtgagcttgtgcttgtgaaagctaaccatgctaaccaccaaggcaaagcagcacagtgtgaatagaacagagcgggatcaagaatttcacagaagacaggtcagctgaggggcctgcacacacagggtgttgaggaaccacagatgggcgccgagaggcctgccttttgcctggcccaggctcacccccaccttgggcctcacctcctccaggaagccttcccagctacccgaagctcaggtggccttcttgcaggtccccgtagcaccctgagcctgtaccttgggtggcacttgttatgctatcctgtgctagccgtttgtgcctcgtctcgctgttagattgtgagttcccatgggcagagacccactgtcgttccccgtgtgtccccagcccggtccctgtcacatttgttaaatgaaagaacaatgaagcccagtgtaacgtcagtccacagaaatagccacagcttccagtggtggccgtagacttggctcggaacttagtggcaccagagtaactctagtcagttacagtaaaatccactgtgtgtggaaggcagaagctagcggttgtatcccaagcatcttttgtatttgtctttatactttgctgaattctctgaaatacctattactgtatgttgcttttctaaataaatgtattgtgaaaccaaaa

SEQ ID NO: 360528 - DNA, 3162 bp, Homo sapiens
tgattccccgctcgcgactccccaccccccagggctccctaaagagggccacgagctgcgaaagggcgggaaaggcagttggagaagaggtaagcggttactcactccatggctgcagcaaggagaggcggcggcggcctcggctgaagaaagaaggtgggagcggagagcgcaggcgtgaaatcttcccaaggctgcagacaccgacggatttgctttgggagccagagtagctgccgccaccagagtccggagccatgagcgggtttaattttggaggcactggggcccctacaggcgggttcacgtttggcactgcaaagacggcaacaaccacacctgctacagggttttctttctccacctctggcactggagggtttaattttggggctcccttccaaccagccacaagtaccccttccaccggcctgttctcacttgccacccagactccggccacacagacgacaggcttcacttttggaacagcgactcttgcttcggggggaactggattttctttggggatcggtgcttcaaagctcaacttgagcaacacagctgccaccccagccatggcaaaccccagcggctttgggctgggcagcagcaacctcactaatgccatatcgagcaccgtcacctccagccagggcacagcacccaccggctttgtgtttggcccctccaccacctctgtggctccagctaccacatctggaggcttctcattcactggtggaagcacggcccaaccctccggtttcaacattggctcagcagggaattcagcccagcccacggcacctgccacgttgcccttcactccggccacgccagcagccaccacagcaggtgccacacagccagctgctcccacacccacagccaccatcaccagtactgggcccagcctctttgcgtcaatagcaactgctccaacctcatctgccaccactggactctccctctgtacccctgtgaccacagcgggcgcccccactgctgggacacagggcttcagcttaaaggcacctggagcagcttccggcacctccacaacaacatccaccgctgccaccgccaccgccaccaccaccagcagcagcagcaccaccggctttgccttgaatttaaaaccactggcgccagccgggatccccagcaatacagcagctgccgtgaccgctccacctggccctggcgcagctgcaggggcggctgccagctccgccatgacctacgcgcagctggagagcctgatcaacaaatggagcctggagctagaggaccaggagcggcacttcctccagcaggccacccaggtcaacgcctgggaccgcacgctgatcgagaatggagaaaagatcaccagcctgcaccgcgaggtggagaaggtgaagctggaccagaagaggctggaccaggagctcgacttcatcctgtcccagcagaaggagctggaagacctgctgagcccactggaggagttggtcaaggagcagagcgggaccatctacctgcagcacgcggatgaggagcgtgagaaaacctacgtccggggcccccgccgacaccagtgacccactgcagcagatctgcaagatcctcaatgcgcacatggactcactgcagtggatcgaccagaactcggccctgctgcagaggaaggtggaggaggtgaccaaggtgtgcgagggccggcgcaaggagcaggagcgcagcttccggatcacctttgactgagcgacagcagccctggggcccgcaggtccctagggagttcatgaggggaatgcgccctgttgtctgtagtttggggttgtggcaagatacttgtttgtttgtttctttctttcacatgactgcccttgacatgatcgctgtgtgctttgcgtttttccatttaggagggtattctgggccttctgcccaggcagcagcctcatgggtgtggcttctgtggctttcatttgagtatctttggccccttttcacctactgcgaccacccacctcatcctggctcagcctggtgatggagaagtgctgatggtcttggtcccagccagggtcgtgggggcagccactctctccaaagcatagtcataggtgtcatgaaaaaataccaaatgtaagagaacctccaagtcagggcgcagtggctcacccctgtaatctcagcactttgggtggccaaggcgggcagatgacttgaggtcaggagttcgagaccagcctggccaacatggtgaaaccccgtctctactaaaaatacaaaaattagtcaggtgtggtggacgcctgtgatctcaatctcagctactcgggaggctgaggcaggagaatcacttgaacccaggaggtgttgcagtgaaccaagatcacaccactgcactccagcctaggcaacagagactctgtctcaaaaaaaaaaaaaaaaaaaagaaactcccaggagacagcagcctagttttcgagtgtgagcttgtgcttgtgaaagctaaccatgctaaccaccaaggcaaagcagcacagtgtgaatagaacagagcgggatcaagaatttcacagaagacaggtcagctgaggggcctgcacacacagggtgttgaggaaccacagatgggcgccgagaggcctgccttttgcctggcccaggctcacccccaccttgggcctcacctcctccaggaagccttcccagctacccgaagctcaggtggccttcttgcaggtccccgtagcaccctgagcctgtaccttgggtggcacttgttatgctatcctgtgctagccgtttgtgcctcgtctcgctgttagattgtgagttcccatgggcagagacccactgtcgttccccgtgtgtccccagcccggtccctgtcacatttgttaaatgaaagaacaatgaagcccagtgtaacgtcagtccacagaaatagccacagcttccagtggtggccgtagacttggctcggaacttagtggcaccagagtaactctagtcagttacagtaaaatccactgtgtgtggaaggcagaagctagcggttgtatcccaagcatcttttgtatttgtctttatactttgctgaattctctgaaatacctattactgtatgttgcttttctaaataaatgtattgtgaaaccaaaa

SEQ ID NO: 360529 - DNA, 3100 bp, Homo sapiens
ggacgcgtgggtcgacccacgcgtccgagagcgcaggcgtgaaatcttcccaaggctgcagacaccgacggatttgctttgggagccagagtagctgccgccaccagagtccggagccatgagcgggtttaattttggaggcactggggcccctacaggcgggttcacgtttggcactgcaaagacggcaacaaccacacctgctacagggttttctttctccacctctggcactggagggtttaattttggggctcccttccaaccagccacaagtaccccttccaccggcctgttctcacttgccacccagactccggccacacagacgacaggcttcacttttggaacagcgactcttgcttcggggggaactggattttctttggggatcggtgcttcaaagctcaacttgagcaacacagctgccaccccagccatggcaaaccccagcggctttgggctgggcagcagcaacctcactaatgccatatcgagcaccgtcacctccagccagggcacagcacccaccggctttgtgtttggcccctccaccacctctgtggctccagctaccacatctggaggcttctcattcactggtggaagcacggcccaaccctccggtttcaacattggctcagcagggaattcagcccagcccacggcacctgccacgttgcccttcactccggccacgccagcagccaccacagcaggtgccacacagccagctgctcccacacccacagccaccatcaccagtactgggcccagcctctttgcgtcaatagcaactgctccaacctcatctgccaccactggactctccctctgtacccctgtgaccacagcgggcgcccccactgctgggacacagggcttcagcttaaaggcacctggagcagcttccggcacctccacaacaacatccaccgctgccaccgccaccgccaccaccaccagcagcagcagcaccaccggctttgccttgaatttaaaaccactggcgccagccgggatccccagcaatacagcagctgccgtgaccgctccacctggccctggcgcagctgcaggggcggctgccagctccgccatgacctacgcgcagctggagagcctgatcaacaaatggagcctggagctagaggaccaggagcggcacttcctccagcaggccacccaggtcaacgcctgggaccgcacgctgatcgagaatggagaaaagatcaccagcctgcaccgcgaggtggagaaggtgaagctggaccagaagaggctggaccaggagctcgacttcatcctgtcccagcagaaggagctggaagacctgctgagcccactggaggagttggtcaaggagcagagcgggaccatctacctgcagcacgcggatgaggagcgtgagaaaacctacaagctggctgagaacatcgacgcacagctcaagcgcatggcccaggatctcaaggacatcatcgagcacctgaacacgtccggggcccccgccgacaccagtgacccactgcagcagatctgcaagatcctcaatgcgcacatggactcactgcagtggatcgaccagaactcggccctgctgcagaggaaggtggaggaggtgaccaaggtgtgcgagggccggcgcaaggagcaggagcgcagcttccggatcacctttgactgagcgacagcagccctggggcccgcaggtccctagggagttcatgaggggaatgcgccctgttgtctgtagtttggggttgtggcaagatacttgtttgtttgtttctttctttcacatgactgcccttgacatgatcgctgtgtgctttgcgtttttccatttaggagggtattctgggccttctgcccaggcagcagcctcatgggtgtggcttctgtggctttcatttgagtatctttggccccttttcacctactgcgaccacccacctcatcctggctcagcctggtgatggagaagtgctgatggtcttggtcccagccagggtcgtgggggcagccactctctccaaagcatagtcataggtgtcatgaaaaaataccaaatgtaagagaacctccaagtcagggcgcagtggctcacccctgtaatctcagcactttgggtggccaaggcgggcagatgacttgaggtcaggagttcgagaccagcctggccaacatggtgaaaccccgtctctactaaaaatacaaaaattagtcaggtgtggtggacgcctgtgatctcaatctcagctactcgggaggctgaggcaggagaatcacttgaacccaggaggtgttgcagtgaaccaagatcacaccactgcactccagcctaggcaacagagactctgtctcaaaaaaaaaaaaaaaaaaaagaaactcccaggagacagcagcctagttttcgagtgtgagcttgtgcttgtgaaagctaaccatgctaaccaccaaggcaaagcagcacagtgtgaatagaacagagcgggatcaagaatttcacagaagacaggtcagctgaggggcctgcacacacagggtgttgaggaaccacagatgggcgccgagaggcctgccttttgcctggcccaggctcacccccaccttgggcctcacctcctccaggaagccttcccagctacccgaagctcaggtggccttcttgcaggtccccgtagcaccctgagcctgtaccttgggtggcacttgttatgctatcctgtgctagccgtttgtgcctcgtctcgctgttagattgtgagttcccatgggcagagacccactgtcgttccccgtgtgtccccagcccggtccctgtcacatttgttaaatgaaagaacaatgaagcccagtgtaacgtcagtccacagaaatagccacagcttccagtggtggccgtagacttggctcggaacttagtggcaccagagtaactctagtcagttacagtaaaatccactgtgtgtggaaggcagaagctagcggttgtatcccaagcatcttttgtatttgtctttatactttgctgaattctctgaaatacctattactgtatgttgcttttctaaataaatgtattgtgaaaccaaaa

SEQ ID NO: 360530 - DNA, 2226 bp, Homo sapiens
ctaggtagagctgggtgttaatcggccgaggcagcttccggcacctccacaacaacatccaccgctgccaccgccaccgccaccaccaccagcagcagcagcaccaccggctttgccttgaatttaaaaccactggcgccagccgggatccccagcaatacagcagctgccgtgaccgctccacctggccctggcgcagctgcaggggcggctgccagctccgccatgacctacgcgcagctggagagcctgatcaacaaatggagcctggagctagaggaccaggagcggcacttcctccagcaggccacccaggtcaacgcctgggaccgcacgctgatcgagaatggagaaaagatcaccagcctgcaccgcgaggtggagaaggtgaagctggaccagaagaggctggaccaggagctcgacttcatcctgtcccagcagaaggagctggaagacctgctgagcccactggaggagttggtcaaggagcagagcgggaccatctacctgcagcacgcggatgaggagcgtgagaaaacctacaagctggctgagaacatcgacgcacagctcaagcgcatggcccaggatctcaaggacatcatcgagcacctgaacacgtccggggcccccgccgacaccagtgacccactgcagcagatctgcaagatcctcaatgcgcacatggactcactgcagtggatcgaccagaactcggccctgctgcagaggaaggtggaggaggtgaccaaggtgtgcgagggccggcgcaaggagcaggagcgcagcttccggatcacctttgactgagcgacagcagccctggggcccgcaggtccctagggagttcatgaggggaatgcgccctgttgtctgtagtttggggttgtggcaagatacttgtttgtttgtttctttctttcacatgactgcccttgacatgatcgctgtgtgctttgcgtttttccatttaggagggtattctgggccttctgcccaggcagcagcctcatgggtgtggcttctgtggctttcatttgagtatctttggccccttttcacctactgcgaccacccacctcatcctggctcagcctggtgatggagaagtgctgatggtcttggtcccagccagggtcgtgggggcagccactctctccaaagcatagtcataggtgtcatgaaaaaataccaaatgtaagagaacctccaagtcagggcgcagtggctcacccctgtaatctcagcactttgggtggccaaggcgggcagatgacttgaggtcaggagttcgagaccagcctggccaacatggtgaaaccccgtctctactaaaaatacaaaaattagtcaggtgtggtggacgcctgtgatctcaatctcagctactcgggaggctgaggcaggagaatcacttgaacccaggaggtgttgcagtgaaccaagatcacaccactgcactccagcctaggcaacagagactctgtctcaaaaaaaaaaaaaaaaaaaagaaactcccaggagacagcagcctagttttcgagtgtgagcttgtgcttgtgaaagctaaccatgctaaccaccaaggcaaagcagcacagtgtgaatagaacagagcgggatcaagaatttcacagaagacaggtcagctgaggggcctgcacacacagggtgttgaggaaccacagatgggcgccgagaggcctgccttttgcctggcccaggctcacccccaccttgggcctcacctcctccaggaagccttcccagctacccgaagctcaggtggccttcttgcaggtccccgtagcaccctgagcctgtaccttgggtggcacttgttatgctatcctgtgctagccgtttgtgcctcgtctcgctgttagattgtgagttcccatgggcagagacccactgtcgttccccgtgtgtccccagcccggtccctgtcacatttgttaaatgaaagaacaatgaagcccagtgtaacgtcagtccacagaaatagccacagcttccagtggtggccgtagacttggctcggaacttagtggcaccagagtaactctagtcagttacagtaaaatccactgtgtgtggaaggcagaagctagcggttgtatcccaagcatcttttgtatttgtctttatactttgctgaattctctgaaatacctattactgtatgttgcttttctaaataaatgtattgtgaaaccaaaa

SEQ ID NO: 360531 - DNA, 2078 bp, Homo sapiens
ccagctccgccccttgcagctggcagcgccctgcatctggccctggcgcagctgcaggggcggctgccagctccgccatgacctacgcgcagctggagagcctgatcaacaaatggagcctggagctagaggaccaggagcggcacttcctccagcaggccacccaggtcaacgcctgggaccgcacgctgatcgagaatggagaaaagatcaccagcctgcaccgcgaggtggagaaggtgaagctggaccagaagaggctggaccaggagctcgacttcatcctgtcccagcagaaggagctggaagacctgctgagcccactggaggagttggtcaaggagcagagcgggaccatctacctgcagcacgcggatgaggagcgtgagaaaacctacaagctggctgagaacatcgacgcacagctcaagcgcatggcccaggatctcaaggacatcatcgagcacctgaacacgtccggggcccccgccgacaccagtgacccactgcagcagatctgcaagatcctcaatgcgcacatggactcactgcagtggatcgaccagaactcggccctgctgcagaggaaggtggaggaggtgaccaaggtgtgcgagggccggcgcaaggagcaggagcgcagcttccggatcacctttgactgagcgacagcagccctggggcccgcaggtccctagggagttcatgaggggaatgcgccctgttgtctgtagtttggggttgtggcaagatacttgtttgtttgtttctttctttcacatgactgcccttgacatgatcgctgtgtgctttgcgtttttccatttaggagggtattctgggccttctgcccaggcagcagcctcatgggtgtggcttctgtggctttcatttgagtatctttggccccttttcacctactgcgaccacccacctcatcctggctcagcctggtgatggagaagtgctgatggtcttggtcccagccagggtcgtgggggcagccactctctccaaagcatagtcataggtgtcatgaaaaaataccaaatgtaagagaacctccaagtcagggcgcagtggctcacccctgtaatctcagcactttgggtggccaaggcgggcagatgacttgaggtcaggagttcgagaccagcctggccaacatggtgaaaccccgtctctactaaaaatacaaaaattagtcaggtgtggtggacgcctgtgatctcaatctcagctactcgggaggctgaggcaggagaatcacttgaacccaggaggtgttgcagtgaaccaagatcacaccactgcactccagcctaggcaacagagactctgtctcaaaaaaaaaaaaaaaaaaaagaaactcccaggagacagcagcctagttttcgagtgtgagcttgtgcttgtgaaagctaaccatgctaaccaccaaggcaaagcagcacagtgtgaatagaacagagcgggatcaagaatttcacagaagacaggtcagctgaggggcctgcacacacagggtgttgaggaaccacagatgggcgccgagaggcctgccttttgcctggcccaggctcacccccaccttgggcctcacctcctccaggaagccttcccagctacccgaagctcaggtggccttcttgcaggtccccgtagcaccctgagcctgtaccttgggtggcacttgttatgctatcctgtgctagccgtttgtgcctcgtctcgctgttagattgtgagttcccatgggcagagacccactgtcgttccccgtgtgtccccagcccggtccctgtcacatttgttaaatgaaagaacaatgaagcccagtgtaacgtcagtccacagaaatagccacagcttccagtggtggccgtagacttggctcggaacttagtggcaccagagtaactctagtcagttacagtaaaatccactgtgtgtggaaggcagaagctagcggttgtatcccaagcatcttttgtatttgtctttatactttgctgaattctctgaaatacctattactgtatgttgcttttctaaataaatgtattgtgaaaccaaaa

SEQ ID NO: 360532 - DNA, 558 bp, Homo sapiens
ctaggtggaggccccgtctgaatcggccgagagcggttactcactccatggctgcagcaaggagaggcggcggcggcctcggctgaagaaagaaggtgggagcggagagcgcaggcgtgccgaggtggatgtccgtcttttctctgttgcagaaacccaccttgtcccatccacatcaggacatcccagctggagttcaaccttcatcccttctgtggcagttaggagactgaatcaaggtccagagaaggtggaggaatcctgatactgagcggtacacacaagcttctttctccttccttacctgttgcgggcaggaagtccttcttgggatctgaccaccttcccttagagcacttactgtccactctgccagtttttgagcacttgccctatattttcttgggcctataggggctgtgttatcactgaggcagtatacagagtagcagctaagagcatagactgagcttgtcccacccgtgggcctgcatgcggcctagaacagctttgaatgcagcctaacacaaatttgtaaaccttaccaaaacatccgaa

SEQ ID NO: 360533 - DNA, 356 bp, Homo sapiens
gtatcttgcattggtgcttttagtttctgcccataattttggaaagtttttgaccactatttctttaaacatgttctgctttgctcttttttctcctaggattacaaatgttagagaatttgctatttttcaatttgtgtttcaatttggtgatttctacgacatatcctcagggtctctaatcctttcctaggttgtgtcaagtctatcgattagccagtcaaatgaattctttttctctgttagtaaatttttatttatagcatttctagttattgttacagtttccttctctgtgctgaaattatctatgtgatcttgaatctcatctatctttatcttcagaatatttagta

SEQ ID NO: 360534 - DNA, 4242 bp, Homo sapiens
cccggaagtgttgggcgcagggcgtggctgcggctgcggctgccacgttggaacggaacgtggaggtggccctggccggggaggaggggcggcggcgaatgctgggagagtccgacgagcgctgcactaacgcaggatccggctgccgaaggtcctcgccagcaggatgaagttaaaggaagtagatcgtacagccatgcaggcatggagccctgcccagaatcaccccatttacctagcaacaggaacatctgctcagcaattggatgcaacatttagtacgaatgcttcccttgagatatttgaattagacctctctgatccatccttggatatgaaatcttgtgccacattctcctcttctcacaggtaccacaagttgatttgggggccttataaaatggattccaaaggagatgtctctggagttctgattgcaggtggtgaaaatggaaatattattctctatgatccttctaaaattatagctggagacaaggaagttgtgattgcccagaatgacaagcatactggcccagtgagagccttggatgtgaacattttccagactaatctggtagcttctggtgctaatgaatctgaaatctacatatgggatctaaataattttgcaaccccaatgacaccaggagccaaaacacagccgccagaagatatcagctgcattgcatggaacagacaagttcagcatattttagcatcagccagtcccagtggccgggccactgtatgggatcttagaaaaaatgagccaatcatcaaagtcagtgaccatagtaacagaatgcattgttctgggttggcatggcatcctgatgttgctactcagatggtccttgcctccgaggatgaccggttaccagtgatccagatgtgggatcttcgatttgcttcctctccacttcgtgtcctggaaaaccatgccagggggattttggcaattgcttggagcatggcagatcctgaattgttactgagctgtggaaaagatgctaagattctctgctccaatccaaacacaggagaggtgttatatgaacttcccaccaacacacagtggtgcttcgatattcagtggtgtccccgaaatcctgctgtcttatcagctgcttcgtttgatgggcgtatcagtgtttattctatcatgggaggaagcacagatggtttaagacagaaacaagttgacaagctttcatcatcttttgggaatcttgatccctttggcacaggacagccccttcctccgttacaaattccacagcagactgctcagcatagtatagtgctgcctctgaagaagccgcccaagtggattcgaaggcctgttggtgcttctttttcatttggaggcaaactggttacgtttgagaatgtcagaatgccttctcatcagggagctgagcagcagcagcagcagcaccatgtgttcattagtcaggttgtaacagaaaaggagttcctcagccgatcagaccaacttcagcaggctgtgcagtcacaaggatttatcaattattgccaaaaaaaaattgatgcttctcagactgaatttgagaaaaatgtgtggtcctttttgaaggtaaactttgaggatgattctcgtggaaaataccttgaacttctaggatacagaaaagaagatctaggaaagaagattgctttggccttgaacaaagtggatggagccaatgtggctcttaaagactctgaccaagtagcacagagtgatggggaggagagccctgctgctgaagagcagctcttgggagagcacattaaagaggaaaaagaagaatctgaatttctaccctcatctggaggaacatttaatatctctgtcagtggggacattgatggtttaattactcaggctttgctgacgggcaattttgagagtgctgttgacctttgtttacatgataaccgcatggccgatgccattatattggccatagcaggtggacaagaactcttggctcgaacccagaaaaaatacttcgcaaaatcccaaagcaaaattaccaggctcatcactgcagtggtgatgaagaactggaaagagattgttgagtcttgtgatcttaaaaattggagagaggctttagctgcagtattgacttatgcaaagccggatgaattttcagccctttgtgatcttttgggaaccaggcttgaaaatgaaggagatagcctcctgcagactcaagcatgtctctgctatatttgtgcagggaatgtagagaaattagttgcatgttggactaaagctcaagatggaagccaccctttgtcacttcaggatctgattgagaaagttgtcatcctgcgaaaagctgtgcaactcactcaagccatggacactagtactgtaggagttctcttggctgcgaagatgagtcagtatgccaatttgttggcagctcagggcagtattgctgcagccttggcttttcttcctgacaacaccaaccagccaaatatcatgcagcttcgtgacagactttgtagagcacaaggagagcctgtagcaggacatgaatcacctaaaattccgtacgagaaacagcagctccccaagggcaggcctggaccagttgctggccaccaccagatgccaagagttcaaactcaacaatattatccccatggagaaaatcctccacctccgggtttcataatgcatggaaatgttaatccaaatgcttctggtcagcttcccacatctccaggtcatatgcacacccaggtaccaccttatccacagccacagccttatcaaccagcccagccgtatcccttcggaacaggggggtcagcaatgtatcgacctcagcagcctgttgctcctcctacttcaaacgcttaccctaacaccccttacatatcttctgcttcttcctatactgggcagtctcagctgtacgcagcacagcaccaggcctcttcacctacctccagccctgctacttctttccctcctcccccttcctctggagcatccttccagcatggcggaccaggagctccaccatcatcttcagcttatgcactgcctcctggaacaacaggtacactgcctgctgccagtgagctgcctgcgtcccaaagaacaggtcctcagaatggttggaatgaccctccagctttgaacagagtacccaaaaagaagaagatgcctgaaaacttcatgcctcctgttcccatcacatcaccaatcatgaacccgttgggtgacccccagtcacaaatgctgcagcaacagccttcagctccagtaccactgtcaagccagtcttcattcccacagccacatcttccaggtggccagcccttccatggcgtacagcaacctcttggtcaaacaggcatgccaccatctttttcaaagcccaatattgaaggtgccccaggggctcctattggaaataccttccagcatgtgcagtctttgccaacaaaaaaaattaccaagaaacctattccagatgagcacctcattctaaagaccacatttgaggatcttattcagcgctgcctttcttcagcaacagaccctcaaaccaagaggaagctagatgatgccagcaaacgtttggagtttctgtatgataaacttagggaacagacactttcaccaacaatcaccagtggtttacacaacattgcaaggagcattgaaactcgaaactactcagaaggattgaccatgcatacccacatagttagcaccagcaacttcagtgagacctctgctttcatgccagttctcaaagttgttctcacccaggccaataagctgggtgtctaaaaggacagcttctcttccactcaatattgccatttttccaaagaaacatgttaaaaaaaaaaattataagacatggactagtcctcattagcatgtttgcatagcaaccagtcaagagcatttacactatttctgctgatatactcaccttagaactgctcagaaccctggtgctttatttttgttttaatcttttgttgccagtgatgattttcctattctgcaaatagtgtatttcctggattacacatagtatggtttcctgaagtattctgataaatgtgtttttttaaaacctcaatatactttttagaaaaggagcatctggttatgcataaagcagagctaaaactaaatttctttcatgtcctccctacttcctcagtgtcaatcagattaaagtgtgtaatcct

SEQ ID NO: 360535 - DNA, 4884 bp, Homo sapiens
ggcccggccccgccccacgccacgccacggcccgccgggccccgcagggagttcgaaggcttcgaggctgctcccatacgcactggtggaaggagaggccgcgctcccggctgagcacggtgtcacgggtgctgcagcccactgcggagcaacttcgggtcatcttcttgttacgtggggccccaccttcggggttcccgcgacagcatgaatcacgaccactttagctccgcccgttgactctgcggctacgacctttatttgtcacgaaaggcgggctttagaggcgcgggacttccacacttcctctccgaaggccctgcgccggtgccgtagccaatgacaggccacgttgtgtcccagcagccaatcggaagggcctgagcctgaagacgtgcatttgaccgctcctccctccgcgttggaggcggaatagtgggttttgctgcaaccggtttattttccttctgttttcacccattctggcacaatctggcgccatcgtccttcttgtgaggccaagcctgaaaatgcgaagcagagaggcaggaccaaaattgaggcgaatccaggaacctgccaatgggtctccgggtgcggtctctgaaactggaggatatcgggaggaaaggctctccgatgcggagataatggggaagctcttggcatggttggctgtaggtatgtgataccggaggagcaggagtcaaataggatacgccgacttttaattcaaggaacccttttctgaaacactttgccacaatgaaggaaataagattacagccgaagatacatattaagcaggatgaagttaaaggaagtagatcgtacagccatgcaggcatggagccctgcccagaatcaccccatttacctagcaacaggaacatctgctcagcaattggatgcaacatttagtacgaatgcttcccttgagatatttgaattagacctctctgatccatccttggatatgaaatcttgtgccacattctcctcttctcacaggtaccacaagttgatttgggggccttataaaatggattccaaaggagatgtctctggagttctgattgcaggtggtgaaaatggaaatattattctctatgatccttctaaaattatagctggagacaaggaagttgtgattgcccagaatgacaagcatactggcccagtgagagccttggatgtgaacattttccagactaatctggtagcttctggtgctaatgaatctgaaatctacatatgggatctaaataattttgcaaccccaatgacaccaggagccaaaacacagccgccagaagatatcagctgcattgcatggaacagacaagttcagcatattttagcatcagccagtcccagtggccgggccactgtatgggatcttagaaaaaatgagccaatcatcaaagtcagtgaccatagtaacagaatgcattgttctgggttggcatggcatcctgatgttgctactcagatggtccttgcctccgaggatgaccggttaccagtgatccagatgtgggatcttcgatttgcttcctctccacttcgtgtcctggaaaaccatgccagggggattttggcaattgcttggagcatggcagatcctgaattgttactgagctgtggaaaagatgctaagattctctgctccaatccaaacacaggagaggtgttatatgaacttcccaccaacacacagtggtgcttcgatattcagtggtgtccccgaaatcctgctgtcttatcagctgcttcgtttgatgggcgtatcagtgtttattctatcatgggaggaagcacagatggtttaagacagaaacaagttgacaagctttcatcatcttttgggaatcttgatccctttggcacaggacagccccttcctccgttacaaattccacagcagactgctcagcatagtatagtgctgcctctgaagaagccgcccaagtggattcgaaggcctgttggtgcttctttttcatttggaggcaaactggttacgtttgagaatgtcagaatgccttctcatcagggagctgagcagcagcagcagcagcaccatgtgttcattagtcaggttgtaacagaaaaggagttcctcagccgatcagaccaacttcagcaggctgtgcagtcacaaggatttatcaattattgccaaaaaaaaattgatgcttctcagactgaatttgagaaaaatgtgtggtcctttttgaaggtaaactttgaggatgattctcgtggaaaataccttgaacttctaggatacagaaaagaagatctaggaaagaagattgctttggccttgaacaaagtggatggagccaatgtggctcttaaagactctgaccaagtagcacagagtgatggggaggagagccctgctgctgaagagcagctcttgggagagcacattaaagaggaaaaagaagaatctgaatttctaccctcatctggaggaacatttaatatctctgtcagtggggacattgatggtttaattactcaggctttgctgacgggcaattttgagagtgctgttgacctttgtttacatgataaccgcatggccgatgccattatattggccatagcaggtggacaagaactcttggctcgaacccagaaaaaatacttcgcaaaatcccaaagcaaaattaccaggctcatcactgcagtggtgatgaagaactggaaagagattgttgagtcttgtgatcttaaaaattggagagaggctttagctgcagtattgacttatgcaaagccggatgaattttcagccctttgtgatcttttgggaaccaggcttgaaaatgaaggagatagcctcctgcagactcaagcatgtctctgctatatttgtgcagggaatgtagagaaattagttgcatgttggactaaagctcaagatggaagccaccctttgtcacttcaggatctgattgagaaagttgtcatcctgcgaaaagctgtgcaactcactcaagccatggacactagtactgtaggagttctcttggctgcgaagatgagtcagtatgccaatttgttggcagctcagggcagtattgctgcagccttggcttttcttcctgacaacaccaaccagccaaatatcatgcagcttcgtgacagactttgtagagcacaaggagagcctgtagcaggacatgaatcacctaaaattccgtacgagaaacagcagctccccaagggcaggcctggaccagttgctggccaccaccagatgccaagagttcaaactcaacaatattatccccatggagaaaatcctccacctccgggtttcataatgcatggaaatgttaatccaaatgcttctggtcagcttcccacatctccaggtcatatgcacacccaggtaccaccttatccacagccacagccttatcaaccagcccagccgtatcccttcggaacaggggggtcagcaatgtatcgacctcagcagcctgttgctcctcctacttcaaacgcttaccctaacaccccttacatatcttctgcttcttcctatactgggcagtctcagctgtacgcagcacagcaccaggcctcttcacctacctccagccctgctacttctttccctcctcccccttcctctggagcatccttccagcatggcggaccaggagctccaccatcatcttcagcttatgcactgcctcctggaacaacaggtacactgcctgctgccagtgagctgcctgcgtcccaaagaacaggtcctcagaatggttggaatgaccctccagctttgaacagagtacccaaaaagaagaagatgcctgaaaacttcatgcctcctgttcccatcacatcaccaatcatgaacccgttgggtgacccccagtcacaaatgctgcagcaacagccttcagctccagtaccactgtcaagccagtcttcattcccacagccacatcttccaggtggccagcccttccatggcgtacagcaacctcttggtcaaacaggcatgccaccatctttttcaaagcccaatattgaaggtgccccaggggctcctattggaaataccttccagcatgtgcagtctttgccaacaaaaaaaattaccaagaaacctattccagatgagcacctcattctaaagaccacatttgaggatcttattcagcgctgcctttcttcagcaacagaccctcaaaccaagaggaagctagatgatgccagcaaacgtttggagtttctgtatgataaacttagggaacagacactttcaccaacaatcaccagtggtttacacaacattgcaaggagcattgaaactcgaaactactcagaaggattgaccatgcatacccacatagttagcaccagcaacttcagtgagacctctgctttcatgccagttctcaaagttgttctcacccaggccaataagctgggtgtctaaaaggacagcttctcttccactcaatattgccatttttccaaagaaacatgttaaaaaaaaaaattataagacatggactagtcctcattagcatgtttgcatagcaaccagtcaagagcatttacactatttctgctgatatactcaccttagaactgctcagaaccctggtgctttatttttgttttaatcttttgttgccagtgatgattttcctattctgcaaatagtgtatttcctggattacacatagtatggtttcctgaagtattctgataaatgtgtttttttaaaacctcaatatactttttagaaaaggagcatctggttatgcataaagcagagctaaaactaaatttctttcatgtcctccctacttcctcagtgtcaatcagattaaagtgtgtaatcct

SEQ ID NO: 360536 - DNA, 1674 bp, Homo sapiens
ctggctgttggttatcttttcttagaaataatgatataatcttttcagcacctgatattcttaaagatccagggtttacaaatgactgttagatatgccaaggatgactagcctataacttaaggatctgttcaggaacagtagaaaagaaggtgataggaaactgggaatcttaaatctaatactagttctgtcatgaattaggcttgttattgtagttgtttctcaaatttaagaaaatatgaggggtcttgaaaaagtgcatggaaaatgcatatcatgaaaaaactatgcatggatttcaaaatttttggaccaaaataaactcctactaacttgttataacatgtctgaacaggatctagtttgaagcactaagaagaataagacatcagtttgaaaagaggctctatcagaacaacacgaattctgctaaaattgaagcaagaacaaacatcaaatatatgttgacacttgggtggaagaatggtgaactaattgatgctttatgaaaagttgatagggacagtgctccaaagaaatcagtttacaaatggataactcgttttaagaaggcataaggtaatgttgaagaagaagcccacagtggcagatcatccacatcagtttgtgagaaaaaagttagttcatggcgtaattgaagaaaaccaacaattaacagcagaaacaacagccaacaccatagacatctcagttggttcaccttacacaattttgactggaaaagttcagcaaactttatacctgataggtaccaaaaccattgcacccagatcagctacagacaagaatagagctttcaatggaaattttaaataaatgggatcaggatcttgaagcctttcattgaaaaattgtaacaggagatgaaacatggctttaccagcgcaatcctgaagacaaaacacaaagcagtggttaccaagataagtagttcagttaaagcacaagaggactggttgagagcaaaggtcatggcaacagcttttgaatgctcaaggcattttgcttgttgactttctgtagggccaaagaatggtaacgtgcttatcatgggagtgttttgagaaacttagccaaagcttcagcagaaaaatccccgagaaagaccagagagttcttcaccacaacaatgttcctgctcatccctctcatcaaacaaggccattttgcaagagttttgatgggaaatcactaggcatccaccctacagtcctggtttggcaccttctgactttttgtttcctaatcttaaaaaaatttttcagggcagtacatttttctcaagttaatgtataaagaaactgcattgatgtagataaattcccagaactctcagttctttagggatggactaaatagctggtatcatcacttacaaaagtgtcttgaatgctatagagctaatgttcaaaaatatagtttatattttttatcttttaaccatttttccacaaactttttgaagtctccttgaatatgtaccatttataaaggggaaaaattctgtgactactcatgttgacttaatgctgacttaattttctgttttgtaaatatatacaaacaagttgatacaaattttgtttatagcccttaaacaaatttgtgaaataaatgcattcagaaacaaactaaaacaaaaaaaaagga

SEQ ID NO: 360537 - DNA, 915 bp, Homo sapiens
cccggaagtgttgggcgcagggcgtggctgcggctgcggctgccacgttggaacggaacgtggaggtggccctggccggggaggaggggcggcggcgaatgctgggagagtccgacgagcgctgcactaacgcaggatccggctgccgaaggtcctcgccagcaggatgaagttaaaggaagtagatcgtacagccatgcaggcatggagccctgcccagaatcaccccatttacctagcaacaggaacatctgctcagcaattggatgcaacatttagtacgaatgcttcccttgagatatttgaattagacctctctgatccatccttggatatgaaatcttgtgccacattctcctcttctcacaggtaccacaagttgatttgggggccttataaaatggattccaaaggagatgtctctggagttctgattgcaggtggtgaaaatggaaatattattctctatgatccttctaaaattatagctggagacaaggaagttgtgattgcccagaatgacaagcatactggcccagtgagagccttggatgtgaacattttccaggtgaagctgtacttcacaaaaacagtagaggagccgtcaaatccagaggctagcagttcaacttctgtaacaccagatgttagtgacaatgaacctgatcattatagatattctgacgaccactgactctgatccagagaatgaaccttttgatgaagatcagcatacacaaattacaaaagtctgaatttttttttatcaagagggataaaacaccatgaaaatcaacttgaataacctgaaaatggaccttttttttttttaatggcaataggacatggtgtcagattaccagttatcggaacaattctcttttcctgaccaaatcttgttttaccctatacatc

SEQ ID NO: 360538 - DNA, 1207 bp, Homo sapiens
ggcccggccccgccccacgccacgccacggcccgccgggccccgcagggagttcgaaggcttcgaggctgctcccatacgcactggtggaaggagaggccgcgctcccggctgagcacggtgtcacgggtgctgcagcccactgcggagcaacttcgggtcatcttcttgttacgtggggccccaccttcggggttcccgcgacagcatgaatcacgaccactttagctccgcccgttgactctgcggctacgacctttatttgtcacgaaaggcgggctttagaggcgcgggacttccacacttcctctccgaaggccctgcgccggtgccgtagccaatgacaggccacgttgtgtcccagcagccaatcggaagggcctgagcctgaagacgtgcatttgaccgctcctccctccgcgttggaggcggaatagtgggttttgctgcaaccggtttattttccttctgttttcacccattctggcacaatctggcgccatcgtccttcttgtgaggccaagcctgaaaatgcgaagcagagaggcaggaccaaaattgaggcgaatccaggaacctgccaatgggtctccgggtgcggtctctgaaactggaggatatcgggaggaaaggctctccgatgcggagataatggggaagctcttggcatggttggctgtaggtatgtgataccggaggagcaggagtcaaataggatacgccgacttttaattcaaggaacccttttctgaaacactttgccacaatgaaggaaataagattacagccgaagatacatattaaggaataaaattgaagggtgtttttcttagagaacatcatttgtcatatttatttgatcaagaagttgaagatttatataataaggtatgggacttacacatttattttgataaaagaacacagaaaaggtcaggtatgagcagaaaattgacatttatttcagcctaatgtggatactgtactctgaattaaaaatttcttttccttactcttccagcttttaaagataagtattatttcaaaatagtatttttttaattaatagattcaattcaggaaaggcattggagggggtggagcttttaactttgacagtctcactctgttgcccaggctggagtgcagcggcgcaatctctgctcactgcaatctctgcctcctgggttcaaatagttattgtggcc

SEQ ID NO: 360539 - DNA, 448 bp, Homo sapiens
gccacagctgatgtttttcactatttgtttcaataaaggtatatttctcgttgtagtttggcttttcataaagtaatttgattcataaaatgtgaaccttaactatcttcagatgcattgttctgggttggcatggcatcctgatgttgctactcagatggtccttgcctccgaggatgaccggttaccagtgatccagatgtgggatcttcgatttgcttcctctccacttcgtgtcctggaaaaccatgccaggtatcgtgctgctgttacaaagaacttgatttgtttattttctgaacatgtcggtgatgttttcgtgaccagaaatacaccataggacacaggagaatcacttggacccgggaggcggaagttgtggtgagctgagattgcaccattgcactccagcctgggcaacaagagcaaaactccatctcaaaaaaaa

SEQ ID NO: 360540 - DNA, 311 bp, Homo sapiens
tgattaaattttttccactgctgttcacatcatgatttgttgtgattaatgtatgtggatgaggacataatagaaaaagaaaatgatgagacttgtatatattgtgtttctgcacaatgagttcctttgaatgtttttcgttttaggaataaaattgaagggtgtttttcttagagaacatcatttgtcatatttatttgatcaagaagttgaagatttatataataaggtatgggacttacacatttattttgataaaagaacacagaaaaggtagtacgatgaaggacggtaggtatgatgaagactca

SEQ ID NO: 360541 - DNA, 2252 bp, Homo sapiens
ggcccggccccgccccacgccacgccacggcccgccgggccccgcagggagttcgaaggcttcgaggctgctcccatacgcactggtggaaggagaggccgcgctcccggctgagcacggtgtcacgggtgctgcagcccactgcggagcaacttcgggtcatcttcttgttacgtggggccccaccttcggggttcccgcgacagcatgaatcacgaccactttagctccgcccgttgactctgcggctacgacctttatttgtcacgaaaggcgggctttagaggcgcgggacttccacacttcctctccgaaggccctgcgccggtgccgtagccaatgacaggccacgttgtgtcccagcagccaatcggaagggcctgagcctgaagacgtgcatttgaccgctcctccctccgcgttggaggcggaatagtgggttttgctgcaaccggtttattttccttctgttttcacccattctggcacaatctggcgccatcgtccttcttgtgaggccaagcctgaaaatgcgaagcagagaggcaggaccaaaattgaggcgaatccaggaacctgccaatgggtctccgggtgcggtctctgaaactggaggatatcgggaggaaaggctctccgatgcggagataatggggaagctcttggcatggttggctgtaggtatgtgataccggaggagcaggagtcaaataggatacgccgacttttaattcaaggaacccttttctgaaacactttgccacaatgaaggaaataaggaattgtactctcagagatgttgagaaaagatacatgggtcttggaagataattactcaaaatatgcagggaaggaataaaattgaagggtgtttttcttagagaacatcatttgtcatatttatttgatcaagaagttgaagatttatataataaggatctagtttgaagcactaagaagaataagacatcagtttgaaaagaggctctatcagaacaacacgaattctgctaaaattgaagcaagaacaaacatcaaatatatgttgacacttgggtggaagaatggtgaactaattgatgctttatgaaaagttgatagggacagtgctccaaagaaatcagtttacaaatggataactcgttttaagaaggcataaggtaatgttgaagaagaagcccacagtggcagatcatccacatcagtttgtgagaaaaaagttagttcatggcgtaattgaagaaaaccaacaattaacagcagaaacaacagccaacaccatagacatctcagttggttcaccttacacaattttgactggaaaagttcagcaaactttatacctgataggtaccaaaaccattgcacccagatcagctacagacaagaatagagctttcaatggaaattttaaataaatgggatcaggatcttgaagcctttcattgaaaaattgtaacaggagatgaaacatggctttaccagcgcaatcctgaagacaaaacacaaagcagtggttaccaagataagtagttcagttaaagcacaagaggactggttgagagcaaaggtcatggcaacagcttttgaatgctcaaggcattttgcttgttgactttctgtagggccaaagaatggtaacgtgcttatcatgggagtgttttgagaaacttagccaaagcttcagcagaaaaatccccgagaaagaccagagagttcttcaccacaacaatgttcctgctcatccctctcatcaaacaaggccattttgcaagagttttgatgggaaatcactaggcatccaccctacagtcctggtttggcaccttctgactttttgtttcctaatcttaaaaaaatttttcagggcagtacatttttctcaagttaatgtataaagaaactgcattgatgtagataaattcccagaactctcagttctttagggatggactaaatagctggtatcatcacttacaaaagtgtcttgaatgctatagagctaatgttcaaaaatatagtttatattttttatcttttaaccatttttccacaaactttttgaagtctccttgaatatgtaccatttataaaggggaaaaattctgtgactactcatgttgacttaatgctgacttaattttctgttttgtaaatatatacaaacaagttgatacaaattttgtttatagcccttaaacaaatttgtgaaataaatgcattcagaaacaaactaaaacaaaaaaaaagga

SEQ ID NO: 360542 - DNA, 2762 bp, Homo sapiens
cccggaagtgttgggcgcagggcgtggctgcggctgcggctgccacgttggaacggaacgtggaggtggccctggccggggaggaggggcggcggcgaatgctgggagagtccgacgagcgctgcactaacgcaggatccggctgccgaaggtcctcgccagcaggatgaagttaaaggaagtagatcgtacagccatgcaggcatggagccctgcccagaatcaccccatttacctagcaacaggaacatctgctcagcaattggatgcaacatttagtacgaatgcttcccttgagatatttgaattagacctctctgatccatccttggatatgaaatcttgtgccacattctcctcttctcacaggtaccacaagttgatttgggggccttataaaatggattccaaaggagatgtctctggagttctgattgcaggtggtgaaaatggaaatattattctctatgatccttctaaaattatagctggagacaaggaagttgtgattgcccagaatgacaagcatactggcccagtgagagccttggatgtgaacattttccagactaatctggtagcttctggtgctaatgaatctgaaatctacatatgggatctaaataattttgcaaccccaatgacaccaggagccaaaacacagccgccagaagatatcagctgcattgcatggaacagacaagttcagcatattttagcatcagccagtcccagtggccgggccactgtatgggatcttagaaaaaatgagccaatcatcaaagtcagtgaccatagtaacagaatgcattgttctgggttggcatggcatcctgatgttgctactcagatggtccttgcctccgaggatgaccggttaccagtgatccagatgtgggatcttcgatttgcttcctctccacttcgtgtcctggaaaaccatgccagggggattttggcaattgcttggagcatggcagatcctgaattgttactgagctgtggaaaagatgctaagattctctgctccaatccaaacacaggagaggtgttatatgaacttcccaccaacacacagtggtgcttcgatattcagtggtgtccccgaaatcctgctgtcttatcagctgcttcgtttgatgggcgtatcagtgtttattctatcatgggaggaagcacagatggtttaagacagaaacaagttgacaagctttcatcatcttttgggaatcttgatccctttggcacaggacagccccttcctccgttacaaattccacagcagactgctcagcatagtatagtgctgcctctgaagaagccgcccaagtggattcgaaggcctgttggtgcttctttttcatttggaggcaaactggttacgtttgagaatgtcagaatgccttctcatcagggagctgagcagcagcagcagcagcaccatgtgttcattagtcaggttgtaacagaaaaggagttcctcagccgatcagaccaacttcagcaggctgtgcagtcacaaggatttatcaattattgccaaaaaaaaattgatgcttctcagactgaatttgagaaaaatgtgtggtcctttttgaaggtaaactttgaggatgattctcgtggaaaataccttgaacttctaggatacagaaaagaagatctaggaaagaagattgctttggccttgaacaaagtggatggagccaatgtggctcttaaagactctgaccaagtagcacaatcacatcaccaatcatgaacccgttgggtgacccccagtcacaaatgctgcagcaacagccttcagctccagtaccactgtcaagccagtcttcattcccacagccacatcttccaggtggccagcccttccatggcgtacagcaacctcttggtcaaacaggcatgccaccatctttttcaaagcccaatattgaaggtgccccaggggctcctattggaaataccttccagcatgtgcagtctttgccaacaaaaaaaattaccaagaaacctattccagatgagcacctcattctaaagaccacatttgaggatcttattcagcgctgcctttcttcagcaacagaccctcaaaccaagaggaagctagatgatgccagcaaacgtttggagtttctgtatgataaacttagggaacagacactttcaccaacaatcaccagtggtttacacaacattgcaaggagcattgaaactcgaaactactcagaaggattgaccatgcatacccacatagttagcaccagcaacttcagtgagacctctgctttcatgccagttctcaaagttgttctcacccaggccaataagctgggtgtctaaaaggacagcttctcttccactcaatattgccatttttccaaagaaacatgttaaaaaaaaaaattataagacatggactagtcctcattagcatgtttgcatagcaaccagtcaagagcatttacactatttctgctgatatactcaccttagaactgctcagaaccctggtgctttatttttgttttaatcttttgttgccagtgatgattttcctattctgcaaatagtgtatttcctggattacacatagtatggtttcctgaagtattctgataaatgtgtttttttaaaacctcaatatactttttagaaaaggagcatctggttatgcataaagcagagctaaaactaaatttctttcatgtcctccctacttcctcagtgtcaatcagattaaagtgtgtaatcct

SEQ ID NO: 360543 - DNA, 2178 bp, Homo sapiens
ggcccggccccgccccacgccacgccacggcccgccgggccccgcagggagttcgaaggcttcgaggctgctcccatacgcactggtggaaggagaggccgcgctcccggctgagcacggtgtcacgggtgctgcagcccactgcggagcaacttcgggtcatcttcttgttacgtggggccccaccttcggggttcccgcgacagcatgaatcacgaccactttagctccgcccgttgactctgcggctacgacctttatttgtcacgaaaggcgggctttagaggcgcgggacttccacacttcctctccgaaggccctgcgccggtgccgtagccaatgacaggccacgttgtgtcccagcagccaatcggaagggcctgagcctgaagacgtgcatttgaccgctcctccctccgcgttggaggcggaatagtgggttttgctgcaaccggtttattttccttctgttttcacccattctggcacaatctggcgccatcgtccttcttgtgaggccaagcctgaaaatgcgaagcagagaggcaggaccaaaattgaggcgaatccaggaacctgccaatgggtctccgggtgcggtctctgaaactggaggatatcgggaggaaaggctctccgatgcggagataatggggaagctcttggcatggttggctgtaggtatgtgataccggaggagcaggagtcaaataggatacgccgacttttaattcaaggaacccttttctgaaacactttgccacaatgaaggaaataaggaataaaattgaagggtgtttttcttagagaacatcatttgtcatatttatttgatcaagaagttgaagatttatataataaggatctagtttgaagcactaagaagaataagacatcagtttgaaaagaggctctatcagaacaacacgaattctgctaaaattgaagcaagaacaaacatcaaatatatgttgacacttgggtggaagaatggtgaactaattgatgctttatgaaaagttgatagggacagtgctccaaagaaatcagtttacaaatggataactcgttttaagaaggcataaggtaatgttgaagaagaagcccacagtggcagatcatccacatcagtttgtgagaaaaaagttagttcatggcgtaattgaagaaaaccaacaattaacagcagaaacaacagccaacaccatagacatctcagttggttcaccttacacaattttgactggaaaagttcagcaaactttatacctgataggtaccaaaaccattgcacccagatcagctacagacaagaatagagctttcaatggaaattttaaataaatgggatcaggatcttgaagcctttcattgaaaaattgtaacaggagatgaaacatggctttaccagcgcaatcctgaagacaaaacacaaagcagtggttaccaagataagtagttcagttaaagcacaagaggactggttgagagcaaaggtcatggcaacagcttttgaatgctcaaggcattttgcttgttgactttctgtagggccaaagaatggtaacgtgcttatcatgggagtgttttgagaaacttagccaaagcttcagcagaaaaatccccgagaaagaccagagagttcttcaccacaacaatgttcctgctcatccctctcatcaaacaaggccattttgcaagagttttgatgggaaatcactaggcatccaccctacagtcctggtttggcaccttctgactttttgtttcctaatcttaaaaaaatttttcagggcagtacatttttctcaagttaatgtataaagaaactgcattgatgtagataaattcccagaactctcagttctttagggatggactaaatagctggtatcatcacttacaaaagtgtcttgaatgctatagagctaatgttcaaaaatatagtttatattttttatcttttaaccatttttccacaaactttttgaagtctccttgaatatgtaccatttataaaggggaaaaattctgtgactactcatgttgacttaatgctgacttaattttctgttttgtaaatatatacaaacaagttgatacaaattttgtttatagcccttaaacaaatttgtgaaataaatgcattcagaaacaaactaaaacaaaaaaaaagga

SEQ ID NO: 360544 - DNA, 2140 bp, Homo sapiens
cccggaagtgttgggcgcagggcgtggctgcggctgcggctgccacgttggaacggaacgtggaggtggccctggccggggaggaggggcggcggcgaatgctgggagagtccgacgagcgctgcactaacgcaggatccggctgccgaaggtcctcgccagcaggatgaagttaaaggaagtagatcgtacagccatgcaggcatggagccctgcccagaatcaccccatttacctagcaacaggaacatctgctcagcaattggatgcaacatttagtacgaatgcttcccttgagatatttgaattagacctctctgatccatccttggatatgaaatcttgtgccacattctcctcttctcacaggtaccacaagttgatttgggggccttataaaatggattccaaaggagatgtctctggagttctgattgcaggtggtgaaaatggaaatattattctctatgatccttctaaaattatagctggagacaaggaagttgtgattgcccagaatgacaagcatactggcccagtgagagccttggatgtgaacattttccagactaatctggtagcttctggtgctaatgaatctgaaatctacatatgggatctaaataattttgcaaccccaatgacaccaggagccaaaacacagccgccagaagatatcagctgcattgcatggaacagacaagttcagcatattttagcatcagccagtcccagtggccgggccactgtatgggatcttagaaaaaatgagccaatcatcaaagtcagtgaccatagtaacagaatgcattgttctgggttggcatggcatcctgatgttgctactcagatggtccttgcctccgaggatgaccggttaccagtgatccagatgtgggatcttcgatttgcttcctctccacttcgtgtcctggaaaaccatgccagggggattttggcaattgcttggagcatggcagatcctgaattgttactgagctgtggaaaagatgctaagattctctgctccaatccaaacacaggagaggtgttatatgaacttcccaccaacacacagtggtgcttcgatattcagtggtgtccccgaaatcctgctgtcttatcagctgcttcgtttgatgggcgtatcagtgtttattctatcatgggaggaagcacagatggtttaagacagaaacaagttgacaagctttcatcatcttttgggaatcttgatccctttggcacaggacagccccttcctccgttacaaattccacagcagactgctcagcatagtatagtgctgcctctgaagaagccgcccaagtggattcgaaggcctgttggtgcttctttttcatttggaggcaaactggttacgtttgagaatgtcagaatgccttctcatcagggagctgagcagcagcagcagcagcaccatgtgttcattagtcaggttgtaacagaaaaggagttcctcagccgatcagaccaacttcagcaggctgtgcagtcacaaggatttatcaattattgccaaaaaaaaattgatgcttctcagactgaatttgagaaaaatgtgtggtcctttttgaaggtaaactttgaggatgattctcgtggaaaataccttgaacttctaggatacagaaaagaagatctaggaaagaagattgctttggccttgaacaaagtggatggagccaatgtggctcttaaagactctgaccaagtagcacagagtgatggggaggagagccctgctgctgaagagcagctcttgggagagcacattaaagaggaaaaagaagcaggaagagaaaaaaacaaagtttgagaacctctgcaaaatcatgaaagacatattggagaaaaaagttgaaaaggtggttgtgtcaaaccgattggtgacatctccatgctgtattgtcacaagcacatatggctggacagcaaacatggagagaatcatgaaagctcaagccctaagagacaactcaacaatgggttacatggcagcaaagagacacctggagataaaccctgaccattccattattgagaccttaaggctaaaggcagaggctgataagaacgacaagtctgtgaaggatctggtcatcttgctttatgttgt

SEQ ID NO: 360545 - DNA, 2169 bp, Homo sapiens
ggcccggccccgccccacgccacgccacggcccgccgggccccgcagggagttcgaaggcttcgaggctgctcccatacgcactggtggaaggagaggccgcgctcccggctgagcacggtgtcacgggtgctgcagcccactgcggagcaacttcgggtcatcttcttgttacgtggggccccaccttcggggttcccgcgacagcatgaatcacgaccactttagctccgcccgttgactctgcggctacgacctttatttgtcacgaaaggcgggctttagaggcgcgggacttccacacttcctctccgaaggccctgcgccggtgccgtagccaatgacaggccacgttgtgtcccagcagccaatcggaagggcctgagcctgaagacgtgcatttgaccgctcctccctccgcgttggaggcggaatagtgggttttgctgcaaccggtttattttccttctgttttcacccattctggcacaatctggcgccatcgtccttcttgtgaggccaagcctgaaaatgcgaagcagagaggcaggaccaaaattgaggcgaatccaggaacctgccaatgggtctccgggtgcggtctctgaaactggaggatatcgggaggaaaggctctccgatgcggagataatggggaagctcttggcatggttggctgtaggtatgtgataccggaggagcaggagtcaaataggatacgccgacttttaattcaaggaacccttttctgaaacactttgccacaatgaaggaaataaggaattgtactctcagagatgttgagaaaagatacatgggtcttggaagataattactcaaaatatgcagggaaggatctagtttgaagcactaagaagaataagacatcagtttgaaaagaggctctatcagaacaacacgaattctgctaaaattgaagcaagaacaaacatcaaatatatgttgacacttgggtggaagaatggtgaactaattgatgctttatgaaaagttgatagggacagtgctccaaagaaatcagtttacaaatggataactcgttttaagaaggcataaggtaatgttgaagaagaagcccacagtggcagatcatccacatcagtttgtgagaaaaaagttagttcatggcgtaattgaagaaaaccaacaattaacagcagaaacaacagccaacaccatagacatctcagttggttcaccttacacaattttgactggaaaagttcagcaaactttatacctgataggtaccaaaaccattgcacccagatcagctacagacaagaatagagctttcaatggaaattttaaataaatgggatcaggatcttgaagcctttcattgaaaaattgtaacaggagatgaaacatggctttaccagcgcaatcctgaagacaaaacacaaagcagtggttaccaagataagtagttcagttaaagcacaagaggactggttgagagcaaaggtcatggcaacagcttttgaatgctcaaggcattttgcttgttgactttctgtagggccaaagaatggtaacgtgcttatcatgggagtgttttgagaaacttagccaaagcttcagcagaaaaatccccgagaaagaccagagagttcttcaccacaacaatgttcctgctcatccctctcatcaaacaaggccattttgcaagagttttgatgggaaatcactaggcatccaccctacagtcctggtttggcaccttctgactttttgtttcctaatcttaaaaaaatttttcagggcagtacatttttctcaagttaatgtataaagaaactgcattgatgtagataaattcccagaactctcagttctttagggatggactaaatagctggtatcatcacttacaaaagtgtcttgaatgctatagagctaatgttcaaaaatatagtttatattttttatcttttaaccatttttccacaaactttttgaagtctccttgaatatgtaccatttataaaggggaaaaattctgtgactactcatgttgacttaatgctgacttaattttctgttttgtaaatatatacaaacaagttgatacaaattttgtttatagcccttaaacaaatttgtgaaataaatgcattcagaaacaaactaaaacaaaaaaaaagga

SEQ ID NO: 360546 - DNA, 1577 bp, Homo sapiens
cccggaagtgttgggcgcagggcgtggctgcggctgcggctgccacgttggaacggaacgtggaggtggccctggccggggaggaggggcggcggcgaatgctgggagagtccgacgagcgctgcactaacgcaggatccggctgccgaaggtcctcgccagcaggatgaagttaaaggaagtagatcgtacagccatgcaggcatggagccctgcccagaatcaccccatttacctagcaacaggaacatctgctcagcaattggatgcaacatttagtacgaatgcttcccttgagatatttgaattagacctctctgatccatccttggatatgaaatcttgtgccacattctcctcttctcacaggtaccacaagttgatttgggggccttataaaatggattccaaaggagatgtctctggagttctgattgcaggtggtgaaaatggaaatattattctctatgatccttctaaaattatagctggagacaaggaagttgtgattgcccagaatgacaagcatactggcccagtgagagccttggatgtgaacattttccagactaatctggtagcttctggtgctaatgaatctgaaatctacatatgggatctaaataattttgcaaccccaatgacaccaggagccaaaacacagccgccagaagatatcagctgcattgcatggaacagacaagttcagcatattttagcatcagccagtcccagtggccgggccactgtatgggatcttagaaaaaatgagccaatcatcaaagtcagtgaccatagtaacagaatgcattgttctgggttggcatggcatcctgatgttgctactcagatggtccttgcctccgaggatgaccggttaccagtgatccagatgtgggatcttcgatttgcttcctctccacttcgtgtcctggaaaaccatgccagggggattttggcaattgcttggagcatggcagatcctgaattgttactgagctgtggaaaagatgctaagattctctgctccaatccaaacacaggagaggtgttatatgaacttcccaccaacacacagtggtgcttcgatattcagtggtgtccccgaaatcctgctgtcttatcagctgcttcgtttgatgggcgtatcagtgtttattctatcatgggaggaagcacagatggtttaagacagaaacaagttgacaagctttcatcatcttttgggaatcttgatccctttggcacaggacagccccttcctccgttacaaattccacagcagactgctcagcatagtatagtgctgcctctgaagaagccgcccaagtggattcgaaggcctgttggtgcttctttttcatttggaggcaaactggttacgtttgagaatgtcagaatgccttctcatcagggagcttaacgaccgaaagcaacggactagccctcgggacaggacagatgcccaaacccaagggaacacctttgggagagcaaagttctgtaaccacatcgggatgcctgtggggcctctgcctcctgatcacgccactacggacacttaggatgcctgaggc

SEQ ID NO: 360547 - DNA, 331 bp, Homo sapiens
ccaacttcagcaggctgtgcagtcacaaggatttatcaattattgccaaaaaaaaattgatgcttctcagactgaatttgagaaaaatgtgtggtcctttttgaaggtaaagttgctgtttaaagctatattatttcattatctgcaaatttaactgttcctttatattctaaatctgtcctcctattaaagaaacaattgaaaaagtgtgatttcagcaattcatcatgaaattaagaagccttataaagagcatacaacctaacttatgtccagagtttttccttctctgctttgaaaagtgtaatatgaaatacatttttaataagta

SEQ ID NO: 360548 - DNA, 421 bp, Homo sapiens
cttggcctcccaaagtgctgggattacaggcatgagccacccggcctcaagtttgtcttctttctaatgaatatatccaacaaatgacacctaaaccgatttgatttatttgcagttgggcattactaatgttgtagtggtttgttcagtatgtttctatttaaaatatctgtgttctgtgttagacattcaagtcattcaaggctgtttctgtataaaatattccctttagcaggatgaagttaaaggaagtagatcgtacagccatgcaggcatggagccctgcccagaatcaccccatttacctagcaacaggtaagttcaaaggagagaagatagtatgagttacctaatttcttctcttctgcacctagcttattcagtttaagctttatcttctctagaaagcctctctctccct

SEQ ID NO: 360549 - DNA, 4125 bp, Homo sapiens
cccggaagtgttgggcgcagggcgtggctgcggctgcggctgccacgttggaacggaacgtggaggtggccctggccggggaggaggggcggcggcgaatgctgggagagtccgacgagcgctgcactaacgcaggatccggctgccgaaggtcctcgccagcaggatgaagttaaaggaagtagatcgtacagccatgcaggcatggagccctgcccagaatcaccccatttacctagcaacaggaacatctgctcagcaattggatgcaacatttagtacgaatgcttcccttgagatatttgaattagacctctctgatccatccttggatatgaaatcttgtgccacattctcctcttctcacaggtaccacaagttgatttgggggccttataaaatggattccaaaggagatgtctctggagttctgattgcaggtggtgaaaatggaaatattattctctatgatccttctaaaattatagctggagacaaggaagttgtgattgcccagaatgacaagcatactggcccagtgagagccttggatgtgaacattttccagactaatctggtagcttctggtgctaatgaatctgaaatctacatatgggatctaaataattttgcaaccccaatgacaccaggagccaaaacacagccgccagaagatatcagctgcattgcatggaacagacaagttcagcatattttagcatcagccagtcccagtggccgggccactgtatgggatcttagaaaaaatgagccaatcatcaaagtcagtgaccatagtaacagaatgcattgttctgggttggcatggcatcctgatgttgctactcagatggtccttgcctccgaggatgaccggttaccagtgatccagatgtgggatcttcgatttgcttcctctccacttcgtgtcctggaaaaccatgccagggggattttggcaattgcttggagcatggcagatcctgaattgttactgagctgtggaaaagatgctaagattctctgctccaatccaaacacaggagaggtgttatatgaacttcccaccaacacacagtggtgcttcgatattcagtggtgtccccgaaatcctgctgtcttatcagctgcttcgtttgatgggcgtatcagtgtttattctatcatgggaggaagcacagatggtttaagacagaaacaagttgacaagctttcatcatcttttgggaatcttgatccctttggcacaggacagccccttcctccgttacaaattccacagcagactgctcagcatagtatagtgctgcctctgaagaagccgcccaagtggattcgaaggcctgttggtgcttctttttcatttggaggcaaactggttacgtttgagaatgtcagaatgccttctcatcagggagctgagcagcagcagcagcagcaccatgtgttcattagtcaggttgtaacagaaaaggagttcctcagccgatcagaccaacttcagcaggctgtgcagtcacaaggatttatcaattattgccaaaaaaaaattgatgcttctcagactgaatttgagaaaaatgtgtggtcctttttgaaggtaaactttgaggatgattctcgtggaaaataccttgaacttctaggatacagaaaagaagatctaggaaagaagcacattaaagaggaaaaagaagaatctgaatttctaccctcatctggaggaacatttaatatctctgtcagtggggacattgatggtttaattactcaggctttgctgacgggcaattttgagagtgctgttgacctttgtttacatgataaccgcatggccgatgccattatattggccatagcaggtggacaagaactcttggctcgaacccagaaaaaatacttcgcaaaatcccaaagcaaaattaccaggctcatcactgcagtggtgatgaagaactggaaagagattgttgagtcttgtgatcttaaaaattggagagaggctttagctgcagtattgacttatgcaaagccggatgaattttcagccctttgtgatcttttgggaaccaggcttgaaaatgaaggagatagcctcctgcagactcaagcatgtctctgctatatttgtgcagggaatgtagagaaattagttgcatgttggactaaagctcaagatggaagccaccctttgtcacttcaggatctgattgagaaagttgtcatcctgcgaaaagctgtgcaactcactcaagccatggacactagtactgtaggagttctcttggctgcgaagatgagtcagtatgccaatttgttggcagctcagggcagtattgctgcagccttggcttttcttcctgacaacaccaaccagccaaatatcatgcagcttcgtgacagactttgtagagcacaaggagagcctgtagcaggacatgaatcacctaaaattccgtacgagaaacagcagctccccaagggcaggcctggaccagttgctggccaccaccagatgccaagagttcaaactcaacaatattatccccatggagaaaatcctccacctccgggtttcataatgcatggaaatgttaatccaaatgcttctggtcagcttcccacatctccaggtcatatgcacacccaggtaccaccttatccacagccacagccttatcaaccagcccagccgtatcccttcggaacaggggggtcagcaatgtatcgacctcagcagcctgttgctcctcctacttcaaacgcttaccctaacaccccttacatatcttctgcttcttcctatactgggcagtctcagctgtacgcagcacagcaccaggcctcttcacctacctccagccctgctacttctttccctcctcccccttcctctggagcatccttccagcatggcggaccaggagctccaccatcatcttcagcttatgcactgcctcctggaacaacaggtacactgcctgctgccagtgagctgcctgcgtcccaaagaacaggtcctcagaatggttggaatgaccctccagctttgaacagagtacccaaaaagaagaagatgcctgaaaacttcatgcctcctgttcccatcacatcaccaatcatgaacccgttgggtgacccccagtcacaaatgctgcagcaacagccttcagctccagtaccactgtcaagccagtcttcattcccacagccacatcttccaggtggccagcccttccatggcgtacagcaacctcttggtcaaacaggcatgccaccatctttttcaaagcccaatattgaaggtgccccaggggctcctattggaaataccttccagcatgtgcagtctttgccaacaaaaaaaattaccaagaaacctattccagatgagcacctcattctaaagaccacatttgaggatcttattcagcgctgcctttcttcagcaacagaccctcaaaccaagaggaagctagatgatgccagcaaacgtttggagtttctgtatgataaacttagggaacagacactttcaccaacaatcaccagtggtttacacaacattgcaaggagcattgaaactcgaaactactcagaaggattgaccatgcatacccacatagttagcaccagcaacttcagtgagacctctgctttcatgccagttctcaaagttgttctcacccaggccaataagctgggtgtctaaaaggacagcttctcttccactcaatattgccatttttccaaagaaacatgttaaaaaaaaaaattataagacatggactagtcctcattagcatgtttgcatagcaaccagtcaagagcatttacactatttctgctgatatactcaccttagaactgctcagaaccctggtgctttatttttgttttaatcttttgttgccagtgatgattttcctattctgcaaatagtgtatttcctggattacacatagtatggtttcctgaagtattctgataaatgtgtttttttaaaacctcaatatactttttagaaaaggagcatctggttatgcataaagcagagctaaaactaaatttctttcatgtcctccctacttcctcagtgtcaatcagattaaagtgtgtaatcct

SEQ ID NO: 360550 - DNA, 3493 bp, Homo sapiens
cccggaagtgttgggcgcagggcgtggctgcggctgcggctgccacgttggaacggaacgtggaggtggccctggccggggaggaggggcggcggcgaatgctgggagagtccgacgagcgctgcactaacgcaggatccggctgccgaaggtcctcgccagcaggatgaagttaaaggaagtagatcgtacagccatgcaggcatggagccctgcccagaatcaccccatttacctagcaacaggaacatctgctcagcaattggatgcaacatttagtacgaatgcttcccttgagatatttgaattagacctctctgatccatccttggatatgaaatcttgtgccacattctcctcttctcacaggtaccacaagttgatttgggggccttataaaatggattccaaaggagatgtctctggagttctgattgcaggtggtgaaaatggaaatattattctctatgatccttctaaaattatagctggagacaaggaagttgtgattgcccagaatgacaagcatactggcccagtgagagccttggatgtgaacattttccagactaatctggtagcttctggtgctaatgaatctgaaatctacatatgggatctaaataattttgcaaccccaatgacaccaggagccaaaacacagccgccagaagatatcagctgcattgcatggaacagacaagttcagcatattttagcatcagccagtcccagtggccgggccactgtatgggatcttagaaaaaatgagccaatcatcaaagtcagtgaccatagtaacagaatgcattgttctgggttggcatggcatcctgatgttgctactcagatggtccttgcctccgaggatgaccggttaccagtgatccagatgtgggatcttcgatttgcttcctctccacttcgtgtcctggaaaaccatgccagggggattttggcaattgcttggagcatggcagatcctgaattgttactgagctgtggaaaagatgctaagattctctgctccaatccaaacacaggagaggtgttatatgaacttcccaccaacacacagtggtgcttcgatattcagtggtgtccccgaaatcctgctgtcttatcagctgcttcgtttgatgggcgtatcagtgtttattctatcatgggaggaagcacagatggtttaagacagaaacaagttgacaagctttcatcatcttttgggaatcttgatccctttggcacaggacagccccttcctccgttacaaattccacagcagactgctcagcatagtatagtgctgcctctgaagaagccgcccaagtggattcgaaggcctgttggtgcttctttttcatttggaggcaaactggttacgtttgagaatgtcagaatgccttctcatcagggagctgagcagcagcagcagcagcaccatgtgttcattagtcaggttgtaacagaaaaggagttcctcagccgatcagaccaacttcagcaggctgtgcagtcacaaggatttatcaattattgccaaaaaaaaattgatgcttctcagactgaatttgagaaaaatgtgtggtcctttttgaaggtaaactttgaggatgattctcgtggaaaataccttgaacttctaggatacagaaaagaagatctaggaaagaagattgctttggccttgaacaaagtggatggagccaatgtggctcttaaagactctgaccaagtagcacagagtgatggggaggagagccctgctgctgaagagcagctcttgggagagcacattaaagaggaaaaagaagaatctgaatttctaccctcatctggaggaacatttaatatctctgtcagtggggacattgatggtttaattactcaggctttgctgacgggcaattttgagagtgctgttgacctttgtttacatgataaccgcatggccgatgccattatattggccatagcaggtggacaagaactcttggctcgaacccagaaaaaatacttcgcaaaatcccaaagcaaaattaccaggctcatcactgcagtggtgatgaagaactggaaagagattgttgagtcttgtgatcttaaaaattggagagaggctttagctgcagtattgacttatgcaaagccggatgaattttcagccctttgtgatcttttgggaaccaggcttgaaaatgaaggagatagcctcctgcagactcaagcatgtctctgctatatttgtgcagggaatgtagagaaattagttgcatgttggactaaagctcaagatggaagccaccctttgtcacttcaggatctgattgagaaagttgtcatcctgcgaaaagctgtgcaactcactcaagccatggacactagtactgtaggagttctcttggctgcgaagatgagtcagtatgccaatttgttggcagctcagggcagtattgctgcagccttggcttttcttcctgacaacaccaaccagccaaatatcatgcagcttcgtgacagactttgtagagcacaaggagagcctgtagcaggacatgaatcacctaaaattccgtacgagaaacagcagctccccaagggcaggcctggaccagttgctggccaccaccagatgccaagagttcaaactcaacaatattatccccatggagaaaatcctccacctccgggtttcataatgcatggaaatgttaatccaaatgcttctggtcagcttcccacatctccaggtcatatgcacacccaggtaccaccttatccacagccacagcgtaagtagtgtgaccccaaagtcctttcagagcagtatttatgatctaatttagtaactttactttgaagccccaaagtcattgtcaaatcaataagtaagaaccattgtgcataggattcctgagtccctgctacaaagagacatgtttttttaggaggtggcctgaatcactatgctaggaagtagctcctttgtcacactgttcagagtagttgactcctgttcctcagccattactaagacttgttaaagataatcaagtgtcccgtgattttggtataaagaaacagaattttagaaattattttttacatattctttttcttcaggcaagatgacacaaattatttttggaaaaatggtttcaaggggcatttgttattactgtttttccattttatttatttatttaatagactttgtattttagagcagtcttaggttcagaacaaaattgagcagaaagtacagagtgcccccactattgacatcctacgccacagtggtgtatttgttacaatcgatgaacctacatcaatgtctcattatcacccaaagtccacagtttacactctcagtgttgtacattctgtggattttaacaaatgtgtaatgacatgtatctattagtggcatttttaaaagaaaataattatacctggaaagtgaaatattgccactatttgaaaatttaaatgc

SEQ ID NO: 360551 - DNA, 4375 bp, Homo sapiens
agctttgaggtagagcccaggccaaaactgggaccgcagcctgggtctccgctgccccgcaccagcctgaggcccggtctctggtgacggcgcgcccctagtcttggtttcgggcccggcggaacaacgcctggcatctggactccagtgatcgcgcccgtccgcattcgccgacgtctccactgctgagcaaaagccacccgaggctggcgacagtgtcttgccggggagtagtagccgggctggtaactggagtttgagattaggagactttcagacccttgtgcacaaagagcaggatgaagttaaaggaagtagatcgtacagccatgcaggcatggagccctgcccagaatcaccccatttacctagcaacaggaacatctgctcagcaattggatgcaacatttagtacgaatgcttcccttgagatatttgaattagacctctctgatccatccttggatatgaaatcttgtgccacattctcctcttctcacaggtaccacaagttgatttgggggccttataaaatggattccaaaggagatgtctctggagttctgattgcaggtggtgaaaatggaaatattattctctatgatccttctaaaattatagctggagacaaggaagttgtgattgcccagaatgacaagcatactggcccagtgagagccttggatgtgaacattttccagactaatctggtagcttctggtgctaatgaatctgaaatctacatatgggatctaaataattttgcaaccccaatgacaccaggagccaaaacacagccgccagaagatatcagctgcattgcatggaacagacaagttcagcatattttagcatcagccagtcccagtggccgggccactgtatgggatcttagaaaaaatgagccaatcatcaaagtcagtgaccatagtaacagaatgcattgttctgggttggcatggcatcctgatgttgctactcagatggtccttgcctccgaggatgaccggttaccagtgatccagatgtgggatcttcgatttgcttcctctccacttcgtgtcctggaaaaccatgccagggggattttggcaattgcttggagcatggcagatcctgaattgttactgagctgtggaaaagatgctaagattctctgctccaatccaaacacaggagaggtgttatatgaacttcccaccaacacacagtggtgcttcgatattcagtggtgtccccgaaatcctgctgtcttatcagctgcttcgtttgatgggcgtatcagtgtttattctatcatgggaggaagcacagatggtttaagacagaaacaagttgacaagctttcatcatcttttgggaatcttgatccctttggcacaggacagccccttcctccgttacaaattccacagcagactgctcagcatagtatagtgctgcctctgaagaagccgcccaagtggattcgaaggcctgttggtgcttctttttcatttggaggcaaactggttacgtttgagaatgtcagaatgccttctcatcagggagctgagcagcagcagcagcagcaccatgtgttcattagtcaggttgtaacagaaaaggagttcctcagccgatcagaccaacttcagcaggctgtgcagtcacaaggatttatcaattattgccaaaaaaaaattgatgcttctcagactgaatttgagaaaaatgtgtggtcctttttgaaggtaaactttgaggatgattctcgtggaaaataccttgaacttctaggatacagaaaagaagatctaggaaagaagattgctttggccttgaacaaagtggatggagccaatgtggctcttaaagactctgaccaagtagcacagagtgatggggaggagagccctgctgctgaagagcagctcttgggagagcacattaaagaggaaaaagaagaatctgaatttctaccctcatctggaggaacatttaatatctctgtcagtggggacattgatggtttaattactcaggctttgctgacgggcaattttgagagtgctgttgacctttgtttacatgataaccgcatggccgatgccattatattggccatagcaggtggacaagaactcttggctcgaacccagaaaaaatacttcgcaaaatcccaaagcaaaattaccaggctcatcactgcagtggtgatgaagaactggaaagagattgttgagtcttgtgatcttaaaaattggagagaggctttagctgcagtattgacttatgcaaagccggatgaattttcagccctttgtgatcttttgggaaccaggcttgaaaatgaaggagatagcctcctgcagactcaagcatgtctctgctatatttgtgcagggaatgtagagaaattagttgcatgttggactaaagctcaagatggaagccaccctttgtcacttcaggatctgattgagaaagttgtcatcctgcgaaaagctgtgcaactcactcaagccatggacactagtactgtaggagttctcttggctgcgaagatgagtcagtatgccaatttgttggcagctcagggcagtattgctgcagccttggcttttcttcctgacaacaccaaccagccaaatatcatgcagcttcgtgacagactttgtagagcacaaggagagcctgtagcaggacatgaatcacctaaaattccgtacgagaaacagcagctccccaagggcaggcctggaccagttgctggccaccaccagatgccaagagttcaaactcaacaatattatccccatggagaaaatcctccacctccgggtttcataatgcatggaaatgttaatccaaatgcttctggtcagcttcccacatctccaggtcatatgcacacccaggtaccaccttatccacagccacagccttatcaaccagcccagccgtatcccttcggaacaggggggtcagcaatgtatcgacctcagcagcctgttgctcctcctacttcaaacgcttaccctaacaccccttacatatcttctgcttcttcctatactgggcagtctcagctgtacgcagcacagcaccaggcctcttcacctacctccagccctgctacttctttccctcctcccccttcctctggagcatccttccagcatggcggaccaggagctccaccatcatcttcagcttatgcactgcctcctggaacaacaggtacactgcctgctgccagtgagctgcctgcgtcccaaagaacaggtcctcagaatggttggaatgaccctccagctttgaacagagtacccaaaaagaagaagatgcctgaaaacttcatgcctcctgttcccatcacatcaccaatcatgaacccgttgggtgacccccagtcacaaatgctgcagcaacagccttcagctccagtaccactgtcaagccagtcttcattcccacagccacatcttccaggtggccagcccttccatggcgtacagcaacctcttggtcaaacaggcatgccaccatctttttcaaagcccaatattgaaggtgccccaggggctcctattggaaataccttccagcatgtgcagtctttgccaacaaaaaaaattaccaagaaacctattccagatgagcacctcattctaaagaccacatttgaggatcttattcagcgctgcctttcttcagcaacagaccctcaaaccaagaggaagctagatgatgccagcaaacgtttggagtttctgtatgataaacttagggaacagacactttcaccaacaatcaccagtggtttacacaacattgcaaggagcattgaaactcgaaactactcagaaggattgaccatgcatacccacatagttagcaccagcaacttcagtgagacctctgctttcatgccagttctcaaagttgttctcacccaggccaataagctgggtgtctaaaaggacagcttctcttccactcaatattgccatttttccaaagaaacatgttaaaaaaaaaaattataagacatggactagtcctcattagcatgtttgcatagcaaccagtcaagagcatttacactatttctgctgatatactcaccttagaactgctcagaaccctggtgctttatttttgttttaatcttttgttgccagtgatgattttcctattctgcaaatagtgtatttcctggattacacatagtatggtttcctgaagtattctgataaatgtgtttttttaaaacctcaatatactttttagaaaaggagcatctggttatgcataaagcagagctaaaactaaatttctttcatgtcctccctacttcctcagtgtcaatcagattaaagtgtgtaatcct

SEQ ID NO: 360552 - DNA, 2095 bp, Homo sapiens
ggcccggccccgccccacgccacgccacggcccgccgggccccgcagggagttcgaaggcttcgaggctgctcccatacgcactggtggaaggagaggccgcgctcccggctgagcacggtgtcacgggtgctgcagcccactgcggagcaacttcgggtcatcttcttgttacgtggggccccaccttcggggttcccgcgacagcatgaatcacgaccactttagctccgcccgttgactctgcggctacgacctttatttgtcacgaaaggcgggctttagaggcgcgggacttccacacttcctctccgaaggccctgcgccggtgccgtagccaatgacaggccacgttgtgtcccagcagccaatcggaagggcctgagcctgaagacgtgcatttgaccgctcctccctccgcgttggaggcggaatagtgggttttgctgcaaccggtttattttccttctgttttcacccattctggcacaatctggcgccatcgtccttcttgtgaggccaagcctgaaaatgcgaagcagagaggcaggaccaaaattgaggcgaatccaggaacctgccaatgggtctccgggtgcggtctctgaaactggaggatatcgggaggaaaggctctccgatgcggagataatggggaagctcttggcatggttggctgtaggtatgtgataccggaggagcaggagtcaaataggatacgccgacttttaattcaaggaacccttttctgaaacactttgccacaatgaaggaaataaggatctagtttgaagcactaagaagaataagacatcagtttgaaaagaggctctatcagaacaacacgaattctgctaaaattgaagcaagaacaaacatcaaatatatgttgacacttgggtggaagaatggtgaactaattgatgctttatgaaaagttgatagggacagtgctccaaagaaatcagtttacaaatggataactcgttttaagaaggcataaggtaatgttgaagaagaagcccacagtggcagatcatccacatcagtttgtgagaaaaaagttagttcatggcgtaattgaagaaaaccaacaattaacagcagaaacaacagccaacaccatagacatctcagttggttcaccttacacaattttgactggaaaagttcagcaaactttatacctgataggtaccaaaaccattgcacccagatcagctacagacaagaatagagctttcaatggaaattttaaataaatgggatcaggatcttgaagcctttcattgaaaaattgtaacaggagatgaaacatggctttaccagcgcaatcctgaagacaaaacacaaagcagtggttaccaagataagtagttcagttaaagcacaagaggactggttgagagcaaaggtcatggcaacagcttttgaatgctcaaggcattttgcttgttgactttctgtagggccaaagaatggtaacgtgcttatcatgggagtgttttgagaaacttagccaaagcttcagcagaaaaatccccgagaaagaccagagagttcttcaccacaacaatgttcctgctcatccctctcatcaaacaaggccattttgcaagagttttgatgggaaatcactaggcatccaccctacagtcctggtttggcaccttctgactttttgtttcctaatcttaaaaaaatttttcagggcagtacatttttctcaagttaatgtataaagaaactgcattgatgtagataaattcccagaactctcagttctttagggatggactaaatagctggtatcatcacttacaaaagtgtcttgaatgctatagagctaatgttcaaaaatatagtttatattttttatcttttaaccatttttccacaaactttttgaagtctccttgaatatgtaccatttataaaggggaaaaattctgtgactactcatgttgacttaatgctgacttaattttctgttttgtaaatatatacaaacaagttgatacaaattttgtttatagcccttaaacaaatttgtgaaataaatgcattcagaaacaaactaaaacaaaaaaaaagga

SEQ ID NO: 360553 - DNA, 4202 bp, Homo sapiens
cccggaagtgttgggcgcagggcgtggctgcggctgcggctgccacgttggaacggaacgtggaggtggccctggccggggaggaggggcggcggcgaatgctgggagagtccgacgagcgctgcactaacgcaggatccggctgccgaaggtcctcgccagcaggatgaagttaaaggaagtagatcgtacagccatgcaggcatggagccctgcccagaatcaccccatttacctagcaacaggaacatctgctcagcaattggatgcaacatttagtacgaatgcttcccttgagatatttgaattagacctctctgatccatccttggatatgaaatcttgtgccacattctcctcttctcacaggtaccacaagttgatttgggggccttataaaatggattccaaaggagatgtctctggagttctgattgcaggtggtgaaaatggaaatattattctctatgatccttctaaaattatagctggagacaaggaagttgtgattgcccagaatgacaagcatactggcccagtgagagccttggatgtgaacattttccagactaatctggtagcttctggtgctaatgaatctgaaatctacatatgggatctaaataattttgcaaccccaatgacaccaggagccaaaacacagccgccagaagatatcagctgcattgcatggaacagacaagttcagcatattttagcatcagccagtcccagtggccgggccactgtatgggatcttagaaaaaatgagccaatcatcaaagtcagtgaccatagtaacagaatgcattgttctgggttggcatggcatcctgatgttgctactcagatggtccttgcctccgaggatgaccggttaccagtgatccagatgtgggatcttcgatttgcttcctctccacttcgtgtcctggaaaaccatgccagggggattttggcaattgcttggagcatggcagatcctgaattgttactgagctgtggaaaagatgctaagattctctgctccaatccaaacacaggagaggtgttatatgaacttcccaccaacacacagtggtgcttcgatattcagtggtgtccccgaaatcctgctgtcttatcagctgcttcgtttgatgggcgtatcagtgtttattctatcatgggaggaagcacagatggtttaagacagaaacaagttgacaagctttcatcatcttttgggaatcttgatccctttggcacaggacagccccttcctccgttacaaattccacagcagactgctcagcatagtatagtgctgcctctgaagaagccgcccaagtggattcgaaggcctgttggtgcttctttttcatttggaggcaaactggttacgtttgagaatgtcagaatgccttctcatcagggagctgagcagcagcagcagcagcaccatgtgttcattagtcaggttgtaacagaaaaggagttcctcagccgatcagaccaacttcagcaggctgtgcagtcacaaggatttatcaattattgccaaaaaaaaattgatgcttctcagactgaatttgagaaaaatgtgtggtcctttttgaaggtaaactttgaggatgattctcgtggaaaataccttgaacttctaggatacagaaaagaagatctaggaaagaagctcttaaagactctgaccaagtagcacagagtgatggggaggagagccctgctgctgaagagcagctcttgggagagcacattaaagaggaaaaagaagaatctgaatttctaccctcatctggaggaacatttaatatctctgtcagtggggacattgatggtttaattactcaggctttgctgacgggcaattttgagagtgctgttgacctttgtttacatgataaccgcatggccgatgccattatattggccatagcaggtggacaagaactcttggctcgaacccagaaaaaatacttcgcaaaatcccaaagcaaaattaccaggctcatcactgcagtggtgatgaagaactggaaagagattgttgagtcttgtgatcttaaaaattggagagaggctttagctgcagtattgacttatgcaaagccggatgaattttcagccctttgtgatcttttgggaaccaggcttgaaaatgaaggagatagcctcctgcagactcaagcatgtctctgctatatttgtgcagggaatgtagagaaattagttgcatgttggactaaagctcaagatggaagccaccctttgtcacttcaggatctgattgagaaagttgtcatcctgcgaaaagctgtgcaactcactcaagccatggacactagtactgtaggagttctcttggctgcgaagatgagtcagtatgccaatttgttggcagctcagggcagtattgctgcagccttggcttttcttcctgacaacaccaaccagccaaatatcatgcagcttcgtgacagactttgtagagcacaaggagagcctgtagcaggacatgaatcacctaaaattccgtacgagaaacagcagctccccaagggcaggcctggaccagttgctggccaccaccagatgccaagagttcaaactcaacaatattatccccatggagaaaatcctccacctccgggtttcataatgcatggaaatgttaatccaaatgcttctggtcagcttcccacatctccaggtcatatgcacacccaggtaccaccttatccacagccacagccttatcaaccagcccagccgtatcccttcggaacaggggggtcagcaatgtatcgacctcagcagcctgttgctcctcctacttcaaacgcttaccctaacaccccttacatatcttctgcttcttcctatactgggcagtctcagctgtacgcagcacagcaccaggcctcttcacctacctccagccctgctacttctttccctcctcccccttcctctggagcatccttccagcatggcggaccaggagctccaccatcatcttcagcttatgcactgcctcctggaacaacaggtacactgcctgctgccagtgagctgcctgcgtcccaaagaacaggtcctcagaatggttggaatgaccctccagctttgaacagagtacccaaaaagaagaagatgcctgaaaacttcatgcctcctgttcccatcacatcaccaatcatgaacccgttgggtgacccccagtcacaaatgctgcagcaacagccttcagctccagtaccactgtcaagccagtcttcattcccacagccacatcttccaggtggccagcccttccatggcgtacagcaacctcttggtcaaacaggcatgccaccatctttttcaaagcccaatattgaaggtgccccaggggctcctattggaaataccttccagcatgtgcagtctttgccaacaaaaaaaattaccaagaaacctattccagatgagcacctcattctaaagaccacatttgaggatcttattcagcgctgcctttcttcagcaacagaccctcaaaccaagaggaagctagatgatgccagcaaacgtttggagtttctgtatgataaacttagggaacagacactttcaccaacaatcaccagtggtttacacaacattgcaaggagcattgaaactcgaaactactcagaaggattgaccatgcatacccacatagttagcaccagcaacttcagtgagacctctgctttcatgccagttctcaaagttgttctcacccaggccaataagctgggtgtctaaaaggacagcttctcttccactcaatattgccatttttccaaagaaacatgttaaaaaaaaaaattataagacatggactagtcctcattagcatgtttgcatagcaaccagtcaagagcatttacactatttctgctgatatactcaccttagaactgctcagaaccctggtgctttatttttgttttaatcttttgttgccagtgatgattttcctattctgcaaatagtgtatttcctggattacacatagtatggtttcctgaagtattctgataaatgtgtttttttaaaacctcaatatactttttagaaaaggagcatctggttatgcataaagcagagctaaaactaaatttctttcatgtcctccctacttcctcagtgtcaatcagattaaagtgtgtaatcct

SEQ ID NO: 360554 - DNA, 2214 bp, Homo sapiens
ggcccggccccgccccacgccacgccacggcccgccgggccccgcagggagttcgaaggcttcgaggctgctcccatacgcactggtggaaggagaggccgcgctcccggctgagcacggtgtcacgggtgctgcagcccactgcggagcaacttcgggtcatcttcttgttacgtggggccccaccttcggggttcccgcgacagcatgaatcacgaccactttagctccgcccgttgactctgcggctacgacctttatttgtcacgaaaggcgggctttagaggcgcgggacttccacacttcctctccgaaggccctgcgccggtgccgtagccaatgacaggccacgttgtgtcccagcagccaatcggaagggcctgagcctgaagacgtgcatttgaccgctcctccctccgcgttggaggcggaatagtgggttttgctgcaaccggtttattttccttctgttttcacccattctggcacaatctggcgccatcgtccttcttgtgaggccaagcctgaaaatgcgaagcagagaggcaggaccaaaattgaggcgaatccaggaacctgccaatgggtctccggctctccgatgcggagataatggggaagctcttggcatggttggctgtaggtatgtgataccggaggagcaggagtcaaataggatacgccgacttttaattcaaggaacccttttctgaaacactttgccacaatgaaggaaataaggaattgtactctcagagatgttgagaaaagatacatgggtcttggaagataattactcaaaatatgcagggaaggaataaaattgaagggtgtttttcttagagaacatcatttgtcatatttatttgatcaagaagttgaagatttatataataaggatctagtttgaagcactaagaagaataagacatcagtttgaaaagaggctctatcagaacaacacgaattctgctaaaattgaagcaagaacaaacatcaaatatatgttgacacttgggtggaagaatggtgaactaattgatgctttatgaaaagttgatagggacagtgctccaaagaaatcagtttacaaatggataactcgttttaagaaggcataaggtaatgttgaagaagaagcccacagtggcagatcatccacatcagtttgtgagaaaaaagttagttcatggcgtaattgaagaaaaccaacaattaacagcagaaacaacagccaacaccatagacatctcagttggttcaccttacacaattttgactggaaaagttcagcaaactttatacctgataggtaccaaaaccattgcacccagatcagctacagacaagaatagagctttcaatggaaattttaaataaatgggatcaggatcttgaagcctttcattgaaaaattgtaacaggagatgaaacatggctttaccagcgcaatcctgaagacaaaacacaaagcagtggttaccaagataagtagttcagttaaagcacaagaggactggttgagagcaaaggtcatggcaacagcttttgaatgctcaaggcattttgcttgttgactttctgtagggccaaagaatggtaacgtgcttatcatgggagtgttttgagaaacttagccaaagcttcagcagaaaaatccccgagaaagaccagagagttcttcaccacaacaatgttcctgctcatccctctcatcaaacaaggccattttgcaagagttttgatgggaaatcactaggcatccaccctacagtcctggtttggcaccttctgactttttgtttcctaatcttaaaaaaatttttcagggcagtacatttttctcaagttaatgtataaagaaactgcattgatgtagataaattcccagaactctcagttctttagggatggactaaatagctggtatcatcacttacaaaagtgtcttgaatgctatagagctaatgttcaaaaatatagtttatattttttatcttttaaccatttttccacaaactttttgaagtctccttgaatatgtaccatttataaaggggaaaaattctgtgactactcatgttgacttaatgctgacttaattttctgttttgtaaatatatacaaacaagttgatacaaattttgtttatagcccttaaacaaatttgtgaaataaatgcattcagaaacaaactaaaacaaaaaaaaagga

SEQ ID NO: 360555 - DNA, 1980 bp, Homo sapiens
ggcccggccccgccccacgccacgccacggcccgccgggccccgcagggagttcgaaggcttcgaggctgctcccatacgcactggtggaaggagaggccgcgctcccggctgagcacggtgtcacgggtgctgcagcccactgcggagcaacttcgggtcatcttcttgttacgtggggccccaccttcggggttcccgcgacagcatgaatcacgaccactttagctccgcccgttgactctgcggctacgacctttatttgtcacgaaaggcgggctttagaggcgcgggacttccacacttcctctccgaaggccctgcgccggtgccgtagccaatgacaggccacgttgtgtcccagcagccaatcggaagggcctgagcctgaagacgtgcatttgaccgctcctccctccgcgttggaggcggaatagtgggttttgctgcaaccggtttattttccttctgttttcacccattctggcacaatctggcgccatcgtccttcttgtgaggccaagcctgaaaatgcgaagcagagaggcaggaccaaaattgaggcgaatccaggaacctgccaatgggtctccgggtgcggtctctgaaactggaggatatcgggaggaaagggtatggaagagggataaaacacggtgccttaggatctagtttgaagcactaagaagaataagacatcagtttgaaaagaggctctatcagaacaacacgaattctgctaaaattgaagcaagaacaaacatcaaatatatgttgacacttgggtggaagaatggtgaactaattgatgctttatgaaaagttgatagggacagtgctccaaagaaatcagtttacaaatggataactcgttttaagaaggcataaggtaatgttgaagaagaagcccacagtggcagatcatccacatcagtttgtgagaaaaaagttagttcatggcgtaattgaagaaaaccaacaattaacagcagaaacaacagccaacaccatagacatctcagttggttcaccttacacaattttgactggaaaagttcagcaaactttatacctgataggtaccaaaaccattgcacccagatcagctacagacaagaatagagctttcaatggaaattttaaataaatgggatcaggatcttgaagcctttcattgaaaaattgtaacaggagatgaaacatggctttaccagcgcaatcctgaagacaaaacacaaagcagtggttaccaagataagtagttcagttaaagcacaagaggactggttgagagcaaaggtcatggcaacagcttttgaatgctcaaggcattttgcttgttgactttctgtagggccaaagaatggtaacgtgcttatcatgggagtgttttgagaaacttagccaaagcttcagcagaaaaatccccgagaaagaccagagagttcttcaccacaacaatgttcctgctcatccctctcatcaaacaaggccattttgcaagagttttgatgggaaatcactaggcatccaccctacagtcctggtttggcaccttctgactttttgtttcctaatcttaaaaaaatttttcagggcagtacatttttctcaagttaatgtataaagaaactgcattgatgtagataaattcccagaactctcagttctttagggatggactaaatagctggtatcatcacttacaaaagtgtcttgaatgctatagagctaatgttcaaaaatatagtttatattttttatcttttaaccatttttccacaaactttttgaagtctccttgaatatgtaccatttataaaggggaaaaattctgtgactactcatgttgacttaatgctgacttaattttctgttttgtaaatatatacaaacaagttgatacaaattttgtttatagcccttaaacaaatttgtgaaataaatgcattcagaaacaaactaaaacaaaaaaaaagga

SEQ ID NO: 360556 - DNA, 4001 bp, Homo sapiens
cccggaagtgttgggcgcagggcgtggctgcggctgcggctgccacgttggaacggaacgtggaggtggccctggccggggaggaggggcggcggcgaatgctgggagagtccgacgagcgctgcactaacgcaggatccggctgccgaaggtcctcgccagcaggatgaagttaaaggaagtagatcgtacagccatgcaggcatggagccctgcccagaatcaccccatttacctagcaacaggtaccacaagttgatttgggggccttataaaatggattccaaaggagatgtctctggagttctgattgcaggtggtgaaaatggaaatattattctctatgatccttctaaaattatagctggagacaaggaagttgtgattgcccagaatgacaagcatactggcccagtgagagccttggatgtgaacattttccagactaatctggtagcttctggtgctaatgaatctgaaatctacatatgggatctaaataattttgcaaccccaatgacaccaggagccaaaacacagccgccagaagatatcagctgcattgcatggaacagacaagttcagcatattttagcatcagccagtcccagtggccgggccactgtatgggatcttagaaaaaatgagccaatcatcaaagtcagtgaccatagtaacagaatgcattgttctgggttggcatggcatcctgatgttgctactcagatggtccttgcctccgaggatgaccggttaccagtgatccagatgtgggatcttcgatttgcttcctctccacttcgtgtcctggaaaaccatgccagggggattttggcaattgcttggagcatggcagatcctgaattgttactgagctgtggaaaagatgctaagattctctgctccaatccaaacacaggagaggtgttatatgaacttcccaccaacacacagtggtgcttcgatattcagtggtgtccccgaaatcctgctgtcttatcagctgcttcgtttgatgggcgtatcagtgtttattctatcatgggaggaagcacagatggtttaagacagaaacaagttgacaagctttcatcatcttttgggaatcttgatccctttggcacaggacagccccttcctccgttacaaattccacagcagactgctcagcatagtatagtgctgcctctgaagaagccgcccaagtggattcgaaggcctgttggtgcttctttttcatttggaggcaaactggttacgtttgagaatgtcagaatgccttctcatcagggagctgagcagcagcagcagcagcaccatgtgttcattagtcaggttgtaacagaaaaggagttcctcagccgatcagaccaacttcagcaggctgtgcagtcacaaggatttatcaattattgccaaaaaaaaattgatgcttctcagactgaatttgagaaaaatgtgtggtcctttttgaaggtaaactttgaggatgattctcgtggaaaataccttgaacttctaggatacagaaaagaagatctaggaaagaagcacattaaagaggaaaaagaagaatctgaatttctaccctcatctggaggaacatttaatatctctgtcagtggggacattgatggtttaattactcaggctttgctgacgggcaattttgagagtgctgttgacctttgtttacatgataaccgcatggccgatgccattatattggccatagcaggtggacaagaactcttggctcgaacccagaaaaaatacttcgcaaaatcccaaagcaaaattaccaggctcatcactgcagtggtgatgaagaactggaaagagattgttgagtcttgtgatcttaaaaattggagagaggctttagctgcagtattgacttatgcaaagccggatgaattttcagccctttgtgatcttttgggaaccaggcttgaaaatgaaggagatagcctcctgcagactcaagcatgtctctgctatatttgtgcagggaatgtagagaaattagttgcatgttggactaaagctcaagatggaagccaccctttgtcacttcaggatctgattgagaaagttgtcatcctgcgaaaagctgtgcaactcactcaagccatggacactagtactgtaggagttctcttggctgcgaagatgagtcagtatgccaatttgttggcagctcagggcagtattgctgcagccttggcttttcttcctgacaacaccaaccagccaaatatcatgcagcttcgtgacagactttgtagagcacaaggagagcctgtagcaggacatgaatcacctaaaattccgtacgagaaacagcagctccccaagggcaggcctggaccagttgctggccaccaccagatgccaagagttcaaactcaacaatattatccccatggagaaaatcctccacctccgggtttcataatgcatggaaatgttaatccaaatgcttctggtcagcttcccacatctccaggtcatatgcacacccaggtaccaccttatccacagccacagccttatcaaccagcccagccgtatcccttcggaacaggggggtcagcaatgtatcgacctcagcagcctgttgctcctcctacttcaaacgcttaccctaacaccccttacatatcttctgcttcttcctatactgggcagtctcagctgtacgcagcacagcaccaggcctcttcacctacctccagccctgctacttctttccctcctcccccttcctctggagcatccttccagcatggcggaccaggagctccaccatcatcttcagcttatgcactgcctcctggaacaacaggtacactgcctgctgccagtgagctgcctgcgtcccaaagaacaggtcctcagaatggttggaatgaccctccagctttgaacagagtacccaaaaagaagaagatgcctgaaaacttcatgcctcctgttcccatcacatcaccaatcatgaacccgttgggtgacccccagtcacaaatgctgcagcaacagccttcagctccagtaccactgtcaagccagtcttcattcccacagccacatcttccaggtggccagcccttccatggcgtacagcaacctcttggtcaaacaggcatgccaccatctttttcaaagcccaatattgaaggtgccccaggggctcctattggaaataccttccagcatgtgcagtctttgccaacaaaaaaaattaccaagaaacctattccagatgagcacctcattctaaagaccacatttgaggatcttattcagcgctgcctttcttcagcaacagaccctcaaaccaagaggaagctagatgatgccagcaaacgtttggagtttctgtatgataaacttagggaacagacactttcaccaacaatcaccagtggtttacacaacattgcaaggagcattgaaactcgaaactactcagaaggattgaccatgcatacccacatagttagcaccagcaacttcagtgagacctctgctttcatgccagttctcaaagttgttctcacccaggccaataagctgggtgtctaaaaggacagcttctcttccactcaatattgccatttttccaaagaaacatgttaaaaaaaaaaattataagacatggactagtcctcattagcatgtttgcatagcaaccagtcaagagcatttacactatttctgctgatatactcaccttagaactgctcagaaccctggtgctttatttttgttttaatcttttgttgccagtgatgattttcctattctgcaaatagtgtatttcctggattacacatagtatggtttcctgaagtattctgataaatgtgtttttttaaaacctcaatatactttttagaaaaggagcatctggttatgcataaagcagagctaaaactaaatttctttcatgtcctccctacttcctcagtgtcaatcagattaaagtgtgtaatcct

SEQ ID NO: 360557 - DNA, 1017 bp, Homo sapiens
  misc_feature (925)..(925): n is a, c, g, or t
tgcgactgcttccgaggtcatgttcccaggacgggcgcgtcttcagggtggaagcctggcgcacgtccggaggtgccgaggacccaaccagcccaaactctgggggaaatgactcccctctgccctcgccccgcgctctgctaccatttccttacgtctctgcttcgctcagcgatgcaaaacgcgcgaggcgcacggcagagggccgaagccgcggtactctccgggccaggcccgcccctcggccgcgccgcgcagcacgggattccccggccgctgtccagcgctggccgcctgagccaaggctgccgcggagccagtacagtcggggccgctggctggaagggcgagcttcctaaggcggggggaagcccggcgccggggccggagacacccgccatttcacccagtaagcgggcccggcctgcggaggtgggcggcatgcagctccgctttgcccggctctccgagcacgccacggcccccacccggggctccgcgcgcgccgcgggctacgacctgtacagtgcctatgattacacaataccacctatggagaaagctgttgtgaaaacggacattcagatagcgctcccttctgggtgttatggaagagtggctccacggtcaggcttggctgcaaaacactttattgatgtaggagctggtgtcatagatgaagattatagaggaaatgttggtgttgtactgtttaattttggcaaagaaaagtttgaagtcaaaaaaggtgatcgaattgcacagctcatttgcgaacggattttttatccagaaatagaagaagttcaagccttggatgacaccgaaaggggttcaggaggttttggttccactggaaagaattaaaatttatgccaagaacagaaaacaagaagtcatacctttttcttaaaaaaaaaagttntgctcacaatggaaggcggttggcctctttaactactggccttacctctaagtctggttttaccttatagatccggaaactcttccaacaca

SEQ ID NO: 360558 - DNA, 1826 bp, Homo sapiens
tgcgactgcttccgaggtcatgttcccaggacgggcgcgtcttcagggtggaagcctggcgcacgtccggaggtgccgaggacccaaccagcccaaactctgggggaaatgactcccctctgccctcgccccgcgctctgctaccatttccttacgtctctgcttcgctcagcgatgcaaaacgcgcgaggcgcacggcagagggccgaagccgcggtactctccgggccaggcccgcccctcggccgcgccgcgcagcacgggattccccggccgctgtccagcgctggccgcctgagccaaggctgccgcggagccagtacagtcggggccgctggctggaagggcgagcttcctaaggcggggggaagcccggcgccggggccgggtaggaaaggcgggggaggggctccggccgtctggaaggaatccacgcggcttgaggctgtgggggaagtagggtggcgagcggtccttctgcgcgcggggggcggggggggtggggtggtccattagggtcccctggcgagggggcggctttctagtgtgtgagggcgacgccctagaagctccccttcaaagttggccccacgcgctgaatgtggaaagttgactgggacccagtagtttcccatcccaaacctgctttccgagaagggcttcaaacccaaaatgtgaatcccgcctcccctctcagccagaactgtggactcgtcccggggaggggcggtgggtggggcggggctggcgggaaatttcggttttggcgcgctccctgcggcgacgctcatcgtgcgctctcctcttcccccggtggtctcctcgctcgccttctggctctgccatgccctgctctgaagagacacccgccatttcacccagtaagcgggcccggcctgcggaggtgggcggcatgcagctccgctttgcccggctctccgagcacgccacggcccccacccggggctccgcgcgcgccgcgggctacgacctgtacagtgcctatgattacacaataccacctatggagaaagctgttgtgaaaacggacattcagatagcgctcccttctgggtgttatggaagagtggctccacggtcaggcttggctgcaaaacactttattgatgtaggagctggtgtcatagatgaagattatagaggaaatgttggtgttgtactgtttaattttggcaaagaaaagtttgaagtcaaaaaaggtgatcgaattgcacagctcatttgcgaacggattttttatccagaaatagaagaagttcaagccttggatgacaccgaaaggggttcaggaggttttggttccactggaaagaattaaaatttatgccaagaacagaaaacaagaagtcatacctttttcttaaaaaaaaaaaaaaagtttttgcttcaagtgttttggtgttttgcacttctgtaaacttactagctttaccttctaaaagtactgcattttttacttttttttatgatcaaggaaaagatcattaaaaaaaaacacaaagaagtttttctttgtgtttggatcaaaaagaaactttgtttttccgcaattgaaggttgtatgtaaatctgctttgtggtgacctgatgtaaacagtgtcttcttaaaatcaaatgtaaatcaattacagattaaaaaaaaaagcctgtatttaactcatatgatctcccttcagcaacttattttgctttaattgctttaaatcttaagcaatattttttattcagtaaacaaattctttcacaaggtacaaaatcttgcataagctgaactaaaataaaaatgaaaaggagagattaaaggt

SEQ ID NO: 360559 - DNA, 2634 bp, Homo sapiens
tgcgactgcttccgaggtcatgttcccaggacgggcgcgtcttcagggtggaagcctggcgcacgtccggaggtgccgaggacccaaccagcccaaactctgggggaaatgactcccctctgccctcgccccgcgctctgctaccatttccttacgtctctgcttcgctcagcgatgcaaaacgcgcgaggcgcacggcagagggccgaagccgcggtactctccgggccaggcccgcccctcggccgcgccgcgcagcacgggattccccggccgctgtccagcgctggccgcctgagccaaggctgccgcggagccagtacagtcggggccgctggctggaagggcgagcttcctaaggcggggggaagcccggcgccggggccgggtaggaaaggcgggggaggggctccggccgtctggaaggaatccacgcggcttgaggctgtgggggaagtagggtggcgagcggtccttctgcgcgcggggggcggggggggtggggtggtccattagggtcccctggcgagggggcggctttctagtgtgtgagggcgacgccctagaagctccccttcaaagttggccccacgcgctgaatgtggaaagttgactgggacccagtagtttcccatcccaaacctgctttccgagaagggcttcaaacccaaaatgtgaatcccgcctcccctctcagccagaactgtggactcgtcccggggaggggcggtgggtggggcggggctggcgggaaatttcggttttggcgcgctccctgcggcgacgctcatcgtgcgctctcctcttcccccggtggtctcctcgctcgccttctggctctgccatgccctgctctgaagagacacccgccatttcacccagtaagcgggcccggcctgcggaggtgggcggcatgcagctccgctttgcccggctctccgagcacgccacggcccccacccggggctccgcgcgcgccgcgggctacgacctgtacagtgcctatgattacacaataccacctatggagaaagctgttgtgaaaacggacattcagatagcgctcccttctgggtgttatggaagagtggctccacggtcaggcttggctgcaaaacactttattgatgtaggagctggtgtcatagatgaagattatagaggaaatgttggtgttgtactgtttaattttggcaaagaaaagtttgaagtcaaaaaaggtgatcgaattgcacagctcatttgcgaacggattttttatccagaaatagaagaagttcaagccttggatgacaccgaaaggggttcaggaggttttggttccactggaaagaattaaaatttatgccaagaacagaaaacaagaagtcatacctttttcttaaaaaaaaaaaaaaagtttttgcttcaagtgttttggtgttttgcacttctgtaaacttactagctttaccttctaaaagtactgcattttttacttttttttatgatcaaggaaaagatcattaaaaaaaaacacaaagaagtttttctttgtgtttggatcaaaaagaaactttgtttttccgcaattgaaggttgtatgtaaatctgctttgtggtgacctgatgtaaacagtgtcttcttaaaatcaaatgtaaatcaattacagattaaaaaaaaaagcctgtatttaactcatatgatctcccttcagcaacttattttgctttaattgctttaaatcttaagcaatattttttattcagtaaacaaattctttcacaaggtacaaaatcttgcataagctgaactaaaataaaaatgaaaaggagagattaaaggtattccttgttcttcccttctcttcactagtctaaaaacttctttttaatcttaagattctttgtgatgagggtgagaaaaagaatcctcagtttatttttccactattaatctttcttttgataaatcctctattgactgggtagaggtatgtttgtgaaagacatgtaacttggggatttgttactttaggtttgttcccttgaatttcatctcatcaggcaaattgtactagttgtagttacgagttttccctcagtgaagtagcaataggctgtaatcaagaaaatatgccatttatagagataagataaatgaaataatacttcagccaccaggtttttctgtctcacatacataagcagcatttcattgcagatatgggactgattctgtggcttaccttgattaacatcttttggaagttttgctagtgtgctttcctttctttactatgtttctcagattcctttgtatcagggttttgggtgtcacttaggttttgtccatcagattctgtgagacaccaggcatcgttttgaggatgtgggttatacacatggagtgcttctggaactatcagcccacttgaccacccagtttgtggaagcacaggcaagagtgttcttttctggtgattctccaggccatttaataccctgcaatgtaattgtccctctgtggctcacatttcattagtgagccatgaaatcaactcagtgggacatagccagcatttttgcataccaggttgggctataaaatatttctgttgtcaataaattttaaatgttttcctgctaaaaaaa

SEQ ID NO: 360560 - DNA, 1354 bp, Homo sapiens
tgcgactgcttccgaggtcatgttcccaggacgggcgcgtcttcagggtggaagcctggcgcacgtccggaggtgccgaggacccaaccagcccaaactctgggggaaatgactcccctctgccctcgccccgcgctctgctaccatttccttacgtctctgcttcgctcagcgatgcaaaacgcgcgaggcgcacggcagagggccgaagccgcggtactctccgggccaggcccgcccctcggccgcgccgcgcagcacgggattccccggccgctgtccagcgctggccgcctgagccaaggctgccgcggagccagtacagtcggggccgctggctggaagggcgagcttcctaaggcggggggaagcccggcgccggggccggagacacccgccatttcacccagtaagcgggcccggcctgcggaggtgggcggcatgcagctccgctttgcccggctctccgagcacgccacggcccccacccggggctccgcgcgcgccgcgggctacgacctgtacagtgcctatgattacacaataccacctatggagaaagctgttgtgaaaacggacattcagatagcgctcccttctgggtgttatggaagagtggctccacggtcaggcttggctgcaaaacactttattgatgtaggagctggtgtcatagatgaagattatagaggaaatgttggtgttgtactgtttaattttggcaaagaaaagtttgaagtcaaaaaaggtgatcgaattgcacagctcatttgcgaacggattttttatccagaaatagaagaagttcaagccttggatgacaccgaaaggggttcaggaggttttggttccactggaaagaattaaaatttatgccaagaacagaaaacaagaagtcatacctttttcttaaaaaaaaaaaaaaagtttttgcttcaagtgttttggtgttttgcacttctgtaaacttactagctttaccttctaaaagtactgcattttttacttttttttatgatcaaggaaaagatcattaaaaaaaaacacaaagaagtttttctttgtgtttggatcaaaaagaaactttgtttttccgcaattgaaggttgtatgtaaatctgctttgtggtgacctgatgtaaacagtgtcttcttaaaatcaaatgtaaatcaattacagattaaaaaaaaaagcctgtatttaactcatatgatctcccttcagcaacttattttgctttaattgctttaaatcttaagcaatattttttattcagtaaacaaattctttcacaaggtacaaaatcttgcataagctgaactaaaataaaaatgaaaaggagagattaaaggt

SEQ ID NO: 360561 - DNA, 1094 bp, Homo sapiens
cgcgggcacaaactaggctaggtacgaggccggtgttaatcggccgagggcgagctcatcgtgcgctctcctcttcccccggtggtctcctcgctcgccttctggctctgccatgccctgctctgaagagacacccgccatttcacccagtaagcgggcccggcctgcggaggtgggcggcatgcagctccgctttgcccggctctccgagcacgccacggcccccacccggggctccgcgcgcgccgcgggctacgacctgtacagtgcctatgattacacaataccacctatggagaaagctgttgtgaaaacggacattcagatagcgctcccttctgggtgttatggaagagtggctccacggtcaggcttggctgcaaaacactttattgatgtaggagctggtgtcatagatgaagattatagaggaaatgttggtgttgtactgtttaattttggcaaagaaaagtttgaagtcaaaaaaggtgatcgaattgcacagctcatttgcgaacggattttttatccagaaatagaagaagttcaagccttggatgacaccgaaaggggttcaggaggttttggttccactggaaagaattaaaatttatgccaagaacagaaaacaagaagtcatacctttttcttaaaaaaaaaaaaaaagtttttgcttcaagtgttttggtgttttgcacttctgtaaacttactagctttaccttctaaaagtactgcattttttacttttttttatgatcaaggaaaagatcattaaaaaaaaacacaaagaagtttttctttgtgtttggatcaaaaagaaactttgtttttccgcaattgaaggttgtatgtaaatctgctttgtggtgacctgatgtaaacagtgtcttcttaaaatcaaatgtaaatcaattacagattaaaaaaaaaagcctgtatttaactcatatgatctcccttcagcaacttattttgctttaattgctttaaatcttaagcaatattttttattcagtaaacaaattctttcacaaggtacaaaatcttgcataagctgaactaaaataaaaatgaaaaggagagattaaaggt

SEQ ID NO: 360562 - DNA, 3062 bp, Homo sapiens
tgcgactgcttccgaggtcatgttcccaggacgggcgcgtcttcagggtggaagcctggcgcacgtccggaggtgccgaggacccaaccagcccaaactctgggggaaatgactcccctctgccctcgccccgcgctctgctaccatttccttacgtctctgcttcgctcagcgatgcaaaacgcgcgaggcgcacggcagagggccgaagccgcggtactctccgggccaggcccgcccctcggccgcgccgcgcagcacgggattccccggccgctgtccagcgctggccgcctgagccaaggctgccgcggagccagtacagtcggggccgctggctggaagggcgagcttcctaaggcggggggaagcccggcgccggggccggagacacccgccatttcacccagtaagcgggcccggcctgcggaggtgggcggcatgcagctccgctttgcccggctctccgagcacgccacggcccccacccggggctccgcgcgcgccgcgggctacgacctgtacagtgcctatgattacacaataccacctatggagaaagctgttgtgaaaacggacattcagatagcgctcccttctgggtgttatggaagagtggctccacggtcaggcttggctgcaaaacactttattgatgtaggagctggtgtcatagatgaagattatagaggaaatgttggtgttgtactgtttaattttggcaaagaaaagtttgaagtcaaaaaaggtgatcgaattgcacagctcatttgcgaacggattttttatccagaaatagaagaagttcaagccttggatgacaccgaaaggggttcaggaggttttggttccactggaaagaattaaaatttatgccaagaacagaaaacaagaagtcatacctttttcttaaaaaaaaaaaaaaagtttttgcttcaagtgttttggtgttttgcacttctgtaaacttactagctttaccttctaaaagtactgcattttttacttttttttatgatcaaggaaaagatcattaaaaaaaaacacaaagaagtttttctttgtgtttggatcaaaaagaaactttgtttttccgcaattgaaggttgtatgtaaatctgctttgtggtgacctgatgtaaacagtgtcttcttaaaatcaaatgtaaatcaattacagattaaaaaaaaaagcctgtatttaactcatatgatctcccttcagcaacttattttgctttaattgctttaaatcttaagcaatattttttattcagtaaacaaattctttcacaaggtacaaaatcttgcataagctgaactaaaataaaaatgaaaaggagagattaaaggtattccttgttcttcccttctcttcactagtctaaaaacttctttttaatcttaagattctttgtgatgagggtgagaaaaagaatcctcagtttatttttccactattaatctttcttttgataaatcctctattgactgggtagaggtatgtttgtgaaagacatgtaacttggggatttgttactttaggtttgttcccttgaatttcatctcatcaggcaaattgtactagttgtagttacgagttttccctcagtgaagtagcaataggctgtaatcaagaaaatatgccatttatagagataagataaatgaaataatacttcagccaccaggtttttctgtctcacatacataagcagcatttcattgcagatatgggactgattctgtggcttaccttgattaacatcttttggaagttttgctagtgtgctttcctttctttactatgtttctcagattcctttgtatcagggttttgggtgtcacttaggttttgtccatcagattctgtgagacaccaggcatcgttttgaggatgtgggttatacacatggagtgcttctggaactatcagcccacttgaccacccagtttgtggaagcacaggcaagagtgttcttttctggtgattctccaggccatttaataccctgcaatgtaattgtccctctgtggctcacatttcattagtgagccatgaaatcaactcagtgggacatagccagcatttttgcataccaggttgggctataaaatatttctgttgtcaataaattttaaatgttttcctgctaaaaaaaaaacaaacaaacaaaaaataaaacaaaaaaaaaaaaacacacacaaaaaaaaaggaaaaaaaaaggaaaaagaaaaagaagaaaaaagaaaaaaaaaaaaaaaaaaaaaaaaaagagaggggggggcgcgcgcaaaaaagatatctcccccgaagaggggcgcacaaagcaaggcgagacccccgatttttgtaaaaaaggggggccccaaaaaggggcgtcattatacaaagagggacacggggcatttaacaaacattagaaaagaggaaaacatctgccaacggggaacaactcagaagaaacacccccaagagagggggaggaacaataggtggaccacctccaccaaaaaagataataaccccccaagagaaacaaataaaaacacaccaagagggagagtagacagctgcgacaacacacagcgccaaacaacactccccggcggagtaaacaatctcgcccaccaagggcacaatctatcaaagaaattctccggagggagtattagataataaagaagacagaacagcagaagcacgaacagagagcccgcactcgaacaaacaacaacaataggcagagcagaagaaacaaaacgagcgcaaaaaagaagaggaaaaagccagaggacagcagatgacgtacacagggcacccagcagaacaccacacctagacgaccaataaataaacaagcgcggaccggggcggcgccccccacaccgaccccagcaggagcagcgtacaacagaacacagaaagccacaacgagcgtcaacataactacgatcatagcaccaagcaggaaccaaagcacaaagacatcaaacaagaacaagaacaaacacagaagaacacgacacgacaacggacgagacgcacaagagcgaaacaa

SEQ ID NO: 360563 - DNA, 1038 bp, Homo sapiens
tgcgactgcttccgaggtcatgttcccaggacgggcgcgtcttcagggtggaagcctggcgcacgtccggagagacacccgccatttcacccagtaagcgggcccggcctgcggaggtgggcggcatgcagctccgctttgcccggctctccgagcacgccacggcccccacccggggctccgcgcgcgccgcgggctacgacctgtacagtgcctatgattacacaataccacctatggagaaagctgttgtgaaaacggacattcagatagcgctcccttctgggtgttatggaagagtggctccacggtcaggcttggctgcaaaacactttattgatgtaggagctggtgtcatagatgaagattatagaggaaatgttggtgttgtactgtttaattttggcaaagaaaagtttgaagtcaaaaaaggtgatcgaattgcacagctcatttgcgaacggattttttatccagaaatagaagaagttcaagccttggatgacaccgaaaggggttcaggaggttttggttccactggaaagaattaaaatttatgccaagaacagaaaacaagaagtcatacctttttcttaaaaaaaaaaaaaaagtttttgcttcaagtgttttggtgttttgcacttctgtaaacttactagctttaccttctaaaagtactgcattttttacttttttttatgatcaaggaaaagatcattaaaaaaaaacacaaagaagtttttctttgtgtttggatcaaaaagaaactttgtttttccgcaattgaaggttgtatgtaaatctgctttgtggtgacctgatgtaaacagtgtcttcttaaaatcaaatgtaaatcaattacagattaaaaaaaaaagcctgtatttaactcatatgatctcccttcagcaacttattttgctttaattgctttaaatcttaagcaatattttttattcagtaaacaaattctttcacaaggtacaaaatcttgcataagctgaactaaaataaaaatgaaaaggagagattaaaggt

SEQ ID NO: 360564 - DNA, 1035 bp, Homo sapiens
ggttccggcgcttagggcgccgctaaactcagagcccgggagtcatggctgcgggcggtgccgccccagagacacccgccatttcacccagtaagcgggcccggcctgcggaggtgggcggcatgcagctccgctttgcccggctctccgagcacgccacggcccccacccggggctccgcgcgcgccgcgggctacgacctgtacagtgcctatgattacacaataccacctatggagaaagctgttgtgaaaacggacattcagatagcgctcccttctgggtgttatggaagagtggctccacggtcaggcttggctgcaaaacactttattgatgtaggagctggtgtcatagatgaagattatagaggaaatgttggtgttgtactgtttaattttggcaaagaaaagtttgaagtcaaaaaaggtgatcgaattgcacagctcatttgcgaacggattttttatccagaaatagaagaagttcaagccttggatgacaccgaaaggggttcaggaggttttggttccactggaaagaattaaaatttatgccaagaacagaaaacaagaagtcatacctttttcttaaaaaaaaaaaaaaagtttttgcttcaagtgttttggtgttttgcacttctgtaaacttactagctttaccttctaaaagtactgcattttttacttttttttatgatcaaggaaaagatcattaaaaaaaaacacaaagaagtttttctttgtgtttggatcaaaaagaaactttgtttttccgcaattgaaggttgtatgtaaatctgctttgtggtgacctgatgtaaacagtgtcttcttaaaatcaaatgtaaatcaattacagattaaaaaaaaaagcctgtatttaactcatatgatctcccttcagcaacttattttgctttaattgctttaaatcttaagcaatattttttattcagtaaacaaattctttcacaaggtacaaaatcttgcataagctgaactaaaataaaaatgaaaaggagagattaaaggt

SEQ ID NO: 360565 - DNA, 2065 bp, Homo sapiens
tgcgactgcttccgaggtcatgttcccaggacgggcgcgtcttcagggtggaagcctggcgcacgtccggaggtgccgaggacccaaccagcccaaactctgggggaaatgactcccctctgccctcgccccgcgctctgctaccatttccttacgtctctgcttcgctcagcgatgcaaaacgcgcgaggcgcacggcagagggccgaagccgcggtactctccgggccaggcccgcccctcggccgcgccgcgcagcacgggattccccggccgctgtccagcgctggccgcctgagccaaggctgccgcggagccagtacagtcggggccgctggctggaagggcgagcttcctaaggcggggggaagcccggcgccggggccggagacacccgccatttcacccagtaagcgggcccggcctgcggaggtgggcggcatgcagctccgctttgcccggctctccgagcacgccacggcccccacccggggctccgcgcgcgccgcgggctacgacctgtacagtgcctatgattacacaataccacctatggagaaagctgttgtgaaaacggacattcagatagcgctcccttctgggtgttatggaagagtggctccacggtcaggcttggctgcaaaacactttattgatgtaggagctggtgtcatagatgaagattatagaggaaatgttggtgttgtactgtttaattttggcaaagaaaagtttgaagtcaaaaaaggtgatcgaattgcacagctcatttgcgaacggattttttatccagaaatagaagaagttcaagccttggatgacaccgaaaggggttcaggaggttttggttccactggaaagaattaaaatttatgccaagaacagaaaacaagaagtcatacctttttcttaaaaaaaaaaaaaaagtttttgcttcaagtgttttggtgttttgcacttctgtaaacttactagctttaccttctaaaagtactgcattttttacttttttttatgatcaaggaaaagatcattaaaaaaaaacacaaagaagtttttctttgtgtttggatcaaaaagaaactttgtttttccgcaattgaaggttgtatgtaaatctgctttgtggtgacctgatgtaaacagtgtcttcttaaaatcaaatgtaaatcaattacagattaaaaaaaaaagcctgtatttaaaaaaaaaaaaaaaaaaaaaaaaaaaaaaaaaaaaaaaaaaaaaaaaaaaaaaaaaaaaaaaaaaaaaaaaaaaagagaggggggggcgcgcgcaaaaaagatatctcccccgaagaggggcgcacaaagcaaggcgagacccccgatttttgtaaaaaaggggggccccaaaaaggggcgtcattatacaaagagggacacggggcatttaacaaacattagaaaagaggaaaacatctgccaacggggaacaactcagaagaaacacccccaagagagggggaggaacaataggtggaccacctccaccaaaaaagataataaccccccaagagaaacaaataaaaacacaccaagagggagagtagacagctgcgacaacacacagcgccaaacaacactccccggcggagtaaacaatctcgcccaccaagggcacaatctatcaaagaaattctccggagggagtattagataataaagaagacagaacagcagaagcacgaacagagagcccgcactcgaacaaacaacaacaataggcagagcagaagaaacaaaacgagcgcaaaaaagaagaggaaaaagccagaggacagcagatgacgtacacagggcacccagcagaacaccacacctagacgaccaataaataaacaagcgcggaccggggcggcgccccccacaccgaccccagcaggagcagcgtacaacagaacacagaaagccacaacgagcgtcaacataactacgatcatagcaccaagcaggaaccaaagcacaaagacatcaaacaagaacaagaacaaacacagaagaacacgacacgacaacggacgagacgcacaagagcgaaacaa

SEQ ID NO: 360566 - DNA, 2213 bp, Homo sapiens
tgcgactgcttccgaggtcatgttcccaggacgggcgcgtcttcagggtggaagcctggcgcacgtccggaggtgccgaggacccaaccagcccaaactctgggggaaatgactcccctctgccctcgccccgcgctctgctaccatttccttacgtctctgcttcgctcagcgatgcaaaacgcgcgaggcgcacggcagagggccgaagccgcggtactctccgggccaggcccgcccctcggccgcgccgcgcagcacgggattccccggccgctgtccagcgctggccgcctgagccaaggctgccgcggagccagtacagtcggggccgctggctggaagggcgagcttcctaaggcggggggaagcccggcgccggggccggagacacccgccatttcacccagtaagcgggcccggcctgcggaggtgggcggcatgcagctccgctttgcccggctctccgagcacgccacggcccccacccggggctccgcgcgcgccgcgggctacgacctgtacagtgcctatgattacacaataccacctatggagaaagctgttgtgaaaacggacattcagatagcgctcccttctgggtgttatggaagagtggctccacggtcaggcttggctgcaaaacactttattgatgtaggagctggtgtcatagatgaagattatagaggaaatgttggtgttgtactgtttaattttggcaaagaaaagtttgaaggatatggcgaatgtgtcagtaacgtcagtaataaactattctttctttgaatcaaaaaaggtgatcgaattgcacagctcatttgcgaacggattttttatccagaaatagaagaagttcaagccttggatgacaccgaaaggggttcaggaggttttggttccactggaaagaattaaaatttatgccaagaacagaaaacaagaagtcatacctttttcttaaaaaaaaaaaaaaagtttttgcttcaagtgttttggtgttttgcacttctgtaaacttactagctttaccttctaaaagtactgcattttttacttttttttatgatcaaggaaaagatcattaaaaaaaaacacaaagaagtttttctttgtgtttggatcaaaaagaaactttgtttttccgcaattgaaggttgtatgtaaatctgctttgtggtgacctgatgtaaacagtgtcttcttaaaatcaaatgtaaatcaattacagattaaaaaaaaaagcctgtatttaactcatatgatctcccttcagcaacttattttgctttaattgctttaaatcttaagcaatattttttattcagtaaacaaattctttcacaaggtacaaaatcttgcataagctgaactaaaataaaaatgaaaaggagagattaaaggtattccttgttcttcccttctcttcactagtctaaaaacttctttttaatcttaagattctttgtgatgagggtgagaaaaagaatcctcagtttatttttccactattaatctttcttttgataaatcctctattgactgggtagaggtatgtttgtgaaagacatgtaacttggggatttgttactttaggtttgttcccttgaatttcatctcatcaggcaaattgtactagttgtagttacgagttttccctcagtgaagtagcaataggctgtaatcaagaaaatatgccatttatagagataagataaatgaaataatacttcagccaccaggtttttctgtctcacatacataagcagcatttcattgcagatatgggactgattctgtggcttaccttgattaacatcttttggaagttttgctagtgtgctttcctttctttactatgtttctcagattcctttgtatcagggttttgggtgtcacttaggttttgtccatcagattctgtgagacaccaggcatcgttttgaggatgtgggttatacacatggagtgcttctggaactatcagcccacttgaccacccagtttgtggaagcacaggcaagagtgttcttttctggtgattctccaggccatttaataccctgcaatgtaattgtccctctgtggctcacatttcattagtgagccatgaaatcaactcagtgggacatagccagcatttttgcataccaggttgggctataaaatatttctgttgtcaataaattttaaatgttttcctgctaaaaaaa

SEQ ID NO: 360567 - DNA, 2598 bp, Homo sapiens
tgcgactgcttccgaggtcatgttcccaggacgggcgcgtcttcagggtggaagcctggcgcacgtccggaggtgccgaggacccaaccagcccaaactctgggggaaatgactcccctctgccctcgccccgcgctctgctaccatttccttacgtctctgcttcgctcagcgatgcaaaacgcgcgaggcgcacggcagagggccgaagccgcggtactctccgggccaggcccgcccctcggccgcgccgcgcagcacgggattccccggccgctgtccagcgctggccgcctgagccaaggctgccgcggagccagtacagtcggggccgctggctggaagggcgagcttcctaaggcggggggaagcccggcgccggggccggagacacccgccatttcacccagtaagcgggcccggcctgcggaggtgggcggcatgcagctccgctttgcccggctctccgagcacgccacggcccccacccggggctccgcgcgcgccgcgggctacgacctgtacagtgcctatgattacacaataccacctatggagaaagctgttgtgaaaacggacattcagatagcgctcccttctgggtgttatggaagagtggctccacggtcaggcttggctgcaaaacactttattgatgtaggagctggtgtcatagatgaagattatagaggaaatgttggtgttgtactgtttaattttggcaaagaaaagtttgaagtcaaaaaaggtgatcgaattgcacagctcatttgcgaacggattttttatccagaaatagaagaagttcaagtaagtattacaaaggaagatacagaataagtaatataacatcttaagtgaagaaatatatataatcttgagaatttaatatgctgtttgtaactaaatagtatatatgactaaacttattttaagcaaatttaaaatactagttttagaatttctttaaatgtttttcatgtagctattatgtagtattactttggataataagttatttaaacatactgtgaacttctaatattttattagaattttttaaagttatccagtattctaatttatggagctttttagaatttaattttctttctgtaatctcccttttgaaaagatgatatagcaagagtagaattctggctgtatttttcttaggagctggagaggaaaactgaaagaggctcttaaaaaaaactgtgaagcttactacctttctatctttcaggccttggatgacaccgaaaggggttcaggaggttttggttccactggaaagaattaaaatttatgccaagaacagaaaacaagaagtcatacctttttcttaaaaaaaaaaaaaaagtttttgcttcaagtgttttggtgttttgcacttctgtaaacttactagctttaccttctaaaagtactgcattttttacttttttttatgatcaaggaaaagatcattaaaaaaaaacacaaagaagtttttctttgtgtttggatcaaaaagaaactttgtttttccgcaattgaaggttgtatgtaaatctgctttgtggtgacctgatgtaaacagtgtcttcttaaaatcaaatgtaaatcaattacagattaaaaaaaaaagcctgtatttaactcatatgatctcccttcagcaacttattttgctttaattgctttaaatcttaagcaatattttttattcagtaaacaaattctttcacaaggtacaaaatcttgcataagctgaactaaaataaaaatgaaaaggagagattaaaggtattccttgttcttcccttctcttcactagtctaaaaacttctttttaatcttaagattctttgtgatgagggtgagaaaaagaatcctcagtttatttttccactattaatctttcttttgataaatcctctattgactgggtagaggtatgtttgtgaaagacatgtaacttggggatttgttactttaggtttgttcccttgaatttcatctcatcaggcaaattgtactagttgtagttacgagttttccctcagtgaagtagcaataggctgtaatcaagaaaatatgccatttatagagataagataaatgaaataatacttcagccaccaggtttttctgtctcacatacataagcagcatttcattgcagatatgggactgattctgtggcttaccttgattaacatcttttggaagttttgctagtgtgctttcctttctttactatgtttctcagattcctttgtatcagggttttgggtgtcacttaggttttgtccatcagattctgtgagacaccaggcatcgttttgaggatgtgggttatacacatggagtgcttctggaactatcagcccacttgaccacccagtttgtggaagcacaggcaagagtgttcttttctggtgattctccaggccatttaataccctgcaatgtaattgtccctctgtggctcacatttcattagtgagccatgaaatcaactcagtgggacatagccagcatttttgcataccaggttgggctataaaatatttctgttgtcaataaattttaaatgttttcctgctaaaaaaa

SEQ ID NO: 360568 - DNA, 2091 bp, Homo sapiens
tgcgactgcttccgaggtcatgttcccaggacgggcgcgtcttcagggtggaagcctggcgcacgtccggaggtgccgaggacccaaccagcccaaactctgggggaaatgactcccctctgccctcgccccgcgctctgctaccatttccttacgtctctgcttcgctcagcgatgcaaaacgcgcgaggcgcacggcagagggccgaagccgcggtactctccgggccaggcccgcccctcggccgcgccgcgcagcacgggattccccggccgctgtccagcgctggccgcctgagccaaggctgccgcggagccagtacagtcggggccgctggctggaagggcgagcttcctaaggcggggggaagcccggcgccggggccggagacacccgccatttcacccagtaagcgggcccggcctgcggaggtgggcggcatgcagctccgctttgcccggctctccgagcacgccacggcccccacccggggctccgcgcgcgccgcgggctacgacctgtacagtgcctatgattacacaataccacctatggagaaagctgttgtgaaaacggacattcagatagcgctcccttctgggtgttatggaagagtggctccacggtcaggcttggctgcaaaacactttattgatgtaggagctggtgtcatagatgaagattatagaggaaatgttggtgttgtactgtttaattttggcaaagaaaagtttgaaggccttggatgacaccgaaaggggttcaggaggttttggttccactggaaagaattaaaatttatgccaagaacagaaaacaagaagtcatacctttttcttaaaaaaaaaaaaaaagtttttgcttcaagtgttttggtgttttgcacttctgtaaacttactagctttaccttctaaaagtactgcattttttacttttttttatgatcaaggaaaagatcattaaaaaaaaacacaaagaagtttttctttgtgtttggatcaaaaagaaactttgtttttccgcaattgaaggttgtatgtaaatctgctttgtggtgacctgatgtaaacagtgtcttcttaaaatcaaatgtaaatcaattacagattaaaaaaaaaagcctgtatttaactcatatgatctcccttcagcaacttattttgctttaattgctttaaatcttaagcaatattttttattcagtaaacaaattctttcacaaggtacaaaatcttgcataagctgaactaaaataaaaatgaaaaggagagattaaaggtattccttgttcttcccttctcttcactagtctaaaaacttctttttaatcttaagattctttgtgatgagggtgagaaaaagaatcctcagtttatttttccactattaatctttcttttgataaatcctctattgactgggtagaggtatgtttgtgaaagacatgtaacttggggatttgttactttaggtttgttcccttgaatttcatctcatcaggcaaattgtactagttgtagttacgagttttccctcagtgaagtagcaataggctgtaatcaagaaaatatgccatttatagagataagataaatgaaataatacttcagccaccaggtttttctgtctcacatacataagcagcatttcattgcagatatgggactgattctgtggcttaccttgattaacatcttttggaagttttgctagtgtgctttcctttctttactatgtttctcagattcctttgtatcagggttttgggtgtcacttaggttttgtccatcagattctgtgagacaccaggcatcgttttgaggatgtgggttatacacatggagtgcttctggaactatcagcccacttgaccacccagtttgtggaagcacaggcaagagtgttcttttctggtgattctccaggccatttaataccctgcaatgtaattgtccctctgtggctcacatttcattagtgagccatgaaatcaactcagtgggacatagccagcatttttgcataccaggttgggctataaaatatttctgttgtcaataaattttaaatgttttcctgctaaaaaaa

SEQ ID NO: 360569 - DNA, 901 bp, Homo sapiens
tgcgactgcttccgaggtcatgttcccaggacgggcgcgtcttcagggtggaagcctggcgcacgtccggaggtgccgaggacccaaccagcccaaactctgggggaaatgactcccctctgccctcgccccgcgctctgctaccatttccttacgtctctgcttcgctcagcgatgcaaaacgcgcgaggcgcacggcagagggccgaagccgcggtactctccgggccaggcccgcccctcggccgcgccgcgcagcacgggattccccggccgctgtccagcgctggccgcctgagccaaggctgccgcggagccagtacagtcggggccgctggctggaagggcgagcttcctaaggcggggggaagcccggcgccggggccggagacacccgccatttcacccagtaagcgggcccggcctgcggaggtgggcggcatgcagctccgctttgcccggctctccgagcacgccacggcccccacccggggctccgcgcgcgccgcgggctacgacctgtacagtgcctatgattacacaataccacctatggagaaagctgttgtgaaaacggacattcagatagcgctcccttctgggtgttatggaagagtggctccacggtcaggcttggctgcaaaacactttattgatgtaggagctggtgtcatagatgaagattatagaggaaatgttggtgttgtactgtttaattttggcaaagaaaagtttgaagtcaaaaaaggtgatcgaattgcacagctcatttgcgaacggattttttatccagaaatagaagaagttcaacctgaccgtggagccactcttccataacacccagaagggagcgctatctgaatgtccgttttcacaacagctttctccaatccccggtcga

SEQ ID NO: 360570 - DNA, 756 bp, Homo sapiens
tgcgactgcttccgaggtcatgttcccaggacgggcgcgtcttcagggtggaagcctggcgcacgtccggaggtgccgaggacccaaccagcccaaactctgggggaaatgactcccctctgccctcgccccgcgctctgctaccatttccttacgtctctgcttcgctcagcgatgcaaaacgcgcgaggcgcacggcagagggccgaagccgcggtactctccgggccaggcccgcccctcggccgcgccgcgcagcacgggattccccggccgctgtccagcgctggccgcctgagccaaggctgccgcggagccagtacagtcggggccgctggctggaagggcgagcttcctaaggcggggggaagcccggcgccggggccggagacacccgccatttcacccagtaagcgggcccggcctgcggaggtgggcggcatgcagctccgctttgcccggctctccgagcacgccacggcccccacccggggctccgcgcgcgccgcgggctacgacctgtacagtgcctatgattacacaataccacctatggagaaagctgttgtgaaaacggacattcagatagcgctcccttctgggtgttatggaagagtggctccacggtcaggcttggctgcaaaacactttattgatgtaggagggcttttgtttggggtagagtattaataacaagtaagatgtgacatggagctgtcttcagttagattcacgtgagtcttatccagcctttca

SEQ ID NO: 360571 - DNA, 2225 bp, Homo sapiens
  misc_feature (2166)..(2166): n is a, c, g, or t
tgcgactgcttccgaggtcatgttcccaggacgggcgcgtcttcagggtggaagcctggcgcacgtccggaggtgccgaggacccaaccagcccaaactctgggggaaatgactcccctctgccctcgccccgcgctctgctaccatttccttacgtctctgcttcgctcagcgatgcaaaacgcgcgaggcgcacggcagagggccgaagccgcggtactctccgggccaggcccgcccctcggccgcgccgcgcagcacgggattccccggccgctgtccagcgctggccgcctgagccaaggctgccgcggagccagtacagtcggggccgctggctggaagggcgagcttcctaaggcggggggaagcccggcgccggggccggagacacccgccatttcacccagtaagcgggcccggcctgcggaggtgggcggcatgcagctccgctttgcccggctctccgagcacgccacggcccccacccggggctccgcgcgcgccgcgggctacgacctgtacagtgcctatgattacacaataccacctatggagaaagctgttgtgaaaacggacattcagatagcgctcccttctgggtgttatggaagagtggctccacggtcaggcttggctgcaaaacactttattgatgtaggagctggtgtcatagatgaagattatagaggaaatgttggtgttgtactgtttaattttggcaaagaaaagtttgaagtcaaaaaaggtgatcgaattgcacagctcatttgcgaacggattttttatccagaaatagaagaagttcaagccttggatgacaccgaaaggggttcaggaggttttggttccactggaaagaattaaaatttatgccaagaacagaaaacaagaagtcatacctttttcttaaaaaaaaaaaaaaagtttttgcttcaagtgttttggtgttttgcacttctgtaaacttactagctttaccttctaaaagtactgcattttttacttttttttatgatcaaggaaaagatcattaaaaaaaaacacaaagaagtttttctttgtgtttggatcaaaaagaaactttgtttttccgcaattgaaggttgtatgtaaatctgctttgtggtgacctgatgtaaacagtgtcttcttaaaatcaaatgtaaatcaattacagattaaaaaaaaaagcctgtatttaactcatatgatctcccttcagcaacttattttgctttaattgctttaaatcttaagcaatattttttattcagtaaacaaattctttcacaaggtacaaaatcttgcataagctgaactaaaataaaaatgaaaaggagagattaaaggtattccttgttcttcccttctcttcactagtctaaaaacttctttttaatcttaagattctttgtgatgagggtgagaaaaagaatcctcagtttatttttccactattaatctttcttttgataaatcctctattgactgggtagaggtatgtttgtgaaagacatgtaacttggggatttgttactttaggtttgttcccttgaatttcatctcatcaggcaaattgtactagttgtagttacgagttttccctcagtgaagtagcaataggctgtaatcaagaaaatatgccatttatagagataagataaatgaaataatacttcagccaccaggtttttctgtctcacatacataagcagcatttcattgcagatatgggactgattctgtggcttaccttgattaacatcttttggaagttttgctagtgtgctttcctttctttactatgtttctcagattcctttgtatcagggttttgggtgtcacttaggttttgtccatcagattctgtgagacaccaggcatcgttttgaggatgtgggttatacacatggagtgcttctggaactatcagcccacttgaccacccagtttgtggaagcacaggcaagagtgttcttttctggtgattctccaggccatttaataccctgcaatgtaattgtccctctgtggctcacatttcattagtgagccatgaaatcaactcagtgggacatagccagcatttttgcataccaggttgggctataaaatatttctgttgtcaataaattttaaatgttttcctgctaaaaaaaaggngaagtcaaaaaacaaattggcgggcccagcctattcccttagcgagggtaattttacct

SEQ ID NO: 360572 - DNA, 1285 bp, Homo sapiens
tgcgactgcttccgaggtcatgttcccaggacgggcgcgtcttcagggtggaagcctggcgcacgtccggaggtgccgaggacccaaccagcccaaactctgggggaaatgactcccctctgccctcgccccgcgctctgctaccatttccttacgtctctgcttcgctcagcgatgcaaaacgcgcgaggcgcacggcagagggccgaagccgcggtactctccgggccaggcccgcccctcggccgcgccgcgcagcacgggattccccggccgctgtccagcgctggccgcctgagccaaggctgccgcggagccaagacacccgccatttcacccagtaagcgggcccggcctgcggaggtgggcggcatgcagctccgctttgcccggctctccgagcacgccacggcccccacccggggctccgcgcgcgccgcgggctacgacctgtacagtgcctatgattacacaataccacctatggagaaagctgttgtgaaaacggacattcagatagcgctcccttctgggtgttatggaagagtggctccacggtcaggcttggctgcaaaacactttattgatgtaggagctggtgtcatagatgaagattatagaggaaatgttggtgttgtactgtttaattttggcaaagaaaagtttgaagtcaaaaaaggtgatcgaattgcacagctcatttgcgaacggattttttatccagaaatagaagaagttcaagccttggatgacaccgaaaggggttcaggaggttttggttccactggaaagaattaaaatttatgccaagaacagaaaacaagaagtcatacctttttcttaaaaaaaaaaaaaaagtttttgcttcaagtgttttggtgttttgcacttctgtaaacttactagctttaccttctaaaagtactgcattttttacttttttttatgatcaaggaaaagatcattaaaaaaaaacacaaagaagtttttctttgtgtttggatcaaaaagaaactttgtttttccgcaattgaaggttgtatgtaaatctgctttgtggtgacctgatgtaaacagtgtcttcttaaaatcaaatgtaaatcaattacagattaaaaaaaaaagcctgtatttaactcatatgatctcccttcagcaacttattttgctttaattgctttaaatcttaagcaatattttttattcagtaaacaaattctttcacaaggtacaaaatcttgcataagctgaactaaaataaaaatgaaaaggagagattaaaggt

SEQ ID NO: 360573 - DNA, 2157 bp, Homo sapiens
tgcgactgcttccgaggtcatgttcccaggacgggcgcgtcttcagggtggaagcctggcgcacgtccggaggtgccgaggacccaaccagcccaaactctgggggaaatgactcccctctgccctcgccccgcgctctgctaccatttccttacgtctctgcttcgctcagcgatgcaaaacgcgcgaggcgcacggcagagggccgaagccgcggtactctccgggccaggcccgcccctcggccgcgccgcgcagcacgggattccccggccgctgtccagcgctggccgcctgagccaaggctgccgcggagccagtacagtcggggccgctggctggaagggcgagcttcctaaggcggggggaagcccggcgccggggccgggtaggaaaggcgggggaggggctccggccgtctggaaggaatccacgcggcttgaggctgtgggggaagtagggtggcgagcggtccttctgcgcgcggggggcggggggggtggggtggtccattagggtcccctggcgagggggcggctttctagtgtgtgagggcgacgccctagaagctccccttcaaagttggccccacgcgctgaatgtggaaagttgactgggacccagtagtttcccatcccaaacctgctttccgagaagggcttcaaacccaaaatgtgaatcccgcctcccctctcagccagaactgtggactcgtcccggggaggggcggtgggtggggcggggctggcgggaaatttcggttttggcgcgctccctgcggcgacgctcatcgtgcgctctcctcttcccccggtggtctcctcgctcgccttctggctctgccatgccctgctctgaagagacacccgccatttcacccagtaagcgggcccggcctgcggaggtgggcggcatgcagctccgctttgcccggctctccgagcacgccacggcccccacccggggctccgcgcgcgccgcgggctacgacctgtacaggtgagcggggacctgccggcgaggaggctgggaagggccggccgtccgctgccacagctagaaacagtcaccggagagatcacaggaacacactagctataaataggatttctgcctttttcgtgtttaaaattttagctttcatctttggcataaattaaatagagatttgggcaaagactgcagaataagtaaaatagctatacggtgtctagcaaggcgttactttgcaacgtttattgtgcccttcctaaatagaagatagagaggaaggcccatggtggctttcgagtggcccgagggtgatgctgtgctcaatagaaaaaccaagtgcctatgattacacaataccacctatggagaaagctgttgtgaaaacggacattcagatagcgctcccttctgggtgttatggaagagtggctccacggtcaggcttggctgcaaaacactttattgatgtaggagctggtgtcatagatgaagattatagaggaaatgttggtgttgtactgtttaattttggcaaagaaaagtttgaagtcaaaaaaggtgatcgaattgcacagctcatttgcgaacggattttttatccagaaatagaagaagttcaagccttggatgacaccgaaaggggttcaggaggttttggttccactggaaagaattaaaatttatgccaagaacagaaaacaagaagtcatacctttttcttaaaaaaaaaaaaaaagtttttgcttcaagtgttttggtgttttgcacttctgtaaacttactagctttaccttctaaaagtactgcattttttacttttttttatgatcaaggaaaagatcattaaaaaaaaacacaaagaagtttttctttgtgtttggatcaaaaagaaactttgtttttccgcaattgaaggttgtatgtaaatctgctttgtggtgacctgatgtaaacagtgtcttcttaaaatcaaatgtaaatcaattacagattaaaaaaaaaagcctgtatttaactcatatgatctcccttcagcaacttattttgctttaattgctttaaatcttaagcaatattttttattcagtaaacaaattctttcacaaggtacaaaatcttgcataagctgaactaaaataaaaatgaaaaggagagattaaaggt

SEQ ID NO: 360574 - DNA, 2649 bp, Homo sapiens
tgcgactgcttccgaggtcatgttcccaggacgggcgcgtcttcagggtggaagcctggcgcacgtccggaggtgccgaggacccaaccagcccaaactctgggggaaatgactcccctctgccctcgccccgcgctctgctaccatttccttacgtctctgcttcgctcagcgatgcaaaacgcgcgaggcgcacggcagagggccgaagccgcggtactctccgggccaggcccgcccctcggccgcgccgcgcagcacgggattccccggccgctgtccagcgctggccgcctgagccaaggctgccgcggagccagtacagtcggggccgctggctggaagggcgagcttcctaaggcggggggaagcccggcgccggggccggagacacccgccatttcacccagtaagcgggcccggcctgcggaggtgggcggcatgcagctccgctttgcccggctctccgagcacgccacggcccccacccggggctccgcgcgcgccgcgggctacgacctgtacagtgcctatgattacacaataccacctatggagaaagctgttgtgaaaacggacattcagatagcgctcccttctgggtgttatggaagagtggctccacggtcaggcttggctgcaaaacactttattgatgtaggagctggtgtcatagatgaagattatagaggaaatgttggtgttgtactgtttaattttggcaaagaaaagtttgaaggatatggcgaatgtgtcagtaacgtcagtaataaactattctttctttgaatcaaaaaaggtgatcgaattgcacagctcatttgcgaacggattttttatccagaaatagaagaagttcaagtaagtattacaaaggaagatacagaataagtaatataacatcttaagtgaagaaatatatataatcttgagaatttaatatgctgtttgtaactaaatagtatatatgactaaacttattttaagcaaatttaaaatactagttttagaatttctttaaatgtttttcatgtagctattatgtagtattactttggataataagttatttaaacatactgtgaacttctaatattttattagaattttttaaagttatccagtattctaatttatggagctttttagaatttaattttctttctgtaatctcccttttgaaaagatgatatagcaagagtagaattctggctgtatttttcttaggagctggagaggaaaactgaaagaggctcttaaaaaaaactgtgaagcttactacctttctatctttcaggccttggatgacaccgaaaggggttcaggaggttttggttccactggaaagaattaaaatttatgccaagaacagaaaacaagaagtcatacctttttcttaaaaaaaaaaaaaaagtttttgcttcaagtgttttggtgttttgcacttctgtaaacttactagctttaccttctaaaagtactgcattttttacttttttttatgatcaaggaaaagatcattaaaaaaaaacacaaagaagtttttctttgtgtttggatcaaaaagaaactttgtttttccgcaattgaaggttgtatgtaaatctgctttgtggtgacctgatgtaaacagtgtcttcttaaaatcaaatgtaaatcaattacagattaaaaaaaaaagcctgtatttaactcatatgatctcccttcagcaacttattttgctttaattgctttaaatcttaagcaatattttttattcagtaaacaaattctttcacaaggtacaaaatcttgcataagctgaactaaaataaaaatgaaaaggagagattaaaggtattccttgttcttcccttctcttcactagtctaaaaacttctttttaatcttaagattctttgtgatgagggtgagaaaaagaatcctcagtttatttttccactattaatctttcttttgataaatcctctattgactgggtagaggtatgtttgtgaaagacatgtaacttggggatttgttactttaggtttgttcccttgaatttcatctcatcaggcaaattgtactagttgtagttacgagttttccctcagtgaagtagcaataggctgtaatcaagaaaatatgccatttatagagataagataaatgaaataatacttcagccaccaggtttttctgtctcacatacataagcagcatttcattgcagatatgggactgattctgtggcttaccttgattaacatcttttggaagttttgctagtgtgctttcctttctttactatgtttctcagattcctttgtatcagggttttgggtgtcacttaggttttgtccatcagattctgtgagacaccaggcatcgttttgaggatgtgggttatacacatggagtgcttctggaactatcagcccacttgaccacccagtttgtggaagcacaggcaagagtgttcttttctggtgattctccaggccatttaataccctgcaatgtaattgtccctctgtggctcacatttcattagtgagccatgaaatcaactcagtgggacatagccagcatttttgcataccaggttgggctataaaatatttctgttgtcaataaattttaaatgttttcctgctaaaaaaa

SEQ ID NO: 360575 - DNA, 676 bp, Homo sapiens
ttttcgtatcatattttcacgtcacttatcactatctgaaattgctatccatctgttttcttgtttattgtctgtctctgttactagggatcctgtgattttgggtagtacttggctgtcacccaagtacctagaacggggttcactgcacaccgaaagtacgcaaaaatactaagtgaatgaatgtcaggaggatgaaagatggagggaggtgagaaatccatcaaaggctcacagaaagaactcaattcttggatgaaagtcggaagaatcccaacagctaacaagcaaatttgctgagagggggcggggcgggccaagggcgggggcgggaaggggcggagtcaggcggaagccggggagaaggcccaggaagtgacggccgcctcccggctaccggggacttctggagtccgagaagtcaacggcgcggttgctgcggccgccgcgctccccggcccgaggcgatggagaacggagcggtgtacagccccactacggaggaggacccgggccccgccagaggcccccggagcggcctcgctgcctactttttcatgggccggctcccattgctccggcgcgttctcaagggcttgcagctgttgctgtctctgctggccttcatctgtgtcgacgttggctcccgttgtgctttttgtccggctgccgtctt

SEQ ID NO: 360576 - DNA, 718 bp, Homo sapiens
tgtacgccaactgatatgctctgaattttagataggtctaaatcacaatggtacagtctgatgtgaaaattagtctacctaccataaactcgttttctgaatcagtccttattcataattagacccaaaacccagctatttctcctctcttagatagaaatggagtcatgtgctgctgcttcatctagcagaggttggcctctggctctgacactttttgtcagttgtctttaggtggtcctgaatcttgggcccttttgattgtgaatactgtgtagcaggatcttgagagtccttgttcttacataggcattgctctagtttgtctttggcaaaaaaaaaaaaaaaaaaaaggtaaatatccagggaaccctgcccagactaatactgtggggggcataagagaatcaagccattctcaagagataacttcataaccagaattgtctgttggctagcagctgtcacagataggcgggcacttgggatatgacctttctgtccgggtgattcacagattagaccttttttatcctcctcctagagttttgacttgggactctagtgttaagatgatgagcccgtgcatcaggtccttctgcactttggtggaagtctcccagggtaggtttcctatttgaaacagtggaatcatgtttccagtgataaagtttaatgacctcatccttttttttttttctcatctgccatttgtgtg

SEQ ID NO: 360577 - DNA, 2265 bp, Homo sapiens
  misc_feature (53)..(53): n is a, c, g, or t
cgaggcgaaagagttagtctaggtcgagctctgggtgtcaatttcgtgccganggactgtcaacggcgcggttgctgcggccgccgcgctccccggcccgaggcgatggagaacggagcggtgtacagccccactacggaggaggacccgggccccgccagaggcccccggagcggcctcgctgcctactttttcatgggccggctcccattgctccggcgcgttctcaagggcttgcagctgttgctgtctctgctggccttcatctgtgaagaagttgtatcacaatgtactttatgtggaggactttatttttttgagtttgtaagctgcagtgcctttcttctgagtctccttatactgattgtgtattgcactccattttatgagagagttgataccacaaaagtaaaatcatcggatttttatattactttgggaacaggatgtgtgtttttgttggcatccatcatttttgtttccacacatgacaggacttcagctgagattgctgcaattgtgtttggatttatagcaagttttatgttcctacttgactttatcactatgctgtatgaaaaacgacaggagtcccagctgagaaaacctgaaaataccactagggctgaagccctcactgagccacttaatgcctaaagactctggggagcagatgttacctaaggtagtgaccctgcattgtggtgcctgagccctggcagaagctcttgtaaaatttgttaattgtttaaaccacttcttttggagagcaaggggaaggtcaagaaggcagttttatcaatattgtgtcagtcaccacaaagtaggccagataagttaaaaaaaatttttttttaaataataattgaaacttatctcaaatggagattttggtgggaggaggagaaaacaattgtttttaaatcacacagctcaacggttgataaatgattctgtcattctgttacaggtcattcttttactaggcttagcttccaaattatgctttatagctgtataaacatcgtgattatattcatctacttagaaattgttttatttttaaattaatttgcttagctgtttgttttgatgcttagattatgttctgttaatgggaatttaacatatttaagaaaccaatatttaaaatgttggtctaggtttttttccttaacatatattaccaggctttactgtatttcactcagccttaaatgttataatatttttggataacggttattaattctttgagaccttcgtatagcctataaaatgtatgggagatgttggtattttatgtgtataaaagcaacaatatcagcaacttcgtgtttatactgcaccttggttgttgatgtcaagtaaaaaaaagattgttttgtaacacataaaaaaatggaagaaactgataccacacctaaggaccaaagataagaaagactttttgcccaagacagtgaaagtaattataaaaacaagctttgaccacttaccaagtatctgaagagatgagttcatactatgatttagaaagtggttcaattcccctgttggcatatgattatttttactaaaattaatacagctctgtgggtcttccttagtgttttctttgaagccaatctgttttttttaggacaccagcctttggtttttcatctgttcgagatgcctcttctctgtctccttatcagatagaaatggagtcatgtgctgctgcttcatctagcagaggttggcctctggctctgacactttttgtcagttgtctttaggtggtcctgaatcttgggcccttttgattgtgaatactgtgtagcaggatcttgagagtccttgttcttacataggcattgctctagtttgtctttggcaaaaaaaaaaaaaaaaaaaaggtaaatatccagggaaccctgcccagactaatactgtggggggcataagagaatcaagccattctcaagagataacttcataaccagaattgtctgttggctagcagctgtcacagataggcgggcacttgggatatgacctttctgtccgggtgattcacagattagaccttttttatcctcctcctagagttttgacttgggactctagtgttaagatgatgagcccgtgcatcaggtccttctgcactttggtggaagtctcccagggtaggtttcctatttgaaacagtggaatcatgtttccagtgataaagtttaatgacctcatccttttttttttttctcatctgccatttgtgtg

SEQ ID NO: 360578 - DNA, 2573 bp, Homo sapiens
ttttcgtatcatattttcacgtcacttatcactatctgaaattgctatccatctgttttcttgtttattgtctgtctctgttactagggatcctgtgattttgggtagtacttggctgtcacccaagtacctagaacggggttcactgcacaccgaaagtacgcaaaaatactaagtgaatgaatgtcaggaggatgaaagatggagggaggtgagaaatccatcaaaggctcacagaaagaactcaattcttggatgaaagtcggaagaatcccaacagctaacaagcaaatttgctgagagggggcggggcgggccaagggcgggggcgggaaggggcggagtcaggcggaagccggggagaaggcccaggaagtgacggccgcctcccggctaccggggacttctggagtccgagaagtcaacggcgcggttgctgcggccgccgcgctccccggcccgaggcgatggagaacggagcggtgtacagccccactacggaggaggacccgggccccgccagaggcccccggagcggcctcgctgcctactttttcatgggccggctcccattgctccggcgcgttctcaagggcttgcagctgttgctgtctctgctggccttcatctgtgaagaagttgtatcacaatgtactttatgtggaggactttatttttttgagtttgtaagctgcagtgcctttcttctgagtctccttatactgattgtgtattgcactccattttatgagagagttgataccacaaaagtaaaatcatcggatttttatattactttgggaacaggatgtgtgtttttgttggcatccatcatttttgtttccacacatgacaggacttcagctgagattgctgcaattgtgtttggatttatagcaagttttatgttcctacttgactttatcactatgctgtatgaaaaacgacaggagtcccagctgagaaaacctgaaaataccactagggctgaagccctcactgagccacttaatgcctaaagactctggggagcagatgttacctaaggtagtgaccctgcattgtggtgcctgagccctggcagaagctcttgtaaaatttgttaattgtttaaaccacttcttttggagagcaaggggaaggtcaagaaggcagttttatcaatattgtgtcagtcaccacaaagtaggccagataagttaaaaaaaatttttttttaaataataattgaaacttatctcaaatggagattttggtgggaggaggagtctgttacaggtcattcttttactaggcttagcttccaaattatgctttatagctgtataaacatcgtgattatattcatctacttagaaattgttttatttttaaattaatttgcttagctgtttgttttgatgcttagattatgttctgttaatgggaatttaacatatttaagaaaccaatatttaaaatgttggtctaggtttttttccttaacatatattaccaggctttactgtatttcactcagccttaaatgttataatatttttggataacggttattaattctttgagaccttcgtatagcctataaaatgtatgggagatgttggtattttatgtgtataaaagcaacaatatcagcaacttcgtgtttatactgcaccttggttgttgatgtcaagtaaaaaaaagattgttttgtaacacataaaaaaatggaagaaactgataccacacctaaggaccaaagataagaaagactttttgcccaagacagtgaaagtaattataaaaacaagctttgaccacttaccaagtatctgaagagatgagttcatactatgatttagaaagtggttcaattcccctgttggcatatgattatttttactaaaattaatacagctctgtgggtcttccttagtgttttctttgaagccaatctgttttttttaggacaccagcctttggtttttcatctgttcgagatgcctcttctctgtctccttatcagatagaaatggagtcatgtgctgctgcttcatctagcagaggttggcctctggctctgacactttttgtcagttgtctttaggtggtcctgaatcttgggcccttttgattgtgaatactgtgtagcaggatcttgagagtccttgttcttacataggcattgctctagtttgtctttggcaaaaaaaaaaaaaaaaaaaaggtaaatatccagggaaccctgcccagactaatactgtggggggcataagagaatcaagccattctcaagagataacttcataaccagaattgtctgttggctagcagctgtcacagataggcgggcacttgggatatgacctttctgtccgggtgattcacagattagaccttttttatcctcctcctagagttttgacttgggactctagtgttaagatgatgagcccgtgcatcaggtccttctgcactttggtggaagtctcccagggtaggtttcctatttgaaacagtggaatcatgtttccagtgataaagtttaatgacctcatccttttttttttttctcatctgccatttgtgtg

SEQ ID NO: 360579 - DNA, 1702 bp, Homo sapiens
gcggccgcagcaaccgcgccgttgacttctcggactccagaagtccccggtagccgggaggcggccgtcacttcctgagccacttaatgcctaaagactctggggagcagatgttacctaaggtagtgaccctgcattgtggtgcctgagccctggcagaagctcttgtaaaatttgttaattgtttaaaccacttcttttggagagcaaggggaaggtcaagaaggcagttttatcaatattgtgtcagtcaccacaaagtaggccagataagttaaaaaaaatttttttttaaataataattgaaacttatctcaaatggagattttggtgggaggaggagaaaacaattgtttttaaatcacacagctcaacggttgataaatgattctgtcattctgttacaggtcattcttttactaggcttagcttccaaattatgctttatagctgtataaacatcgtgattatattcatctacttagaaattgttttatttttaaattaatttgcttagctgtttgttttgatgcttagattatgttctgttaatgggaatttaacatatttaagaaaccaatatttaaaatgttggtctaggtttttttccttaacatatattaccaggctttactgtatttcactcagccttaaatgttataatatttttggataacggttattaattctttgagaccttcgtatagcctataaaatgtatgggagatgttggtattttatgtgtataaaagcaacaatatcagcaacttcgtgtttatactgcaccttggttgttgatgtcaagtaaaaaaaagattgttttgtaacacataaaaaaatggaagaaactgataccacacctaaggaccaaagataagaaagactttttgcccaagacagtgaaagtaattataaaaacaagctttgaccacttaccaagtatctgaagagatgagttcatactatgatttagaaagtggttcaattcccctgttggcatatgattatttttactaaaattaatacagctctgtgggtcttccttagtgttttctttgaagccaatctgttttttttaggacaccagcctttggtttttcatctgttcgagatgcctcttctctgtctccttatcagatagaaatggagtcatgtgctgctgcttcatctagcagaggttggcctctggctctgacactttttgtcagttgtctttaggtggtcctgaatcttgggcccttttgattgtgaatactgtgtagcaggatcttgagagtccttgttcttacataggcattgctctagtttgtctttggcaaaaaaaaaaaaaaaaaaaaggtaaatatccagggaaccctgcccagactaatactgtggggggcataagagaatcaagccattctcaagagataacttcataaccagaattgtctgttggctagcagctgtcacagataggcgggcacttgggatatgacctttctgtccgggtgattcacagattagaccttttttatcctcctcctagagttttgacttgggactctagtgttaagatgatgagcccgtgcatcaggtccttctgcactttggtggaagtctcccagggtaggtttcctatttgaaacagtggaatcatgtttccagtgataaagtttaatgacctcatccttttttttttttctcatctgccatttgtgtg

SEQ ID NO: 360580 - DNA, 1616 bp, Homo sapiens
gttcactggtatatttggtcactcttagaaccttccttcacatgttttttatgggacccatgaatggttagcctttcttttctatgtagaaggaaataaataggagtaaaaagaccattgtagtaaataagttcaaggggaacttgggaccagaaaccactgttatgtacaaaaaaatggcaaattcaataaactcaaatttaaaataatttttaaattaagttatgataaattttatattttatacaaatagattgcttagaatggttctcaagaattataagagaaatgaactcaaatgattctgtcattctgttacaggtcattcttttactaggcttagcttccaaattatgctttatagctgtataaacatcgtgattatattcatctacttagaaattgttttatttttaaattaatttgcttagctgtttgttttgatgcttagattatgttctgttaatgggaatttaacatatttaagaaaccaatatttaaaatgttggtctaggtttttttccttaacatatattaccaggctttactgtatttcactcagccttaaatgttataatatttttggataacggttattaattctttgagaccttcgtatagcctataaaatgtatgggagatgttggtattttatgtgtataaaagcaacaatatcagcaacttcgtgtttatactgcaccttggttgttgatgtcaagtaaaaaaaagattgttttgtaacacataaaaaaatggaagaaactgataccacacctaaggaccaaagataagaaagactttttgcccaagacagtgaaagtaattataaaaacaagctttgaccacttaccaagtatctgaagagatgagttcatactatgatttagaaagtggttcaattcccctgttggcatatgattatttttactaaaattaatacagctctgtgggtcttccttagtgttttctttgaagccaatctgttttttttaggacaccagcctttggtttttcatctgttcgagatgcctcttctctgtctccttatcagatagaaatggagtcatgtgctgctgcttcatctagcagaggttggcctctggctctgacactttttgtcagttgtctttaggtggtcctgaatcttgggcccttttgattgtgaatactgtgtagcaggatcttgagagtccttgttcttacataggcattgctctagtttgtctttggcaaaaaaaaaaaaaaaaaaaaggtaaatatccagggaaccctgcccagactaatactgtggggggcataagagaatcaagccattctcaagagataacttcataaccagaattgtctgttggctagcagctgtcacagataggcgggcacttgggatatgacctttctgtccgggtgattcacagattagaccttttttatcctcctcctagagttttgacttgggactctagtgttaagatgatgagcccgtgcatcaggtccttctgcactttggtggaagtctcccagggtaggtttcctatttgaaacagtggaatcatgtttccagtgataaagtttaatgacctcatccttttttttttttctcatctgccatttgtgtg

SEQ ID NO: 360581 - DNA, 2574 bp, Homo sapiens
ttttcgtatcatattttcacgtcacttatcactatctgaaattgctatccatctgttttcttgtttattgtctgtctctgttactagggatcctgtgattttgggtagtacttggctgtcacccaagtacctagaacggggttcactgcacaccgaaagtacgcaaaaatactaagtgaatgaatgtcaggaggatgaaagatggagggaggtgagaaatccatcaaaggctcacagaaagaactcaattcttggatgaaagtcggaagaatcccaacagctaacaagcaaatttgctgagagggggcggggcgggccaagggcgggggcgggaaggggcggagtcaggcggaagccggggagaaggcccaggaagtgacggccgcctcccggctaccggggacttctggagtccgagaagtcaacggcgcggttgctgcggccgccgcgctccccggcccgaggcgatggagaacggagcggtgtacagccccactacggaggaggacccgggccccgccagaggcccccggagcggcctcgctgcctactttttcatgggccggctcccattgctccggcgcgttctcaagggcttgcagctgttgctgtctctgctggccttcatctgtgaagaagttgtatcacaatgtactttatgtggaggactttatttttttgagtttgtaagctgcagtgcctttcttctgagtctccttatactgattgtgtattgcactccattttatgagagagttgataccacaaaagtaaaatcatcggatttttatattactttgggaacaggatgtgtgtttttgttggcatccatcatttttgtttccacacatgacaggacttcagctgagattgctgcaattgtgtttggatttatagcaagttttatgttcctacttgactttatcactatgctgtatgaaaaacgacaggagtcccagctgagaaaacctgaaaataccactagggctgaagccctcactgagccacttaatgcctaaagactctggggagcagatgttacctaaggtagtgaccctgcattgtggtgcctgagccctggcagaagctcttgtaaaatttgttaattgtttaaaccacttcttttggagagcaaggggaaggtcaagaaggcagttttatcaatattgtgtcagtcaccacaaagtaggccagataagttaaaaaaaatttttttttaaataataattgaaacttatctcaaatggagattttggtgggaggaggagaaaacaattgtttttaaatcacacagctcaacggttgataaatgattctgtcattctgttacaggtcattcttttactaggcttagcttccaaattatgctttatagctgtataaacatcgtgattatattcatctacttagaaattgttttatttttaaattaatttgcttagctgtttgttttgatgcttagattatgttctgttaatgggaatttaacatatttaagaaaccaatatttaaaatgttggtctaggtttttttccttaacatatattaccaggctttactgtatttcactcagccttaaatgttataatatttttggataacggttattaattctttgagaccttcgtatagcctataaaatgtatgggagatgttggtattttatgtgtataaaagcaacaatatcagcaacttcgtgtttatactgcaccttggttgttgatgtcaagtaaaaaaaagattgttttgtaacacataaaaaaatggaagaaactgataccacacctaaggaccaaagataagaaagactttttgcccaagacagtgaaagtaattataaaaacaagctttgaccacttaccaagtatctgaagagatgagttcatactatgatttagaaagtggttcaattcccctgttggcatatgattatttttactgttttttttaggacaccagcctttggtttttcatctgttcgagatgcctcttctctgtctccttatcagatagaaatggagtcatgtgctgctgcttcatctagcagaggttggcctctggctctgacactttttgtcagttgtctttaggtggtcctgaatcttgggcccttttgattgtgaatactgtgtagcaggatcttgagagtccttgttcttacataggcattgctctagtttgtctttggcaaaaaaaaaaaaaaaaaaaaggtaaatatccagggaaccctgcccagactaatactgtggggggcataagagaatcaagccattctcaagagataacttcataaccagaattgtctgttggctagcagctgtcacagataggcgggcacttgggatatgacctttctgtccgggtgattcacagattagaccttttttatcctcctcctagagttttgacttgggactctagtgttaagatgatgagcccgtgcatcaggtccttctgcactttggtggaagtctcccagggtaggtttcctatttgaaacagtggaatcatgtttccagtgataaagtttaatgacctcatccttttttttttttctcatctgccatttgtgtg

SEQ ID NO: 360582 - DNA, 1083 bp, Homo sapiens
ttttcgtatcatattttcacgtcacttatcactatctgaaattgctatccatctgttttcttgtttattgtctgtctctgttactagggatcctgtgattttgggtagtacttggctgtcacccaagtacctagaacggggttcactgcacaccgaaagtacgcaaaaatactaagtgaatgaatgtcaggaggatgaaagatggagggaggtgagaaatccatcaaaggctcacagaaagaactcaattcttggatgaaagtcggaagaatcccaacagctaacaagcaaatttgctgagagggggcggggcgggccaagggcgggggcgggaaggggcggagtcaggcggaagccggggagaaggcccaggaagtgacggccgcctcccggctaccggggacttctggagtccgagaagtcaacggcgcggttgctgcggccgccgcgctccccggcccgaggcgatggagaacggagcggtgtacagccccactacggaggaggacccgggccccgccagaggcccccggagcggcctcgctgcctactttttcatgggccggctcccattgctccggcgcgttctcaagggcttgcagctgttgctgtctctgctggccttcatctgtgaagaagttgtatcacaatgtactttatgtggaggactttatttttttgagtttgtaagctgcagtgcctttcttctgagtctccttatactgattgtgtattgcactccattttatgagagagttgataccacaaaagtaaaatcatcggatttttatattactttgggaacaggatgtgtgtttttgttggcatccatcatttttgtttccacacatgacaggacttcagctgagattgctgcaattgtaagtaccttgtatttttaacattgcttatttttgtttccttagaaatatggaatttggagagtactttgacagttatacagcatgttagagttgtttttcttataacttactttttagtgtaattttgaatagaagacctacaagctcaatatgatagcctttaaaacctagagcctatagaatttgactgaattttgtt

SEQ ID NO: 360583 - DNA, 2627 bp, Homo sapiens
ttttcgtatcatattttcacgtcacttatcactatctgaaattgctatccatctgttttcttgtttattgtctgtctctgttactagggatcctgtgattttgggtagtacttggctgtcacccaagtacctagaacggggttcactgcacaccgaaagtacgcaaaaatactaagtgaatgaatgtcaggaggatgaaagatggagggaggtgagaaatccatcaaaggctcacagaaagaactcaattcttggatgaaagtcggaagaatcccaacagctaacaagcaaatttgctgagagggggcggggcgggccaagggcgggggcgggaaggggcggagtcaggcggaagccggggagaaggcccaggaagtgacggccgcctcccggctaccggggacttctggagtccgagaagtcaacggcgcggttgctgcggccgccgcgctccccggcccgaggcgatggagaacggagcggtgtacagccccactacggaggaggacccgggccccgccagaggcccccggagcggcctcgctgcctactttttcatgggccggctcccattgctccggcgcgttctcaagggcttgcagctgttgctgtctctgctggccttcatctgtgaagaagttgtatcacaatgtactttatgtggaggactttatttttttgagtttgtaagctgcagtgcctttcttctgagtctccttatactgattgtgtattgcactccattttatgagagagttgataccacaaaagtaaaatcatcggatttttatattactttgggaacaggatgtgtgtttttgttggcatccatcatttttgtttccacacatgacaggacttcagctgagattgctgcaattgtgtttggatttatagcaagttttatgttcctacttgactttatcactatgctgtatgaaaaacgacaggagtcccagctgagaaaacctgaaaataccactagggctgaagccctcactgagccacttaatgcctaaagactctggggagcagatgttacctaaggtagtgaccctgcattgtggtgcctgagccctggcagaagctcttgtaaaatttgttaattgtttaaaccacttcttttggagagcaaggggaaggtcaagaaggcagttttatcaatattgtgtcagtcaccacaaagtaggccagataagttaaaaaaaatttttttttaaataataattgaaacttatctcaaatggagattttggtgggaggaggagaaaacaattgtttttaaatcacacagctcaacggttgataaatgattctgtcattctgttacaggtcattcttttactaggcttagcttccaaattatgctttatagctgtataaacatcgtgattatattcatctacttagaaattgttttatttttaaattaatttgcttagctgtttgttttgatgcttagattatgttctgttaatgggaatttaacatatttaagaaaccaatatttaaaatgttggtctaggtttttttccttaacatatattaccaggctttactgtatttcactcagccttaaatgttataatatttttggataacggttattaattctttgagaccttcgtatagcctataaaatgtatgggagatgttggtattttatgtgtataaaagcaacaatatcagcaacttcgtgtttatactgcaccttggttgttgatgtcaagtaaaaaaaagattgttttgtaacacataaaaaaatggaagaaactgataccacacctaaggaccaaagataagaaagactttttgcccaagacagtgaaagtaattataaaaacaagctttgaccacttaccaagtatctgaagagatgagttcatactatgatttagaaagtggttcaattcccctgttggcatatgattatttttactaaaattaatacagctctgtgggtcttccttagtgttttctttgaagccaatctgttttttttaggacaccagcctttggtttttcatctgttcgagatgcctcttctctgtctccttatcagatagaaatggagtcatgtgctgctgcttcatctagcagaggttggcctctggctctgacactttttgtcagttgtctttaggtggtcctgaatcttgggcccttttgattgtgaatactgtgtagcaggatcttgagagtccttgttcttacataggcattgctctagtttgtctttggcaaaaaaaaaaaaaaaaaaaaggtaaatatccagggaaccctgcccagactaatactgtggggggcataagagaatcaagccattctcaagagataacttcataaccagaattgtctgttggctagcagctgtcacagataggcgggcacttgggatatgacctttctgtccgggtgattcacagattagaccttttttatcctcctcctagagttttgacttgggactctagtgttaagatgatgagcccgtgcatcaggtccttctgcactttggtggaagtctcccagggtaggtttcctatttgaaacagtggaatcatgtttccagtgataaagtttaatgacctcatccttttttttttttctcatctgccatttgtgtg

SEQ ID NO: 360584 - DNA, 2585 bp, Homo sapiens
ttttcgtatcatattttcacgtcacttatcactatctgaaattgctatccatctgttttcttgtttattgtctgtctctgttactagggatcctgtgattttgggtagtacttggctgtcacccaagtacctagaacggggttcactgcacaccgaaagtacgcaaaaatactaagtgaatgaatgtcaggaggatgaaagatggagggaggtgagaaatccatcaaaggctcacagaaagaactcaattcttggatgaaagtcggaagaatcccaacagctaacaagcaaatttgctgagagggggcggggcgggccaagggcgggggcgggaaggggcggagtcaggcggaagccggggagaaggcccaggaagtgacggccgcctcccggctaccggggacttctggagtccgagaagtcaacggcgcggttgctgcggccgccgcgctccccggcccgaggcgatggagaacggagcggtgtacagccccactacggaggaggacccgggccccgccagaggcccccggagcggcctcgctgcctactttttcatgggccggctcccattgctccggcgcgttctcaagggcttgcagctgttgctgtctctgctggccttcatctgtgaagaagttgtatcacaatgtactttatgtggaggactttatttttttgagtttgtaagctgcagtgcctttcttctgagtctccttatactgattgtgtattgcactccattttatgagagagttgataccacaaaagtaaaatcatcggcatccatcatttttgtttccacacatgacaggacttcagctgagattgctgcaattgtgtttggatttatagcaagttttatgttcctacttgactttatcactatgctgtatgaaaaacgacaggagtcccagctgagaaaacctgaaaataccactagggctgaagccctcactgagccacttaatgcctaaagactctggggagcagatgttacctaaggtagtgaccctgcattgtggtgcctgagccctggcagaagctcttgtaaaatttgttaattgtttaaaccacttcttttggagagcaaggggaaggtcaagaaggcagttttatcaatattgtgtcagtcaccacaaagtaggccagataagttaaaaaaaatttttttttaaataataattgaaacttatctcaaatggagattttggtgggaggaggagaaaacaattgtttttaaatcacacagctcaacggttgataaatgattctgtcattctgttacaggtcattcttttactaggcttagcttccaaattatgctttatagctgtataaacatcgtgattatattcatctacttagaaattgttttatttttaaattaatttgcttagctgtttgttttgatgcttagattatgttctgttaatgggaatttaacatatttaagaaaccaatatttaaaatgttggtctaggtttttttccttaacatatattaccaggctttactgtatttcactcagccttaaatgttataatatttttggataacggttattaattctttgagaccttcgtatagcctataaaatgtatgggagatgttggtattttatgtgtataaaagcaacaatatcagcaacttcgtgtttatactgcaccttggttgttgatgtcaagtaaaaaaaagattgttttgtaacacataaaaaaatggaagaaactgataccacacctaaggaccaaagataagaaagactttttgcccaagacagtgaaagtaattataaaaacaagctttgaccacttaccaagtatctgaagagatgagttcatactatgatttagaaagtggttcaattcccctgttggcatatgattatttttactaaaattaatacagctctgtgggtcttccttagtgttttctttgaagccaatctgttttttttaggacaccagcctttggtttttcatctgttcgagatgcctcttctctgtctccttatcagatagaaatggagtcatgtgctgctgcttcatctagcagaggttggcctctggctctgacactttttgtcagttgtctttaggtggtcctgaatcttgggcccttttgattgtgaatactgtgtagcaggatcttgagagtccttgttcttacataggcattgctctagtttgtctttggcaaaaaaaaaaaaaaaaaaaaggtaaatatccagggaaccctgcccagactaatactgtggggggcataagagaatcaagccattctcaagagataacttcataaccagaattgtctgttggctagcagctgtcacagataggcgggcacttgggatatgacctttctgtccgggtgattcacagattagaccttttttatcctcctcctagagttttgacttgggactctagtgttaagatgatgagcccgtgcatcaggtccttctgcactttggtggaagtctcccagggtaggtttcctatttgaaacagtggaatcatgtttccagtgataaagtttaatgacctcatccttttttttttttctcatctgccatttgtgtg

SEQ ID NO: 360585 - DNA, 2557 bp, Homo sapiens
ttttcgtatcatattttcacgtcacttatcactatctgaaattgctatccatctgttttcttgtttattgtctgtctctgttactagggatcctgtgattttgggtagtacttggctgtcacccaagtacctagaacggggttcactgcacaccgaaagtacgcaaaaatactaagtgaatgaatgtcaggaggatgaaagatggagggaggtgagaaatccatcaaaggctcacagaaagaactcaattcttggatgaaagtcggaagaatcccaacagctaacaagcaaatttgctgagagggggcggggcgggccaagggcgggggcgggaaggggcggagtcaggcggaagccggggagaaggcccaggaagtgacggccgcctcccggctaccggggacttctggagtccgagaagtcaacggcgcggttgctgcggccgccgcgctccccggcccgaggcgatggagaacggagcggtgtacagccccactacggaggaggacccgggccccgccagaggcccccggagcggcctcgctgcctactttttcatgggccggctcccattgctccggcgcgttctcaagggcttgcagctgttgctgtctctgctggccttcatctgtgaagaagttgtatcacaatgtactttatgtggaggactttatttttttgagtttgtaagctgcagtgcctttcttctgagtctccttatactgattgtgtattgcactccattttatgagagagttgataccacaaaagtaaaatcatcggatttttatattactttgggaacaggatgtgtgtttttgttggcatccatcatttttgtttccacacatgacaggacttcagctgagattgctgcaattgtgtttggatttatagcaagttttatgttcctacttgactttatcactatgctgtatgaaaaacgacaggagtcccagctgagaaaacctgaaaataccactagggctgaagccctcactgagccacttaatgcctaaagactctggggagcagatgttacctaaggtagtgaccctgcattgtggtgcctgagccctggcagaagctcttgtaaaatttgttaattgtttaaaccacttcttttggagagcaaggggaaggtcaagaaggcagttttatcaatattgtgtcagtcaccacaaagtaggccagataagttaaaaaaaatttttttttaaataataattgaaacttatctcaaatggagattttggtgggaggaggagaaaacaattgtttttaaatcacacagctcaacggttgataaatgattctgtcattctgttacaggtcattcttttactaggcttagcttccaaattatgctttatagctgtataaacatcgtgattatattcatctacttagaaattgttttatttttaaattaatttgcttagctgtttgttttgatgcttagattatgttctgttaatgggaatttaacatatttaagaaaccaatatttaaaatgttggtctaggtttttttccttaacatatattaccaggctttactgtatttcactcagccttaaatgttataatatttttggataacggttattaattctttgagaccttcgtatagcctataaaatgtatgggagatgttggtattttatgtgtataaaagcaacaatatcagcaacttcgtgtttatactgcaccttggttgttgatgtcaagtaaaaaaaaaaaaaaaaaaaaaaaaaaaaaacaaaaaaaaaaaaaaaaaaaaagcaacaaaaggtgaatatatctacccggggagcgcccccgccccccaaaaaaataaagagcgggggggcgggcacaaacaaaaaaaaccccacccctcctctctccacaggacaatgtatctcctgtccccaccacaagccaaaaattgtgtgtgtggggggaggcaaaacacgcgggggcacaacaaaactagatagagggaggcgacgcctgtggggggaaaatagcaagacccacctttcggtgtcgcacagcgagggagtggagtatacacacaagcaggaaagaagaacccgcttgtatataagatatccaccccccgccgcaggaaagaagaatgtgaggattaggccaagcagggggagcagcccacactcggaggtggtagccaacaataggagaaagacgccccgcgggggtaaaattagagggagtcctatcagtatcgcgcaccaacagtggggggaggggaaaatctctccccctaccaggagggaaaggagagcgagtgtgtcacaaactttgaggaacaaacacaccagcggggggggacaaactaggatggttgggtcacagcagcgggagaggaatagacagatgttatgtaaaggacgggggcacaaccgactaaccgactctattatttgaagtatgagtgtcagtagcagataactgagcctggacaggccagaagtagggggggtgggtctaaccaaacatagagaggcggcggcaggacaaaacgcgagcgcaggcacggagcaacagaagcg

SEQ ID NO: 360586 - DNA, 950 bp, Homo sapiens
ttttcgtatcatattttcacgtcacttatcactatctgaaattgctatccatctgttttcttgtttattgtctgtctctgttactagggatcctgtgattttgggtagtacttggctgtcacccaagtacctagaacggggttcactgcacaccgaaagtacgcaaaaatactaagtgaatgaatgtcaggaggatgaaagatggagggaggtgagaaatccatcaaaggctcacagaaagaactcaattcttggatgaaagtcggaagaatcccaacagctaacaagcaaatttgctgagagggggcggggcgggccaagggcgggggcgggaaggggcggagtcaggcggaagccggggagaaggcccaggaagtgacggccgcctcccggctaccggggacttctggagtccgagaagtcaacggcgcggttgctgcggccgccgcgctccccggcccgaggcgatggagaacggagcggtgtacagccccactacggaggaggacccgggccccgccagaggcccccggagcggcctcgctgcctactttttcatgggccggctcccattgctccggcgcgttctcaagggcttgcagctgttgctgtctctgctggccttcatctgtgaagaagttgtatcacaatgtactttatgtggaggactttatttttttgagtttgtaagctgcagtgcctttcttctgagtctccttatactgattgtgtattgcactccattttatgagagagttgataccacaaaagtaaaatcatcgaatttttaaattaacagttatgataaattttatattttatacaaatagattgcttagaatggttctcaagaattataagagaaatgaactcacagtacaaaaattttataattactatacttgtgttttgtttgggggctgggaaatgtatttttacattgtagccaa

SEQ ID NO: 360587 - DNA, 226 bp, Homo sapiens
acagtgacaataataaatataatcaactctcgagccagccatccccactaaacctagtgggtcacatctggtgtttcactttggggatgttttagtggtcatggtagattgttgtctgactgctggctgtttctaccatgtttcaggaatatagagatgtgtacagatgacccctaaaattaattagtatgcaattctcaaagagacaaactgtatcccagaagct

SEQ ID NO: 360588 - DNA, 483 bp, Homo sapiens
actgggagagagatacatgtttcaccacaagggcagccaggcaagggggcacctttactctcacacatctaggaggtgttttagtctaggctctattgctaaggggccaataaaaatatttttttctcactggaccatttttgtttatatacatatatatttacacaaatatatgtaaaaattcaaaatgcaaaaatatatgtagtggccgggtgctgtggctcatgcctgtaatcccagcactttgggaagccaaggcgggtggatcactctcaggagttctagaccagcctgaccaatatggtgaaaccttgtctctactaaagatacaaaaattagccaggcgtgctggtgcttgcctgtagtcccagctactcaggagattgagtcaggagaattgcttgaacctaggacgtggaggttgcagtgagccgagattccgccactgcactccagcctggttgacagagtgagactctctca

SEQ ID NO: 360589 - DNA, 2127 bp, Homo sapiens
atttttcatgtcacataattttggagtatgtcatggacatttgaatattttgttacaaaactggatgctgttaaaatcctctggaaaatatttttggttttttggtttcactttagcgggcagttaacctggttaggttcagactgcctctgtgggctgtggatccagtttgaacttacttttcaaaaccttcgtattgctgttcaggtcccaggtgtgccatccatgccattgtgcagttctcaacgcctttcctctgccgccttgggtcagttcacacatgggcatgttggtggtaaacttgagattgtatacacaaatttagaggacgtttcttctctccgtgacttcccttgtacacaagctcccaagagtttcttttcgtggttctttggtgagaaaactggaattttagcttctttgtgcttttcatacgttttctgtagaggggctcatttcctgaacaaaatggagagagagaaaagttagagaaaaaaataaaatgaattccctcttccatactcttccgatcatcgtctttttcctagttcttttgtcagaagaactctcttttagagtttaggagacagctaccagccacaggtgtgcagactcaggattggggcttgctttgaggcagagctgagagagaagaaaaattaccagatatccacccctccccattgtccctctcccattcatcatcttttctagttctctagccagaaggagtttctcttggaacttttctctgtcttcactcactgcacagttaatgagatttgggctgtcctcaagtctaagctgacatatgtgggagaaaaaaaccaggaaactcactactgttttgagttttgatttctctcgccagtctgcttgcttcaaattacttttcagagtccttgtatatttgctttatgtattctttccaggatttttagtaataatcaatggacaagatagggtggagtgtgctttctccatcttagctagaactgggaccccgtcccccactcgtaaaatataaataatgacttagcatggcacattaggtgggcattagagacaccagggaagcgattacaaatataaatgcccaggttgtatctccagataattaaaaatctttcaggagtaggatccagaaaactatatttaaaagttctctaggttcttgatatactatgtaggttgtggtctgaggaccactacatggggatcatttggaaacttgttagaaatgtagactcaggttccattccagacctgctgaattggaacaagatccccagatggtgcctacgcacagtaaaatttgagcagcactgccctagcatgattctagtgtgcagtcaatgttgaggaccactgtcttagaggattgcgtaaaagcaaatgacgtgtatataaatttagattgtaatattctctgagtataaactcattaggtgcaagctgagctcaccctccatgttttctgtgttcctggttaaagtaagttacctttgatgaaaaccacaggttcatctttgacttcaaatcagatttgttgctattgaagctaattggatcccagctcagctttgtggcttggattcacaccatataaaatcttcaacagacattcattcctttgttcagaacacacaaccttctaacgtgaacctccaattttctaaattcattctttttctacttcacctgaaaccacagatccatggcacttagtttctctgtaacagcagctctaccatggtgtccagaaattttagcccctactatcaagaacaaaacatccttgtacatgtttatacatctttttgagtaggagttttccaccagttgcagggattccctgagtctagagtaatgccacaatgctgctcccttttactcctttctaagcatttctgtcagggagaagacttagattcagttgttcactttaacattttccttagatactctcttagaaaagttgtattctgcgcacttctgttatgaagggagtaagggattgctgagatttgttaagttaccaaactagtcttgatagatgtataattattacatatccaccatcacttcatttagctgggcaacaagggcaaaactctgtctcaaggg

SEQ ID NO: 360590 - DNA, 2691 bp, Homo sapiens
  misc_feature (2353)..(2353): n is a, c, g, or t
atttttcatgtcacataattttggagtatgtcatggacatttgaatattttgttacaaaactggatgctgttaaaatcctctggaaaatatttttggttttttggtttcactttagcgggcagttaacctggttaggttcagactgcctctgtgggctgtggatccagtttgaacttacttttcaaaaccttcgtattgctgttcaggtcccaggtgtgccatccatgccattgtgcagttctcaacgcctttcctctgccgccttgggtcagttcacacatgggcatgttggtggtaaacttgagattgtatacacaaatttagaggacgtttcttctctccgtgacttcccttgtacacaagctcccaagagtttcttttcgtggttctttggtgagaaaactggaattttagcttctttgtgcttttcatacgttttctgtagaggggctcatttcctgaacaaaatggagagagagaaaagttagagaaaaaaataaaatgaattccctcttccatactcttccgatcatcgtctttttcctagttcttttgtcagaagaactctcttttagagtttaggagacagctaccagccacaggtgtgcagactcaggattggggcttgctttgaggcagagctgagagagaagaaaaattaccagatatccacccctccccattgtccctctcccattcatcatcttttctagttctctagccagaaggagtttctcttggaacttttctctgtcttcactcactgcacagttaatgagatttgggctgtcctcaagtctaagctgacatatgtgggagaaaaaaaccaggaaactcactactgttttgagttttgatttctctcgccagtctgcttgcttcaaattacttttcagagtccttgtatatttgctttatgtattctttccaggatttttagtaataatcaatggacaagatagggtggagtgtgctttctccatcttagctagaactgggaccccgtcccccactcgtaaaatataaataatgacttagcatggcacattaggtgggcattagagacaccagggaagcgattacaaatataaatgcccaggttgtatctccagataattaaaaatctttcaggagtaggatccagaaaactatatttaaaagttctctaggttcttgatatactatgtaggttgtggtctgaggaccactacatggggatcatttggaaacttgttagaaatgtagactcaggttccattccagacctgctgaattggaacaagatccccagatggtgcctacgcacagtaaaatttgagcagcactgccctagcatgattctagtgtgcagtcaatgttgaggaccactgtcttagaggattgcgtaaaagcaaatgacgtgtatataaatttagattgtaatattctctgagtataaactcattaggtgcaagctgagctcaccctccatgttttctgtgttcctggttaaagtaagttacctttgatgaaaaccacaggttcatctttgacttcaaatcagatttgttgctattgaagctaattggatcccagctcagctttgtggcttggattcacaccatataaaatcttcaacagacattcattcctttgttcagaacacacaaccttctaacgtgaacctccaattttctaaattcattctttttctacttcacctgaaaccacagatccatggcacttagtttctctgtaacagcagctctaccatggtgtccagaaattttagcccctactatcaagaacaaaacatccttgtacatgtttatacatctttttgagtaggagttttccaccagttgcagggattccctgagtctagagtaatgccacaatgctgctcccttttactcctttctaagcatttctgtcagggagaagacttagattcagttgttcactttaacattttccttagatactctcttagaaaagttgtattctgcgcacttctgttatgaagggagtaagggattgctgagatttgttaagttaccaaactagtcttgatagatgtataattattacatatccaccatcacttcatttagctgggcaagtattatcagtttggttcatgttagctaattaggtcactggtttgttcctaggacagtgttgggctggtcatataagttagaagcacctgggagctgggcatggtggctcacgcctgtaatcccagcactttgggaggccgagcgggcggatcatgaggtcaggagatcgagatcatcctggctgacagagtgaaaccccgtctctactaaaaatacaaaaaaaattagctgggcatggtggtgggcaccngtagtcccagctacttgggaggctgaggcaggagaatggtgtgaacctgggaggcggagcttgcagtgagctgagatggcgccactgcactccagcctgggcgacagagcgagactccatctcaaaaaaaaaaaaaaaaaaaacacacctggggtgctcataataaaaaaaacaaaaacccagatatttatcccagttttgattccaaagatcaggtaccagtactttctttttggagacagggtcttgctctgtcacccaggctggagtgcagtgtaccatcatggctcattgcaaccttgacctcctgagttcaagcagtcctctcacctcagcct

SEQ ID NO: 360591 - DNA, 3516 bp, Homo sapiens
attcagccagcaggctctgcacaaggaagcaaagtgcagggagccaggctccaccgacagccaggcactgggcagcacgcactggagacccaggaccctgtgcaggagcagctccgggtgacacgaggggactgaagatactcccacaggggctcagcaggagcaatgggtaaccaaatgagtgttccccaaagagttgaagaccaagagaatgaaccagaagcagagacttaccaggacaacgcgtctgctctgaacggggttccagtggtggtgtcgacccacacagttcagcacttagaggaagtcgacttgggaataagtgtcaagacggataatgtggccacttcttcccccgagacaacggagataagtgctgttgcggatgccaacggaaagaatcttgggaaagaggccaaacccgaggcaccagctgctaaatctcgttttttcttgatgctctctcggcctgtaccaggacgtaccggagaccaagccgcagattcatcccttggatcagtgaagcttgatgtcagctccaataaagctccagcgaacaaagacccaagtgagagctggacacttccggtggcagctggaccggggcaggacacagataaaaccccaagacaaggtcctctctgccgccaggatcccacgcttctcccacctgagacagggggagcaggaggagaagctccctccaagcccaaggactccagcttttttgacaaattcttcaagctggacaagggacaggaaaaggtgccaggtgacagccaacaggaagccaagagggcagagcatcaagacaaggtggatgaggttcctggcttatcagggcagtccgatgatgtccctgcagggaaggacatagttgacggcaaggaaaaagaaggacaagaacttggaactgcggattgctctgtccctggggacccagaaggactggagactgcaaaggacgattcccaggcagcagctatagcagagaataataattccatcatgagtttctttaaaactctggtttcacctaacaaagctgaaacaaaaaaggacccagaagacacggcatcgaaagcagaaagtgtctgtgatggacaagctggtcagaagacatccgagatccaggctagaggcaccaagaaaaagcacctggatagccccaggctaggactcgcctttagaaaattctttaggcataagggtgctgaaaagtcacccaccacttcagctgaccttaagtcagacaaagccaactttacatcccaggagacccaaggggctggcaagaattccaaaggatgcaacccatcggggcacacacagtccgtgacaacccctgaacctgcgaaggaaggcaccaaggagaaatcaggacccacctctctgcctctgggcaaactgttttggaaaaagacatcagactccacagaaaagactatcacaccgccagagcctgaaccaacaggagcaccacagaagggtaaagagggctcctcgaaggacaagaagtcagcagccgagatgaacaagcagaagagcaacaagcaggaagccaaagaaccagcccagtgcacagagcaggccacggtggacacgaactcactgcagaatggggacaagctccaaaagagacctgagaagcggcagcagtcccttgggggcttctttaaaggcctgggaccaaagcggatgttggatgctcaagtgcaaacagacccagtatccatcggaccagttggcaaatccaagtaaacaaatcagcacggttcccaccaggttctcctgccaccaagatgtgttctccttactccatctcctccccaaacacgctccatgtatatattcttctgatggccagcaaatgaaattctgcctagaaattaagcccgagctgttgtatattgaggtgtattatttacgtctctggtccagtcttttctggcaaataacagtaaagatggtttagcaggtcacctagttgggtcagaagagtcgatgatcaccaagcaggaaagggagggaatagaggaatgtgttcgggttaagtgatgaaaatggcagtggtggccgggcgtggtggctctcgcctgtaatctcagcactttgggaggccgaggcaggtggatcacctgaggtcaggagttcaagactagcctggccaacatcatgaaaccccgtctctactaaaaatacaaaaattagccaggcatggtggcacacacctgtagtcccagctactcgggagcccaacgcacgagaaccgcttgtacccaggaggtggaggttgcagtgagccgaagttgcaccattgcactccaccctgggcgacagagcaagattctatcaaaaaaaaaaggcagtggcaagtaagttatagaagagaaatgctgctagaaggaattaagcgttgtagtaaacgcgtgctcatcctctaagcttgaagaagggagacgaaaatccatttgtttaaattcacatctcaaggagggagaacccgggctgtgttgggtggttgccaatttcctagaacggaatgtgtggggtatagaaaaaggaatgaataagcgttgtttttcaaatagggtccttgtaagttattgatgagagggaaaagattgactggggagggcttaaaatgatttgggaaaacaattgcttttgaggctcagtgacaacggcaaagattacaacttaaaaaaaaataaaaataaaaaataaaggaagttgcacggttattttgcaacacaagggggcggcaaggtccccatttttatcctgtaatactgtatccctaacaaagatttggtctctgctatcttacattattaatgtttctcagatggctgaggggctcgcttcatctgttccgtctgacacttatctcaagtgtgtctgtcattcctaatgttctcaggatgtgctctgataaaaccctccccataacctcagttaataaaaatttacagaagacttctcaaatacctgagttgtttttaatacctgtacaaaggagtaaataggaccctgagtctattaaaatgtaattcaaagtagcatatgattgactgacagtcatgtaaactgtatctttctttttctgatttaataaaaaatacatttacttctaaagtatcttttaattttcaacttcaaagcagtcccactctatatctgagatgactctaacttctacattataaaatccatactctttctccattatcttctttggaagatcattctctcccagatcttcccggatttccttgtatatgggcacacacacacacaaatgtgtgcagttgtatgtttgcatgtacacacacatgcatgtatagaatagtgctgtcttaggccaggttgcttggagcagagcctgagatggggatttggacgcataggatatactgagagtgggctccgagggaaagggagtaagagaaaaagaagagggcaagaaaagagttgggcaagggttggtttcaactggagcatgaattgcaccac

SEQ ID NO: 360592 - DNA, 3840 bp, Homo sapiens
attcagccagcaggctctgcacaaggaagcaaagtgcagggagccaggctccaccgacagccaggcactgggcagcacgcactggagacccaggaccctgtgcaggagcagctccgggtgacacgaggggactgaagatactcccacaggggctcagcaggagcaatgggtaaccaaatgagtgttccccaaagagttgaagaccaagagaatgaaccagaagcagagacttaccaggacaacgcgtctgctctgaacggggttccagtggtggtgtcgacccacacagttcagcacttagaggaagtcgacttgggaataagtgtcaagacggataatgtggccacttcttcccccgagacaacggagataagtgctgttgcggatgccaacggaaagaatcttgggaaagaggccaaacccgaggcaccagctgctaaatctcgttttttcttgatgctctctcggcctgtaccaggacgtaccggagaccaagccgcagattcatcccttggatcagtgaagcttgatgtcagctccaataaagctccagcgaacaaagacccaagtgagagctggacacttccggtggcagctggaccggggcaggacacagataaaaccccaaggcacgccccggcccaagacaaggtcctctctgccgccaggatcccacgcttctcccacctgagacagggggagcaggaggagaagctccctccaagcccaaggactccagcttttttgacaaattcttcaagctggacaagggacaggaaaaggtgccaggtgacagccaacaggaagccaagagggcagagcatcaagacaaggtggatgaggttcctggcttatcagggcagtccgatgatgtccctgcagggaaggacatagttgacggcaaggaaaaagaaggacaagaacttggaactgcggattgctctgtccctggggacccagaaggactggagactgcaaaggacgattcccaggcagcagctatagcagagaataataattccatcatgagtttctttaaaactctggtttcacctaacaaagctgaaacaaaaaaggacccagaagacacgttctgaggttgtgactgctgttgccccaaaggcatcgaaagcagaaagtgtctgtgatggacaagctggtcagaagacatccgagatccaggctagaggcaccaagaaaaagcacctggatagccccaggctaggactcgcctttagaaaattctttaggcataagggtgctgaaaagtcacccaccacttcagctgaccttaagtcagacaaagccaactttacatcccaggagacccaaggggctggcaagaattccaaaggatgcaacccatcggggcacacacagtccgtgacaacccctgaacctgcgaaggaaggcaccaaggagaaatcaggacccacctctctgcctctgggcaaactgttttggaaaaagtcagttaaagaggactcagtccccacaggtgcggaggagaatgtggtgtgtgagtcaccagtagagattataaagtccaaggaagtagaatcagccttacaaacagtggacctcaacgaaggagatgctgcacctgaacccacagaagcgaaactcaaaagagaagaaagcaaaccaagaacctctctgatggcgtttctcagacaaatgtcagtgaaaggggatggagggatcacccactcagaagaaataaatgggaaagactccagctgccaaacatcagactccacagaaaagactatcacaccgccagagcctgaaccaacaggagcaccacagaagggtaaagagggctcctcgaaggacaagaagtcagcagccgagatgaacaagcagaagagcaacaagcaggaagccaaagaaccagcccagtgcacagagcaggccacggtggacacgaactcactgcagaatggggacaagctccaaaagagacctgagaagcggcagcagtcccttgggggcttctttaaaggcctgggaccaaagcggatgttggatgctcaagtgcaaacagacccagtatccatcggaccagttggcaaatccaagtaaacaaatcagcacggttcccaccaggttctcctgccaccaagatgtgttctccttactccatctcctccccaaacacgctccatgtatatattcttctgatggccagcaaatgaaattctgcctagaaattaagcccgagctgttgtatattgaggtgtattatttacgtctctggtccagtcttttctggcaaataacagtaaagatggtttagcaggtcacctagttgggtcagaagagtcgatgatcaccaagcaggaaagggagggaatagaggaatgtgttcgggttaagtgatgaaaatggcagtggtggccgggcgtggtggctctcgcctgtaatctcagcactttgggaggccgaggcaggtggatcacctgaggtcaggagttcaagactagcctggccaacatcatgaaaccccgtctctactaaaaatacaaaaattagccaggcatggtggcacacacctgtagtcccagctactcgggagcccaacgcacgagaaccgcttgtacccaggaggtggaggttgcagtgagccgaagttgcaccattgcactccaccctgggcgacagagcaagattctatcaaaaaaaaaaggcagtggcaagtaagttatagaagagaaatgctgctagaaggaattaagcgttgtagtaaacgcgtgctcatcctctaagcttgaagaagggagacgaaaatccatttgtttaaattcacatctcaaggagggagaacccgggctgtgttgggtggttgccaatttcctagaacggaatgtgtggggtatagaaaaaggaatgaataagcgttgtttttcaaatagggtccttgtaagttattgatgagagggaaaagattgactggggagggcttaaaatgatttgggaaaacaattgcttttgaggctcagtgacaacggcaaagattacaacttaaaaaaaaataaaaataaaaaataaaggaagttgcacggttattttgcaacacaagggggcggcaaggtccccatttttatcctgtaatactgtatccctaacaaagatttggtctctgctatcttacattattaatgtttctcagatggctgaggggctcgcttcatctgttccgtctgacacttatctcaagtgtgtctgtcattcctaatgttctcaggatgtgctctgataaaaccctccccataacctcagttaataaaaatttacagaagacttctcaaatacctgagttgtttttaatacctgtacaaaggagtaaataggaccctgagtctattaaaatgtaattcaaagtagcatatgattgactgacagtcatgtaaactgtatctttctttttctgatttaataaaaaatacatttacttctaaagtatcttttaattttcaacttcaaagcagtcccactctatatctgagatgactctaacttctacattataaaatccatactctttctccattatcttctttggaagatcattctctcccagatcttcccggatttccttgtatatgggcacacacacacacaaatgtgtgcagttgtatgtttgcatgtacacacacatgcatgtatagaatagtgctgtcttaggccaggttgcttggagcagagcctgagatggggatttggacgcataggatatactgagagtgggctccgagggaaagggagtaagagaaaaagaagagggcaagaaaagagttgggcaagggttggtttcaactggagcatgaattgcaccac

SEQ ID NO: 360593 - DNA, 2247 bp, Homo sapiens
attcagccagcaggctctgcacaaggaagcaaagtgcagggagccaggctccaccgacagccaggcactgggcagcacgcactggagacccaggaccctgtgcaggagcagctccgggtgacacgaggggactgaagatactcccacaggggctcagcaggagcaatgggtaaccaaatgagtgttccccaaagagttgaagaccaagagaatgaaccagaagcagagacttaccaggacaacgcgtctgctctgaacggggttccagtggtggtgtcgacccacacagttcagcacttagaggaagtcgacttgggaataagtgtcaagacggataatgtggccacttcttcccccgagacaacggagataagtgctgttgcggatgccaacggaaagaatcttgggaaagaggccaaacccgaggcaccagctgctaaatctcgttttttcttgatgctctctcggcctgtaccaggacgtaccggagaccaagccgcagattcatcccttggatcagtgaagcttgatgtcagctccaataaagctccagcgaacaaagacccaagtgagagctggacacttccggtggcagctggaccggggcaggacacagataaaaccccaagacaaggtcctctctgccgccaggatcccacgcttctcccacctgagacagggggagcaggaggagaagctccctccaagcccaaggactccagcttttttgacaaattcttcaagctggacaagggacaggaaaaggtgccaggtgacagccaacaggaagccaagagggcagagcatcaagacaaggtggatgaggttcctggcttatcagggcagtccgatgatgtccctgcagggaaggacatagttgacggcaaggaaaaagaaggacaagaacttggaactgcggattgctctgtccctggggacccagaaggactggagactgcaaaggacgattcccaggcagcagctatagcagagaataataattccatcatgagtttctttaaaactctggtttcacctaacaaagctgaaacaaaaaaggacccagaagacacggcatcgaaagcagaaagtgtctgtgatggacaagctggtcagaagacatccgagatccaggctagaggcaccaagaaaaagcacctggatagccccaggctaggactcgcctttagaaaattctttaggcataagggtgctgaaaagtcacccaccacttcagctgaccttaagtcagacaaagccaactttacatcccaggagacccaaggggctggcaagaattccaaaggatgcaacccatcggggcacacacagtccgtgacaacccctgaacctgcgaaggaaggcaccaaggagaaatcaggacccacctctctgcctctgggcaaactgttttggaaaaagtcagttaaagaggactcagtccccacaggtgcggaggagaatgtggtgtgtgagtcaccagtagagattataaagtccaaggaagtagaatcagccttacaaacagtggacctcaacgaaggagatgctgcacctgaacccacagaagcgaaactcaaaagagaagaaagcaaaccaagaacctctctgatggcgtttctcagacaaatgtcagtgaaaggggatggagggatcacccactcagaagaaataaatgggaaagactccagctgccaaacatcagactccacagaaaagactatcacaccgccagagcctgaaccaacaggagcaccacagaagggtaaagagggctcctcgaaggacaagaagtcagcagccgagatgaacaagcagaagagcaacaagcaggaagccaaagaaccagcccagtgcacagagcaggccacggtggacacgaactcactgcagaatggggacaagctccaaaagagacctgagaagcggcagcagtcccttgggggcttctttaaaggcctgggaccaaagcggatgttggatgctcaagtgcaaacagacccagtatccatcggaccagttggcaaatccaagtacacagggaagtgtgtcttctcccatgtcaagaagaagtggcctttccaggaatggagctattgagctgaaatggctgccactgcgcgtacacacacacacgcgcacacacacacacacacacacacctcccttccagttccagctgacggtgactttttgactggtaaccataaaagaattcattcaaaagggcagttgttcccagcagcc

SEQ ID NO: 360594 - DNA, 1399 bp, Homo sapiens
attcagccagcaggctctgcacaaggaagcaaagtgcagggagccaggctccaccgacagccaggcactgggcagcacgcactggagacccaggaccctgtgcaggagcagctccgggtgacacgaggggactgaagatactcccacaggggctcagcaggagcaatgggtaaccaaatgagtgttccccaaagagttgaagaccaagagaatgaaccagaagcagagacttaccaggacaacgcgtctgctctgaacggggttccagtggtggtgtcgacccacacagttcagcacttagaggaagtcgacttgggaataagtgtcaagacggataatgtggccacttcttcccccgagacaacggagataagtgctgttgcggatgccaacggaaagaatcttgggaaagaggccaaacccgaggcaccagctgctaaatctcgttttttcttgatgctctctcggcctgtaccaggacgtaccggagaccaagccgcagattcatcccttggatcagtgaagcttgatgtcagctccaataaagctccagcgaacaaagacccaagtgagagctggacacttccggtggcagctggaccggggcaggacacagataaaaccccaagacaaggtcctctctgccgccaggatcccacgcttctcccacctgagacagggggagcaggaggagaagctccctccaagcccaaggactccagcttttttgacaaattcttcaagctggacaagggacaggaaaaggtgccaggtgacagccaacaggaagccaagagggcagagcatcaagacaaggtggatgaggttcctggcttatcagggcagtccgatgatgtccctgcagggaaggacatagttgacggcaaggaaaaagaaggacaagaacttggaactgcggattgctctgtccctggggacccagaaggactggagactgcaaaggacgattcccaggcagcagctatagcagagaataataattccatcatgagtttctttaaaactctggtttcacctaacaaagctgaaacaaaaaaggacccagaagacacggcatcgaaagcagaaagtgtctgtgatggacaagctggtcagaagacatccgagatccaggctagaggcaccaagaaaaagcacctggatagccccaggctaggactcgcctttagaaaattctttaggcataagagggtgctgaaaaagttcacccaaccacttcagctgacctttaaggtcaggaacaaaagccaacttttaccattccccagggaggaccccaagggggcctggcacaaggaaatttcccaaaaagggaattggccaaccccaattcgggggggcacaactaccaagttccccggtggaacaaaaccccctg

SEQ ID NO: 360595 - DNA, 939 bp, Homo sapiens
attcagccagcaggctctgcacaaggaagcaaagtgcagggagccaggctccaccgacagccaggcactgggcagcacgcactggagacccaggaccctgtgcaggagcagctccgggtgacacgaggggactgaagatactcccacaggggctcagcaggagcaatgggtaaccaaatgagtgttccccaaagagttgaagaccaagagaatgaaccagaagcagagacttaccaggacaacgcgtctgctctgaacggggttccagtggtggtgtcgacccacacagttcagcacttagaggaagacttatctcaagtgtgtctgtcattcctaatgttctcaggatgtgctctgataaaaccctccccataacctcagttaataaaaatttacagaagacttctcaaatacctgagttgtttttaatacctgtacaaaggagtaaataggaccctgagtctattaaaatgtaattcaaagtagcatatgattgactgacagtcatgtaaactgtatctttctttttctgatttaataaaaaatacatttacttctaaagtatcttttaattttcaacttcaaagcagtcccactctatatctgagatgactctaacttctacattataaaatccatactctttctccattatcttctttggaagatcattctctcccagatcttcccggatttccttgtatatgggcacacacacacacaaatgtgtgcagttgtatgtttgcatgtacacacacatgcatgtatagaatagtgctgtcttaggccaggttgcttggagcagagcctgagatggggatttggacgcataggatatactgagagtgggctccgagggaaagggagtaagagaaaaagaagagggcaagaaaagagttgggcaagggttggtttcaactggagcatgaattgcaccac

SEQ ID NO: 360596 - DNA, 3674 bp, Homo sapiens
attcagccagcaggctctgcacaaggaagcaaagtgcagggagccaggctccaccgacagccaggcactgggcagcacgcactggagacccaggaccctgtgcaggagcagctccgggtgacacgaggggactgaagatactcccacaggggctcagcaggagcaatgggtaaccaaatgagtgttccccaaagagttgaagaccaagagaatgaaccagaagcagagacttaccaggacaacgcgtctgctctgaacggggttccagtggtggtgtcgacccacacagttcagcacttagaggaagtcgacttgggaataagtgtcaagacggataatgtggccacttcttcccccgagacaacggagataagtgctgttgcggatgccaacggaaagaatcttgggaaagaggccaaacccgaggcaccagctgctaaatctcgttttttcttgatgctctctcggcctgtaccaggacgtaccggagaccaagccgcagattcatcccttggatcagtgaagcttgatgtcagctccaataaagctccagcgaacaaagacccaagtgagagctggacacttccggtggcagctggaccggggcaggacacagataaaaccccaaggcacgccccggcccaagacaaggtcctctctgccgccaggatcccacgcttctcccacctgagacagggggagcaggaggagaagctccctccaagcccaaggactccagcttttttgacaaattcttcaagctggacaagggacaggaaaaggtgccaggtgacagccaacaggaagccaagagggcagagcatcaagacaaggtggatgaggttcctggcttatcagggcagtccgatgatgtccctgcagggaaggacatagttgacggcaaggaaaaagaaggacaagaacttggaactgcggattgctctgtccctggggacccagaaggactggagactgcaaaggacgattcccaggcagcagctatagcagagaataataattccatcatgagtttctttaaaactctggtttcacctaacaaagctgaaacaaaaaaggacccagaagacacgggtgctgaaaagtcacccaccacttcagctgaccttaagtcagacaaagccaactttacatcccaggagacccaaggggctggcaagaattccaaaggatgcaacccatcggggcacacacagtccgtgacaacccctgaacctgcgaaggaaggcaccaaggagaaatcaggacccacctctctgcctctgggcaaactgttttggaaaaagtcagttaaagaggactcagtccccacaggtgcggaggagaatgtggtgtgtgagtcaccagtagagattataaagtccaaggaagtagaatcagccttacaaacagtggacctcaacgaaggagatgctgcacctgaacccacagaagcgaaactcaaaagagaagaaagcaaaccaagaacctctctgatggcgtttctcagacaaatgtcagtgaaaggggatggagggatcacccactcagaagaaataaatgggaaagactccagctgccaaacatcagactccacagaaaagactatcacaccgccagagcctgaaccaacaggagcaccacagaagggtaaagagggctcctcgaaggacaagaagtcagcagccgagatgaacaagcagaagagcaacaagcaggaagccaaagaaccagcccagtgcacagagcaggccacggtggacacgaactcactgcagaatggggacaagctccaaaagagacctgagaagcggcagcagtcccttgggggcttctttaaaggcctgggaccaaagcggatgttggatgctcaagtgcaaacagacccagtatccatcggaccagttggcaaatccaagtaaacaaatcagcacggttcccaccaggttctcctgccaccaagatgtgttctccttactccatctcctccccaaacacgctccatgtatatattcttctgatggccagcaaatgaaattctgcctagaaattaagcccgagctgttgtatattgaggtgtattatttacgtctctggtccagtcttttctggcaaataacagtaaagatggtttagcaggtcacctagttgggtcagaagagtcgatgatcaccaagcaggaaagggagggaatagaggaatgtgttcgggttaagtgatgaaaatggcagtggtggccgggcgtggtggctctcgcctgtaatctcagcactttgggaggccgaggcaggtggatcacctgaggtcaggagttcaagactagcctggccaacatcatgaaaccccgtctctactaaaaatacaaaaattagccaggcatggtggcacacacctgtagtcccagctactcgggagcccaacgcacgagaaccgcttgtacccaggaggtggaggttgcagtgagccgaagttgcaccattgcactccaccctgggcgacagagcaagattctatcaaaaaaaaaaggcagtggcaagtaagttatagaagagaaatgctgctagaaggaattaagcgttgtagtaaacgcgtgctcatcctctaagcttgaagaagggagacgaaaatccatttgtttaaattcacatctcaaggagggagaacccgggctgtgttgggtggttgccaatttcctagaacggaatgtgtggggtatagaaaaaggaatgaataagcgttgtttttcaaatagggtccttgtaagttattgatgagagggaaaagattgactggggagggcttaaaatgatttgggaaaacaattgcttttgaggctcagtgacaacggcaaagattacaacttaaaaaaaaataaaaataaaaaataaaggaagttgcacggttattttgcaacacaagggggcggcaaggtccccatttttatcctgtaatactgtatccctaacaaagatttggtctctgctatcttacattattaatgtttctcagatggctgaggggctcgcttcatctgttccgtctgacacttatctcaagtgtgtctgtcattcctaatgttctcaggatgtgctctgataaaaccctccccataacctcagttaataaaaatttacagaagacttctcaaatacctgagttgtttttaatacctgtacaaaggagtaaataggaccctgagtctattaaaatgtaattcaaagtagcatatgattgactgacagtcatgtaaactgtatctttctttttctgatttaataaaaaatacatttacttctaaagtatcttttaattttcaacttcaaagcagtcccactctatatctgagatgactctaacttctacattataaaatccatactctttctccattatcttctttggaagatcattctctcccagatcttcccggatttccttgtatatgggcacacacacacacaaatgtgtgcagttgtatgtttgcatgtacacacacatgcatgtatagaatagtgctgtcttaggccaggttgcttggagcagagcctgagatggggatttggacgcataggatatactgagagtgggctccgagggaaagggagtaagagaaaaagaagagggcaagaaaagagttgggcaagggttggtttcaactggagcatgaattgcaccac

SEQ ID NO: 360597 - DNA, 3750 bp, Homo sapiens
attcagccagcaggctctgcacaaggaagcaaagtgcagggagccaggctccaccgacagccaggcactgggcagcacgcactggagacccaggaccctgtgcaggagcagctccgggtgacacgaggggactgaagatactcccacaggggctcagcaggagcaatgggtaaccaaatgagtgttccccaaagagttgaagaccaagagaatgaaccagaagcagagacttaccaggacaacgcgtctgctctgaacggggttccagtggtggtgtcgacccacacagttcagcacttagaggaagtcgacttgggaataagtgtcaagacggataatgtggccacttcttcccccgagacaacggagataagtgctgttgcggatgccaacggaaagaatcttgggaaagaggccaaacccgaggcaccagctgctaaatctcgttttttcttgatgctctctcggcctgtaccaggacgtaccggagaccaagccgcagattcatcccttggatcagtgaagcttgatgtcagctccaataaagctccagcgaacaaagacccaagtgagagctggacacttccggtggcagctggaccggggcaggacacagataaaaccccaagacaaggtcctctctgccgccaggatcccacgcttctcccacctgagacagggggagcaggaggagaagctccctccaagcccaaggactccagcttttttgacaaattcttcaagctggacaagggacaggaaaaggtgccaggtgacagccaacaggaagccaagagggcagagcatcaagacaaggtggatgaggttcctggcttatcagggcagtccgatgatgtccctgcagggaaggacatagttgacggcaaggaaaaagaaggacaagaacttggaactgcggattgctctgtccctggggacccagaaggactggagactgcaaaggacgattcccaggcagcagctatagcagagaataataattccatcatgagtttctttaaaactctggtttcacctaacaaagctgaaacaaaaaaggacccagaagacacggcatcgaaagcagaaagtgtctgtgatggacaagctggtcagaagacatccgagatccaggctagaggcaccaagaaaaagcacctggatagccccaggctaggactcgcctttagaaaattctttaggcataagggtgctgaaaagtcacccaccacttcagctgaccttaagtcagacaaagccaactttacatcccaggagacccaaggggctggcaagaattccaaaggatgcaacccatcggggcacacacagtccgtgacaacccctgaacctgcgaaggaaggcaccaaggagaaatcaggacccacctctctgcctctgggcaaactgttttggaaaaaggtggtgtgtgagtcaccagtagagattataaagtccaaggaagtagaatcagccttacaaacagtggacctcaacgaaggagatgctgcacctgaacccacagaagcgaaactcaaaagagaagaaagcaaaccaagaacctctctgatggcgtttctcagacaaatgtcagtgaaaggggatggagggatcacccactcagaagaaataaatgggaaagactccagctgccaaacatcagactccacagaaaagactatcacaccgccagagcctgaaccaacaggagcaccacagaagggtaaagagggctcctcgaaggacaagaagtcagcagccgagatgaacaagcagaagagcaacaagcaggaagccaaagaaccagcccagtgcacagagcaggccacggtggacacgaactcactgcagaatggggacaagctccaaaagagacctgagaagcggcagcagtcccttgggggcttctttaaaggcctgggaccaaagcggatgttggatgctcaagtgcaaacagacccagtatccatcggaccagttggcaaatccaagtaaacaaatcagcacggttcccaccaggttctcctgccaccaagatgtgttctccttactccatctcctccccaaacacgctccatgtatatattcttctgatggccagcaaatgaaattctgcctagaaattaagcccgagctgttgtatattgaggtgtattatttacgtctctggtccagtcttttctggcaaataacagtaaagatggtttagcaggtcacctagttgggtcagaagagtcgatgatcaccaagcaggaaagggagggaatagaggaatgtgttcgggttaagtgatgaaaatggcagtggtggccgggcgtggtggctctcgcctgtaatctcagcactttgggaggccgaggcaggtggatcacctgaggtcaggagttcaagactagcctggccaacatcatgaaaccccgtctctactaaaaatacaaaaattagccaggcatggtggcacacacctgtagtcccagctactcgggagcccaacgcacgagaaccgcttgtacccaggaggtggaggttgcagtgagccgaagttgcaccattgcactccaccctgggcgacagagcaagattctatcaaaaaaaaaaggcagtggcaagtaagttatagaagagaaatgctgctagaaggaattaagcgttgtagtaaacgcgtgctcatcctctaagcttgaagaagggagacgaaaatccatttgtttaaattcacatctcaaggagggagaacccgggctgtgttgggtggttgccaatttcctagaacggaatgtgtggggtatagaaaaaggaatgaataagcgttgtttttcaaatagggtccttgtaagttattgatgagagggaaaagattgactggggagggcttaaaatgatttgggaaaacaattgcttttgaggctcagtgacaacggcaaagattacaacttaaaaaaaaataaaaataaaaaataaaggaagttgcacggttattttgcaacacaagggggcggcaaggtccccatttttatcctgtaatactgtatccctaacaaagatttggtctctgctatcttacattattaatgtttctcagatggctgaggggctcgcttcatctgttccgtctgacacttatctcaagtgtgtctgtcattcctaatgttctcaggatgtgctctgataaaaccctccccataacctcagttaataaaaatttacagaagacttctcaaatacctgagttgtttttaatacctgtacaaaggagtaaataggaccctgagtctattaaaatgtaattcaaagtagcatatgattgactgacagtcatgtaaactgtatctttctttttctgatttaataaaaaatacatttacttctaaagtatcttttaattttcaacttcaaagcagtcccactctatatctgagatgactctaacttctacattataaaatccatactctttctccattatcttctttggaagatcattctctcccagatcttcccggatttccttgtatatgggcacacacacacacaaatgtgtgcagttgtatgtttgcatgtacacacacatgcatgtatagaatagtgctgtcttaggccaggttgcttggagcagagcctgagatggggatttggacgcataggatatactgagagtgggctccgagggaaagggagtaagagaaaaagaagagggcaagaaaagagttgggcaagggttggtttcaactggagcatgaattgcaccac

SEQ ID NO: 360598 - DNA, 3506 bp, Homo sapiens
attcagccagcaggctctgcacaaggaagcaaagtgcagggagccaggctccaccgacagccaggcactgggcagcacgcactggagacccaggaccctgtgcaggagcagctccgggtgacacgaggggactgaagatactcccacaggggctcagcaggagcaatgggtaaccaaatgagtgttccccaaagagttgaagaccaagagaatgaaccagaagcagagacttaccaggacaacgcgtctgctctgaacggggttccagtggtggtgtcgacccacacagttcagcacttagaggaagtcgacttgggaataagtgtcaagacggataatgtggccacttcttcccccgagacaacggagataagtgctgttgcggatgccaacggaaagaatcttgggaaagaggccaaacccgaggcaccagctgctaaatctcgttttttcttgatgctctctcggcctgtaccaggacgtaccggagaccaagccgcagattcatcccttggatcagtgaagcttgatgtcagctccaataaagctccagcgaacaaagacccaagtgagagctggacacttccggtggcagctggaccggggcaggacacagataaaaccccaaggcacgccccggcccaagacaaggtcctctctgccgccaggatcccacgcttctcccacctgagacagggggagcaggaggagaagctccctccaagcccaaggactccagcttttttgacaaattcttcaagctggacaagggacaggaaaaggtgccaggtgacagccaacaggaagccaagagggcagagcatcaagacaaggtggatgaggttcctggcttatcagggcagtccgatgatgtccctgcagggaaggacatagttgacggcaaggaaaaagaaggacaagaacttggaactgcggattgctctgtccctggggacccagaaggactggagactgcaaaggacgattcccaggcagcagctatagcagagaataataattccatcatgagtttctttaaaactctggtttcacctaacaaagctgaaacaaaaaaggacccagaagacacgggtgctgaaaagtcacccaccacttcagctgaccttaagtcagacaaagccaactttacatcccaggagacccaaggggctggcaagaattccaaaggatgcaacccatcggggcacacacagtccgtgacaacccctgaacctgcgaaggaaggcaccaaggagaaatcaggacccacctctctgcctctgggcaaactgttttggaaaaagtcagttaaagaggactcagtccccacaggtgcggaggagaattcagtgaaaggggatggagggatcacccactcagaagaaataaatgggaaagactccagctgccaaacatcagactccacagaaaagactatcacaccgccagagcctgaaccaacaggagcaccacagaagggtaaagagggctcctcgaaggacaagaagtcagcagccgagatgaacaagcagaagagcaacaagcaggaagccaaagaaccagcccagtgcacagagcaggccacggtggacacgaactcactgcagaatggggacaagctccaaaagagacctgagaagcggcagcagtcccttgggggcttctttaaaggcctgggaccaaagcggatgttggatgctcaagtgcaaacagacccagtatccatcggaccagttggcaaatccaagtaaacaaatcagcacggttcccaccaggttctcctgccaccaagatgtgttctccttactccatctcctccccaaacacgctccatgtatatattcttctgatggccagcaaatgaaattctgcctagaaattaagcccgagctgttgtatattgaggtgtattatttacgtctctggtccagtcttttctggcaaataacagtaaagatggtttagcaggtcacctagttgggtcagaagagtcgatgatcaccaagcaggaaagggagggaatagaggaatgtgttcgggttaagtgatgaaaatggcagtggtggccgggcgtggtggctctcgcctgtaatctcagcactttgggaggccgaggcaggtggatcacctgaggtcaggagttcaagactagcctggccaacatcatgaaaccccgtctctactaaaaatacaaaaattagccaggcatggtggcacacacctgtagtcccagctactcgggagcccaacgcacgagaaccgcttgtacccaggaggtggaggttgcagtgagccgaagttgcaccattgcactccaccctgggcgacagagcaagattctatcaaaaaaaaaaggcagtggcaagtaagttatagaagagaaatgctgctagaaggaattaagcgttgtagtaaacgcgtgctcatcctctaagcttgaagaagggagacgaaaatccatttgtttaaattcacatctcaaggagggagaacccgggctgtgttgggtggttgccaatttcctagaacggaatgtgtggggtatagaaaaaggaatgaataagcgttgtttttcaaatagggtccttgtaagttattgatgagagggaaaagattgactggggagggcttaaaatgatttgggaaaacaattgcttttgaggctcagtgacaacggcaaagattacaacttaaaaaaaaataaaaataaaaaataaaggaagttgcacggttattttgcaacacaagggggcggcaaggtccccatttttatcctgtaatactgtatccctaacaaagatttggtctctgctatcttacattattaatgtttctcagatggctgaggggctcgcttcatctgttccgtctgacacttatctcaagtgtgtctgtcattcctaatgttctcaggatgtgctctgataaaaccctccccataacctcagttaataaaaatttacagaagacttctcaaatacctgagttgtttttaatacctgtacaaaggagtaaataggaccctgagtctattaaaatgtaattcaaagtagcatatgattgactgacagtcatgtaaactgtatctttctttttctgatttaataaaaaatacatttacttctaaagtatcttttaattttcaacttcaaagcagtcccactctatatctgagatgactctaacttctacattataaaatccatactctttctccattatcttctttggaagatcattctctcccagatcttcccggatttccttgtatatgggcacacacacacacaaatgtgtgcagttgtatgtttgcatgtacacacacatgcatgtatagaatagtgctgtcttaggccaggttgcttggagcagagcctgagatggggatttggacgcataggatatactgagagtgggctccgagggaaagggagtaagagaaaaagaagagggcaagaaaagagttgggcaagggttggtttcaactggagcatgaattgcaccac

SEQ ID NO: 360599 - DNA, 204 bp, Homo sapiens
cggggcccatgctatcctcaacgcggggttttctgtggttttttatgaggaactataagttaccaaaagttgaatgttgtcatttatttgtgctcagtaatgattttcatttctttgttatcagagcttatcacacagtgtctgaagtccacatggtgagagtggcctgcattccattccagtttctgtcctccaaaataggtt

SEQ ID NO: 360600 - DNA, 1025 bp, Homo sapiens
gtaaagcttcctctagatgatccccccacggtgtccataaatatttagcaaattcatttaacaaatattattgggcacctgttatgtgagacactgtcctaggcactgtgggataacaacagcaaacacttcacacaacagcctggccttcctgtgttttacaacagctcctaaagatagctgatatcaagacatttgagggacacagttcatgtagaatcaaaatattagtatttcagaataaggattttttttctgaaaagcatacagagaggaaacagcttaaaaataggtcaagacctaaaaacagaatataatcacggaataaactggataacccagacagtccccacagaatttctttcaggtcacagatttcttaaaactcacccccaaaatgtgcctgcttggttgtttgaatcttgcataattaatgtcacaggcgcaagccgctgaacttagttgagatgcagaaaacaaacaaatgcaatgacatatctgagaagcatttatgtaactccggttaagtggtgaggaggggtgtgtgaagacagtgtgcatgcatgagtgtgtattcatatatatgtgtatacatatgaatttcactgttattttccagggtctatggacaatgtggcagtaagagtctatgatgttctgaaacttttcacagtaaatccaaagattacagaccttacaaggtgcttgcattctgttgcttttccatctgtcacttctcaggttatttgactgtgttcaaaccttcttttctttttcattgagtttcattttttaagcttgttaaatgcttttgtttaaaaaaaaaaaaaaaccccaaatgtcatttttcacattatcctctcttctctgcaacaaggatagtaagatgtagatgaatgcaaaaataataacaacaataaggaaatatattaaagctttaaaatatgcacatatgtagttctaaagagcaataacggtagtatctatttcgaacatgcattaggcaaaaaagaaatcaaaactga

SEQ ID NO: 360601 - DNA, 389 bp, Homo sapiens
actggtggcacagggcacaacaggaaatgatatttatttagcaaattcatttaacaaatattattgggcacctgttatgtgagacactgtcctaggcactgtgggataacaacagcaaacacttcacacaacagcctggccttcctgtgttttacaacagctcctaaagatagctgatatcaagacatttgagggacacagttcatgtagaatcaaaatattagtatttcagaataaggattttttttctgaaaagcatacagagaggaaacagcttaaaaataggtcaagacctaaaaacagaatataatcacggaataaactggataacccagacagtccccacagaatttctttcaggtcacagatttcttaaaactcacccccaa

SEQ ID NO: 360602 - DNA, 528 bp, Homo sapiens
agaggctttctatttttccttcccccctcgctttcccaccctaacttagcttggaagtcagtctgaacatcagtttacccaatctgcactgcgagttggttgggcttgacattcaggatgagatgggcaggcacgaagtgggccacatcgacaactccatgaagatcccgctgaacaatggggcaggctgccgcttcgaggggcagttcagcatcaacaaggtccccggcaacttccacgtgtccacacacagtgccacagcccagccacagaacccagacatgacgcatgtcatccacaagctctcctttggggacacgctacaggtccagaacatccacggagctttcaatgctctcgggggagcagacagactcacctccaaccccctggcctcccacgactacatcctgaagattgtgcccacggtttatgaggacaagagtggcaagcagcggtactcctaccagtacacggtggccaacaaggaatactcgctttccactaggggtccagatcgcgaattcg

SEQ ID NO: 360603 - DNA, 854 bp, Homo sapiens
  misc_feature (720)..(720): n is a, c, g, or t
tgctggtactggcccgaatcgttaggaggggcggccggcgggggcggggcggccggaggaggcgttggcagcgggctcggacccacgcggcgccgcggcccgcctggcctgcagcgctcccacccccggcggcggcacgatgccctttgacttcaggaggtttgacatctacaggaaggtgcccaaggaccttacgcagccaacgtacaccggggccattatctccatctgctgctgcctcttcatcctcttcctcttcctctcggagctcaccggatttataacgacagaagttgtgaacgagctctatgtcgatgacccagacaaggacagcggtggcaagatcgacgtcagtctgaacatcagtttacccaatctgcactgcgagttggttgggcttgacattcaggatgagatgggcaggcacgaagtgggccacatcgacaactccatgaagatcccgctgaacaatggggcaggctgccgcttcgaggggcagttcagcatcaacaaggtccccggcaacttccacgtgtccacacacagtgccacagcccagccacagaacccagacatgacgcatgtcatccacaagctctcctttggggacacgctacaggtccagaacatccacggagctttcaatgctctcgggggagcagacagactcacctccaaccgggcttttccaatcaagaatacatcctgaagactggtgcncacggtgttatgaaggacaagagtgtgcaagtcatgcggtaattcctaccagagcacggtgaccaatcaaggtatacgtcgcttacttatgagggatactgtaggtcaacctgcaggatgacagctgcagtcat

SEQ ID NO: 360604 - DNA, 450 bp, Homo sapiens
aaaggcagggggtggggctgcttcatattgaggctcgagtcataaggggctctggagggtctgtgggcacagccccacacccttgtcctggggcctctttcctcttccctctaggctggtctcccttcgtcagtgcccaccacccttaacagtttgcatttctgttgtttcttccagtctccatctgctgctgcctcttcatcctcttcctcttcctctcggagctcaccggatttataacgacagaagtgtaagtcatactttcccgatggggcattccaggatgttctgggaccccagacaagaagagggaggggtctttggccaggtttggtggctaacacctgtaatcccaacactttgggaggccgaggcgggcggatcacctgaggtcaggagttggagaccagcctggccaacatgctgataccctgtctacactaaaaatac

SEQ ID NO: 360605 - DNA, 2882 bp, Homo sapiens
  misc_feature (9)..(9): n is a, c, g, or t
ggctggtanggtcccgagtcgttagatcggggcggccggcgggggcggggcggccggaggaggcgttggcagcgggctcggacccacgcggcgccgcggcccgcctggcctgcagcgctcccacccccggcggcggcacgatgccctttgacttcaggaggtttgacatctacaggaaggtgcccaaggaccttacgcagccaacgtacaccggggccattatctccatctgctgctgcctcttcatcctcttcctcttcctctcggagctcaccggatttataacgacagaagttgtgaacgagctctatgtcgatgacccagacaaggacagcggtggcaagatcgacgtcagtctgaacatcagtttacccaatctgcactgcgagttggttgggcttgacattcaggatgagatgggcaggcacgaagtgggccacatcgacaactccatgaagatcccgctgaacaatggggcaggctgccgcttcgaggggcagttcagcatcaacaaggtccccggcaacttccacgtgtccacacacagtgccacagcccagccacagaacccagacatgacgcatgtcatccacaagctctcctttggggacacgctacaggtccagaacatccacggagctttcaatgctctcgggggagcagacagactcacctccaaccccctggcctcccacgactacatcctgaagattgtgcccacggtttatgaggacaagagtggcaagcagcggtactcctaccagtacacggtggccaacaaggaatacgtcgcctacagccacacgggccgcatcatccctgcaatctggttccgctacgacctcagccccatcacggtcaagtacacagagagacggcagccgctgtacagattcatcaccacgatctgtgccatcattggcgggaccttcaccgtcgccggcatcctggactcatgcatcttcacagcctctgaggcctggaagaagatccagctgggcaagatgcattgacgccacacccagcctaatggccgaggaccctgggcatcgccagccttgcctccagtgccctgtctcctttggccctcaatctggtcccaaatctggctgtgtcccaaagggtgtgtgggaagtggggggaaagtagaggatggctcgatgttttgcagctacctcttttccccgtgtttctttttagacaaattacactgcctgaagttgcagttcccctttccctggggagccccaagaacagagtcaggcaaggggtggggagtccagggatcttggggacccctcctaggagagctgcagtctcttccctcaggggaacatcccagaatgcatatcgatcagctctcagccaggcttcgacaatctcgcagcccccactaggtggacacattaatgatttggtttctcccctgggcagccaacctgccccagaggcaccagacctgggctttcagctttgggaccaggctgcccaaaggtactcctttatacacccggcaccttccacgaaagatggtacttcccaagcaagcccctatgatttgtcactatagatggaaccctgacttctgccccatcccttcctgcccaacctagaacccaggcctcaagtctttaccccacccctttcttgttcttccaagaagcagatgcccagttgctcagcagcagcggtagagacttgaatctgcccaccagtcacaaggcgggtcacagattcctcttcctctcttctcctcgttcctctgaaccctccaccaatgtgcctcagcctgtgtgctgtgtggcaacagcattctggttcccactgccaagatctcccaccactctgctgggatctgcagtggcagggagtgggggttgtgtaaaggggaagtcatcttttgagatccagatagacatggtttgtgcacttacgtccagatgggaagcatccttcctgcaaccctaaaataatcatgcagcctctcagacggacgccatcggtcccaaggccttaggtggaggaagcaaagcaggccaggcctgtcctgtccgtggacctctaccttctggactccctacgggtgcagagcacttgggtttctctacagccatcgtggcccacttgacactgtgctcctccatcagctggtcacatgccaacacgttcccagcccctgaggcagctccagggtgccccacctgctcctgaggtgggtccctaccctgctgctcctcttcatcctttcccttttgtcctgaaagggaggagcaatggtccaggcattaattccacccagggaattttagctatgccctcatgtcccagggagagagccacacgcctgttttccatttatagcaagattgtttgcatacttttgtaatgaaggggagtgtccagtggaaggatttttaaaattatcttatggatagctcaagtctctgccatttgtaatttttggctctaagctccgattggagacgcttctccttgtgcatgtgagttgactgatgttgtgagtgtaaatgcatttggttatttctggtatcggtggccacttggatggatttttttacattctgttccccagttacaggaaggagtccctttggtgtgtgaatatgtgtgcctgtagagggtggggcagggtggggtggggatggaaatgtgtggcatgcacatgagttgaaattcttttatgcatttttttgaagaaaaaaaaaaaaaaacaactctgaggacataggggatgtcagtttcctatggaagagacacctctgacccgttattcttataatcaaaatctgaagggaaaaaaatgttttagttctttccccactcgttgggttcaactagattaaaaggctgattttcagaaa

SEQ ID NO: 360606 - DNA, 3200 bp, Homo sapiens
cgggcgggcggcgcccaatgggctgcgcggagcgtcacttcccggcagcgggaggcgagtggcgagtggcgagtggcgagtgtcaggggggcggccggcgggggcggggcggccggaggaggcgttggcagcgggctcggacccacgcggcgccgcggcccgcctggcctgcagcgctcccacccccggcggcggcacgatgccctttgacttcaggaggtttgacatctacaggaaggtgcccaaggaccttacgcagccaacgtacaccggggccattatctccatctgctgctgcctcttcatcctcttcctcttcctctcggagctcaccggatttataacgacagaagttgtgaacgagctctatgtcgatgacccagacaaggacagcggtggcaagatcgacgtcagtctgaacatcagtttacccaatctgcactgcgagttggttgggcttgacattcaggatgagatgggcaggcacgaagtgggccacatcgacaactccatgaagatcccgctgaacaatggggcaggctgccgcttcgaggggcagttcagcatcaacaaggtccccggcaacttccacgtgtccacacacagtgccacagcccagccacagaacccagacatgacgcatgtcatccacaagctctcctttggggacacgctacaggtccagaacatccacggagctttcaatgctctcgggggagcagacagactcacctccaaccccctggcctcccacgactacatcctgaagattgtgcccacggtttatgaggacaagagtggcaagcagcggtactcctaccagtacacggtggccaacaaggaatacgtcgcctacagccacacgggccgcatcatccctgcaatctggttccgctacgacctcagccccatcacggtcaagtacacagagagacggcagccgctgtacagattcatcaccacgatctgtgccatcattggcgggaccttcaccgtcgccggcatcctggactcatgcatcttcacagcctctgaggcctggaagaagatccagctgggcaagatgcattgacgccacacccagcctaatggccgaggaccctgggcatcgccagccttgcctccagtgccctgtctcctttggccctcaatctggtcccaaatctggctgtgtcccaaagggtgtgtgggaagtggggggaaagtagaggatggctcgatgttttgcagctacctcttttccccgtgtttctttttagacaaattacactgcctgaagttgcagttcccctttccctggggagccccaagaacagagtcaggcaaggggtggggagtccagggatcttggggacccctcctaggagagctgcagtctcttccctcaggggaacatcccagaatgcatatcgatcagctctcagccaggcttcgacaatctcgcagcccccactaggtggacacattaatgatttggtttctcccctgggcagccaacctgccccagaggcaccagacctgggctttcagctttgggaccaggctgcccaaaggtactcctttatacacccggcaccttccacgaaagatggtacttcccaagcaagcccctatgatttgtcactatagatggaaccctgacttctgccccatcccttcctgcccaacctagaacccaggcctcaagtctttaccccacccctttcttgttcttccaagaagcagatgcccagttgctcagcagcagcggtagagacttgaatctgcccaccagtcacaaggcgggtcacagattcctcttcctctcttctcctcgttcctctgaaccctccaccaatgtgcctcagcctgtgtgctgtgtggcaacagcattctggttcccactgccaagatctcccaccactctgctgggatctgcagtggcagggagtgggggttgtgtaaaggggaagtcatcttttgagatccagatagacatggtttgtgcacttacgtccagatgggaagcatccttcctgcaaccctaaaataatcatgcagcctctcagacggacgccatcggtcccaaggccttaggtggaggaagcaaagcaggccaggcctgtcctgtccgtggacctctaccttctggactccctacgggtgcagagcacttgggtttctctacagccatcgtggcccacttgacactgtgctcctccatcagctggtcacatgccaacacgttcccagcccctgaggcagctccagggtgccccacctgctcctgaggtgggtccctaccctgctgctcctcttcatcctttcccttttgtcctgaaagggaggagcaatggtccaggcattaattccacccagggaattttagctatgccctcatgtcccagggagagagccacacgcctgttttccatttatagcaagattgtttgcatacttttgtaatgaaggggagtgtccagtggaaggatttttaaaattatcttatggatagctcaagtctctgccatttgtaatttttggctctaagctccgattggagacgcttctccttgtgcatgtgagttgactgatgttgtgagtgtaaatgcatttggttatttctggtatcggtggccacttggatggatttttttacattctgttccccagttacaggaaggagtccctttggtgtgtgaatatgtgtgcctgtagagggtggggcagggtggggtggggatggaaatgtgtggcatgcacatgagttgaaattcttttatgcatttttttgaagaaaaaaaaaaaaaaacaactctgaggacataggggatgtcagtttcctatggaagagacacctctgacccgttattcttataatcaaaatctgaagggaaaaaaatgttttagttctttccccactcgttgggttcaactagattaaaaggctgattttcagaaaaaaaaaaacataacagacgaacacaaagaaggaaaagccaaaaacgcaaacgcagaaaacgagacaaacaggacagcggaaagagcgacaaaaagcagaagagagccgcgggggagacaaaggcacgcgaggacggagccaggagggagagttgcgacgagcaaccggcgagcaagagagcgagcagtgcagacaacgagagagtcacgaacaccgcagcgcacagcgcagaagcgaccgggagagagcacgggagagg

SEQ ID NO: 360607 - DNA, 2588 bp, Homo sapiens
agaggctttctatttttccttcccccctcgctttcccaccctaacttagcttggaagtcagtctgaacatcagtttacccaatctgcactgcgagttggttgggcttgacattcaggatgagatgggcaggcacgaagtgggccacatcgacaactccatgaagatcccgctgaacaatggggcaggctgccgcttcgaggggcagttcagcatcaacaaggtccccggcaacttccacgtgtccacacacagtgccacagcccagccacagaacccagacatgacgcatgtcatccacaagctctcctttggggacacgctacaggtccagaacatccacggagctttcaatgctctcgggggagcagacagactcacctccaaccccctggcctcccacgactacatcctgaagattgtgcccacggtttatgaggacaagagtggcaagcagcggtactcctaccagtacacggtggccaacaaggaatacgtcgcctacagccacacgggccgcatcatccctgcaatctggttccgctacgacctcagccccatcacggtcaagtacacagagagacggcagccgctgtacagattcatcaccacgatctgtgccatcattggcgggaccttcaccgtcgccggcatcctggactcatgcatcttcacagcctctgaggcctggaagaagatccagctgggcaagatgcattgacgccacacccagcctaatggccgaggaccctgggcatcgccagccttgcctccagtgccctgtctcctttggccctcaatctggtcccaaatctggctgtgtcccaaagggtgtgtgggaagtggggggaaagtagaggatggctcgatgttttgcagctacctcttttccccgtgtttctttttagacaaattacactgcctgaagttgcagttcccctttccctggggagccccaagaacagagtcaggcaaggggtggggagtccagggatcttggggacccctcctaggagagctgcagtctcttccctcaggggaacatcccagaatgcatatcgatcagctctcagccaggcttcgacaatctcgcagcccccactaggtggacacattaatgatttggtttctcccctgggcagccaacctgccccagaggcaccagacctgggctttcagctttgggaccaggctgcccaaaggtactcctttatacacccggcaccttccacgaaagatggtacttcccaagcaagcccctatgatttgtcactatagatggaaccctgacttctgccccatcccttcctgcccaacctagaacccaggcctcaagtctttaccccacccctttcttgttcttccaagaagcagatgcccagttgctcagcagcagcggtagagacttgaatctgcccaccagtcacaaggcgggtcacagattcctcttcctctcttctcctcgttcctctgaaccctccaccaatgtgcctcagcctgtgtgctgtgtggcaacagcattctggttcccactgccaagatctcccaccactctgctgggatctgcagtggcagggagtgggggttgtgtaaaggggaagtcatcttttgagatccagatagacatggtttgtgcacttacgtccagatgggaagcatccttcctgcaaccctaaaataatcatgcagcctctcagacggacgccatcggtcccaaggccttaggtggaggaagcaaagcaggccaggcctgtcctgtccgtggacctctaccttctggactccctacgggtgcagagcacttgggtttctctacagccatcgtggcccacttgacactgtgctcctccatcagctggtcacatgccaacacgttcccagcccctgaggcagctccagggtgccccacctgctcctgaggtgggtccctaccctgctgctcctcttcatcctttcccttttgtcctgaaagggaggagcaatggtccaggcattaattccacccagggaattttagctatgccctcatgtcccagggagagagccacacgcctgttttccatttatagcaagattgtttgcatacttttgtaatgaaggggagtgtccagtggaaggatttttaaaattatcttatggatagctcaagtctctgccatttgtaatttttggctctaagctccgattggagacgcttctccttgtgcatgtgagttgactgatgttgtgagtgtaaatgcatttggttatttctggtatcggtggccacttggatggatttttttacattctgttccccagttacaggaaggagtccctttggtgtgtgaatatgtgtgcctgtagagggtggggcagggtggggtggggatggaaatgtgtggcatgcacatgagttgaaattcttttatgcatttttttgaagaaaaaaaaaaaaaaacaactctgaggacataggggatgtcagtttcctatggaagagacacctctgacccgttattcttataatcaaaatctgaagggaaaaaaatgttttagttctttccccactcgttgggttcaactagattaaaaggctgattttcagaaa

SEQ ID NO: 360608 - DNA, 2895 bp, Homo sapiens
cgggcgggcggcgcccaatgggctgcgcggagcgtcacttcccggcagcgggaggcgagtggcgagtggcgagtggcgagtgtcaggggggcggccggcgggggcggggcggccggaggaggcgttggcagcgggctcggacccacgcggcgccgcggcccgcctggcctgcagcgctcccacccccggcggcggcacgatgccctttgacttcaggaggtttgacatctacaggaaggtgcccaaggaccttacgcagccaacgtacaccggggccattatctccatctgctgctgcctcttcatcctcttcctcttcctctcggagctcaccggatttataacgacagaagttgtgaacgagctctatgtcgatgacccagacaaggacagcggtggcaagatcgacgtcagtctgaacatcagtttacccaatctgcactgcgagttggttgggcttgacattcaggatgagatgggcaggcacgaagtgggccacatcgacaactccatgaagatcccgctgaacaatggggcaggctgccgcttcgaggggcagttcagcatcaacaaggtccccggcaacttccacgtgtccacacacagtgccacagcccagccacagaacccagacatgacgcatgtcatccacaagctctcctttggggacacgctacaggtccagaacatccacggagctttcaatgctctcgggggagcagacagactcacctccaaccccctggcctcccacgactacatcctgaagattgtgcccacggtttatgaggacaagagtggcaagcagcggtactcctaccagtacacggtggccaacaaggaatacgtcgcctacagccacacgggccgcatcatccctgcaatctggttccgctacgacctcagccccatcacggtcaagtacacagagagacggcagccgctgtacagattcatcaccacgatctgtgccatcattggcgggaccttcaccgtcgccggcatcctggactcatgcatcttcacagcctctgaggcctggaagaagatccagctgggcaagatgcattgacgccacacccagcctaatggccgaggaccctgggcatcgccagccttgcctccagtgccctgtctcctttggccctcaatctggtcccaaatctggctgtgtcccaaagggtgtgtgggaagtggggggaaagtagaggatggctcgatgttttgcagctacctcttttccccgtgtttctttttagacaaattacactgcctgaagttgcagttcccctttccctggggagccccaagaacagagtcaggcaaggggtggggagtccaggggaacatcccagaatgcatatcgatcagctctcagccaggcttcgacaatctcgcagcccccactaggtggacacattaatgatttggtttctcccctgggcagccaacctgccccagaggcaccagacctgggctttcagctttgggaccaggctgcccaaaggtactcctttatacacccggcaccttccacgaaagatggtacttcccaagcaagcccctatgatttgtcactatagatggaaccctgacttctgccccatcccttcctgcccaacctagaacccaggcctcaagtctttaccccacccctttcttgttcttccaagaagcagatgcccagttgctcagcagcagcggtagagacttgaatctgcccaccagtcacaaggcgggtcacagattcctcttcctctcttctcctcgttcctctgaaccctccaccaatgtgcctcagcctgtgtgctgtgtggcaacagcattctggttcccactgccaagatctcccaccactctgctgggatctgcagtggcagggagtgggggttgtgtaaaggggaagtcatcttttgagatccagatagacatggtttgtgcacttacgtccagatgggaagcatccttcctgcaaccctaaaataatcatgcagcctctcagacggacgccatcggtcccaaggccttaggtggaggaagcaaagcaggccaggcctgtcctgtccgtggacctctaccttctggactccctacgggtgcagagcacttgggtttctctacagccatcgtggcccacttgacactgtgctcctccatcagctggtcacatgccaacacgttcccagcccctgaggcagctccagggtgccccacctgctcctgaggtgggtccctaccctgctgctcctcttcatcctttcccttttgtcctgaaagggaggagcaatggtccaggcattaattccacccagggaattttagctatgccctcatgtcccagggagagagccacacgcctgttttccatttatagcaagattgtttgcatacttttgtaatgaaggggagtgtccagtggaaggatttttaaaattatcttatggatagctcaagtctctgccatttgtaatttttggctctaagctccgattggagacgcttctccttgtgcatgtgagttgactgatgttgtgagtgtaaatgcatttggttatttctggtatcggtggccacttggatggatttttttacattctgttccccagttacaggaaggagtccctttggtgtgtgaatatgtgtgcctgtagagggtggggcagggtggggtggggatggaaatgtgtggcatgcacatgagttgaaattcttttatgcatttttttgaagaaaaaaaaaaaaaaacaactctgaggacataggggatgtcagtttcctatggaagagacacctctgacccgttattcttataatcaaaatctgaagggaaaaaaatgttttagttctttccccactcgttgggttcaactagattaaaaggctgattttcagaaa

SEQ ID NO: 360609 - DNA, 2842 bp, Homo sapiens
cgggcgggcggcgcccaatgggctgcgcggagcgtcacttcccggcagcgggaggcgagtggcgagtggcgagtggcgagtgtcaggggggcggccggcgggggcggggcggccggaggaggcgttggcagcgggctcggacccacgcggcgccgcggcccgcctggcctgcagcgctcccacccccggcggcggcacgatgccctttgacttcaggaggtttgacatctacaggaaggtgcccaaggaccttacgcagccaacgtacaccggggccattatctccatctgctgctgcctcttcatcctcttcctcttcctctcggagctcaccggatttataacgacagaagttgtgaacgagctctatgtcgatgacccagacaaggacagcggtggcaagatcgacgtcagtctgaacatcagtttacccaatctgcactgcgagttggttgggcttgacattcaggatgagatgggcaggcacgaagtgggccacatcgacaactccatgaagatcccgctgaacaatggggcaggctgccgcttcgaggggcagttcagcatcaacaaggtccccggcaacttccacgtgtccacacacagtgccacagcccagccacagaacccagacatgacgcatgtcatccacaagctctcctttggggacacgctacaggtccagaacatccacggagctttcaatgctctcgggggagcagacagactcacctccaaccccctggcctcccacgactacatcctgaagattgtgcccacggtttatgaggacaagagtggcaagcagcggtactcctaccagtacacggtggccaacaaggaatacgtcgcctacagccacacgggccgcatcatccctgcaatctggttccgctacgacctcagccccatcacggtcaagtacacagagagacggcagccgctgtacagattcatcaccacgatctgtgccatcattggcgggaccttcaccgtcgccggcatcctggactcatgcatcttcacagcctctgaggcctggaagaagatccagctgggcaagatgcattgacgccacacccagcctaatggccgaggaccctgggcatcgccagccttgcctccagtgccctgtctcctttggccctcaatctggtcccaaatctggctgtgtcccaaagggtgtgtgggaagtggggggaaagtagaggatggctcgatgttttgcagctacctcttttccccgtgtttctttttagacaaattacactgcctgaagttgcagttcccctttccctggggagccccaagaacagagtcaggcaaggggtggggagtccagggatcttggggacccctcctaggagagctgcagtctcttccctcaggggaacatcccagaatgcatatcgatcagctctcagccaggcttcgacaatctcgcagcccccactaggtggacacattaatgatttggtttctcccctgggcagccaacctgccccagaggcaccagacctgggctttcagctttgggaccaggctgcccaaaggtactccctgcccaacctagaacccaggcctcaagtctttaccccacccctttcttgttcttccaagaagcagatgcccagttgctcagcagcagcggtagagacttgaatctgcccaccagtcacaaggcgggtcacagattcctcttcctctcttctcctcgttcctctgaaccctccaccaatgtgcctcagcctgtgtgctgtgtggcaacagcattctggttcccactgccaagatctcccaccactctgctgggatctgcagtggcagggagtgggggttgtgtaaaggggaagtcatcttttgagatccagatagacatggtttgtgcacttacgtccagatgggaagcatccttcctgcaaccctaaaataatcatgcagcctctcagacggacgccatcggtcccaaggccttaggtggaggaagcaaagcaggccaggcctgtcctgtccgtggacctctaccttctggactccctacgggtgcagagcacttgggtttctctacagccatcgtggcccacttgacactgtgctcctccatcagctggtcacatgccaacacgttcccagcccctgaggcagctccagggtgccccacctgctcctgaggtgggtccctaccctgctgctcctcttcatcctttcccttttgtcctgaaagggaggagcaatggtccaggcattaattccacccagggaattttagctatgccctcatgtcccagggagagagccacacgcctgttttccatttatagcaagattgtttgcatacttttgtaatgaaggggagtgtccagtggaaggatttttaaaattatcttatggatagctcaagtctctgccatttgtaatttttggctctaagctccgattggagacgcttctccttgtgcatgtgagttgactgatgttgtgagtgtaaatgcatttggttatttctggtatcggtggccacttggatggatttttttacattctgttccccagttacaggaaggagtccctttggtgtgtgaatatgtgtgcctgtagagggtggggcagggtggggtggggatggaaatgtgtggcatgcacatgagttgaaattcttttatgcatttttttgaagaaaaaaaaaaaaaaacaactctgaggacataggggatgtcagtttcctatggaagagacacctctgacccgttattcttataatcaaaatctgaagggaaaaaaatgttttagttctttccccactcgttgggttcaactagattaaaaggctgattttcagaaa

SEQ ID NO: 360610 - DNA, 2767 bp, Homo sapiens
tgctggtactggcccgaatcgttaggaggggcggccggcgggggcggggcggccggaggaggcgttggcagcgggctcggacccacgcggcgccgcggcccgcctggcctgcagcgctcccacccccggcggcggcacgatgccctttgacttcaggaggtttgacatctacaggaaggtgcccaaggaccttacgcagccaacgtacaccggggccattatctccatctgctgctgcctcttcatcctcttcctcttcctctcggagctcaccggatttataacgacagaagttgtgaacgagctctatgtcgatgacccagacaaggacagcggtggcaagatcgacctgaacaatggggcaggctgccgcttcgaggggcagttcagcatcaacaaggtccccggcaacttccacgtgtccacacacagtgccacagcccagccacagaacccagacatgacgcatgtcatccacaagctctcctttggggacacgctacaggtccagaacatccacggagctttcaatgctctcgggggagcagacagactcacctccaaccccctggcctcccacgactacatcctgaagattgtgcccacggtttatgaggacaagagtggcaagcagcggtactcctaccagtacacggtggccaacaaggaatacgtcgcctacagccacacgggccgcatcatccctgcaatctggttccgctacgacctcagccccatcacggtcaagtacacagagagacggcagccgctgtacagattcatcaccacgatctgtgccatcattggcgggaccttcaccgtcgccggcatcctggactcatgcatcttcacagcctctgaggcctggaagaagatccagctgggcaagatgcattgacgccacacccagcctaatggccgaggaccctgggcatcgccagccttgcctccagtgccctgtctcctttggccctcaatctggtcccaaatctggctgtgtcccaaagggtgtgtgggaagtggggggaaagtagaggatggctcgatgttttgcagctacctcttttccccgtgtttctttttagacaaattacactgcctgaagttgcagttcccctttccctggggagccccaagaacagagtcaggcaaggggtggggagtccagggatcttggggacccctcctaggagagctgcagtctcttccctcaggggaacatcccagaatgcatatcgatcagctctcagccaggcttcgacaatctcgcagcccccactaggtggacacattaatgatttggtttctcccctgggcagccaacctgccccagaggcaccagacctgggctttcagctttgggaccaggctgcccaaaggtactcctttatacacccggcaccttccacgaaagatggtacttcccaagcaagcccctatgatttgtcactatagatggaaccctgacttctgccccatcccttcctgcccaacctagaacccaggcctcaagtctttaccccacccctttcttgttcttccaagaagcagatgcccagttgctcagcagcagcggtagagacttgaatctgcccaccagtcacaaggcgggtcacagattcctcttcctctcttctcctcgttcctctgaaccctccaccaatgtgcctcagcctgtgtgctgtgtggcaacagcattctggttcccactgccaagatctcccaccactctgctgggatctgcagtggcagggagtgggggttgtgtaaaggggaagtcatcttttgagatccagatagacatggtttgtgcacttacgtccagatgggaagcatccttcctgcaaccctaaaataatcatgcagcctctcagacggacgccatcggtcccaaggccttaggtggaggaagcaaagcaggccaggcctgtcctgtccgtggacctctaccttctggactccctacgggtgcagagcacttgggtttctctacagccatcgtggcccacttgacactgtgctcctccatcagctggtcacatgccaacacgttcccagcccctgaggcagctccagggtgccccacctgctcctgaggtgggtccctaccctgctgctcctcttcatcctttcccttttgtcctgaaagggaggagcaatggtccaggcattaattccacccagggaattttagctatgccctcatgtcccagggagagagccacacgcctgttttccatttatagcaagattgtttgcatacttttgtaatgaaggggagtgtccagtggaaggatttttaaaattatcttatggatagctcaagtctctgccatttgtaatttttggctctaagctccgattggagacgcttctccttgtgcatgtgagttgactgatgttgtgagtgtaaatgcatttggttatttctggtatcggtggccacttggatggatttttttacattctgttccccagttacaggaaggagtccctttggtgtgtgaatatgtgtgcctgtagagggtggggcagggtggggtggggatggaaatgtgtggcatgcacatgagttgaaattcttttatgcatttttttgaagaaaaaaaaaaaaaaacaactctgaggacataggggatgtcagtttcctatggaagagacacctctgacccgttattcttataatcaaaatctgaagggaaaaaaatgttttagttctttccccactcgttgggttcaactagattaaaaggctgattttcagaaa

SEQ ID NO: 360611 - DNA, 2442 bp, Homo sapiens
atttgggttgtttccagaattttaatgatgtgcacagtgcaggaggaaagatcctgatggatagagtctcccaattcccggtatccaaggggagaagatgaagagcagttggttggtggtaaaactggggaatgagccccctgccgtgcccagggaatttaggcttaggattgaaatgacatagagctgtcagcgggcagtgcccgtccccctgcttcattctgctgtgtccttcccgcagccctggcctcccacgactacatcctgaagattgtgcccacggtttatgaggacaagagtggcaagcagcggtactcctaccagtacacggtggccaacaaggaatacgtcgcctacagccacacgggccgcatcatccctgcaatctggttccgctacgacctcagccccatcacggtcaagtacacagagagacggcagccgctgtacagattcatcaccacgatctgtgccatcattggcgggaccttcaccgtcgccggcatcctggactcatgcatcttcacagcctctgaggcctggaagaagatccagctgggcaagatgcattgacgccacacccagcctaatggccgaggaccctgggcatcgccagccttgcctccagtgccctgtctcctttggccctcaatctggtcccaaatctggctgtgtcccaaagggtgtgtgggaagtggggggaaagtagaggatggctcgatgttttgcagctacctcttttccccgtgtttctttttagacaaattacactgcctgaagttgcagttcccctttccctggggagccccaagaacagagtcaggcaaggggtggggagtccagggatcttggggacccctcctaggagagctgcagtctcttccctcaggggaacatcccagaatgcatatcgatcagctctcagccaggcttcgacaatctcgcagcccccactaggtggacacattaatgatttggtttctcccctgggcagccaacctgccccagaggcaccagacctgggctttcagctttgggaccaggctgcccaaaggtactcctttatacacccggcaccttccacgaaagatggtacttcccaagcaagcccctatgatttgtcactatagatggaaccctgacttctgccccatcccttcctgcccaacctagaacccaggcctcaagtctttaccccacccctttcttgttcttccaagaagcagatgcccagttgctcagcagcagcggtagagacttgaatctgcccaccagtcacaaggcgggtcacagattcctcttcctctcttctcctcgttcctctgaaccctccaccaatgtgcctcagcctgtgtgctgtgtggcaacagcattctggttcccactgccaagatctcccaccactctgctgggatctgcagtggcagggagtgggggttgtgtaaaggggaagtcatcttttgagatccagatagacatggtttgtgcacttacgtccagatgggaagcatccttcctgcaaccctaaaataatcatgcagcctctcagacggacgccatcggtcccaaggccttaggtggaggaagcaaagcaggccaggcctgtcctgtccgtggacctctaccttctggactccctacgggtgcagagcacttgggtttctctacagccatcgtggcccacttgacactgtgctcctccatcagctggtcacatgccaacacgttcccagcccctgaggcagctccagggtgccccacctgctcctgaggtgggtccctaccctgctgctcctcttcatcctttcccttttgtcctgaaagggaggagcaatggtccaggcattaattccacccagggaattttagctatgccctcatgtcccagggagagagccacacgcctgttttccatttatagcaagattgtttgcatacttttgtaatgaaggggagtgtccagtggaaggatttttaaaattatcttatggatagctcaagtctctgccatttgtaatttttggctctaagctccgattggagacgcttctccttgtgcatgtgagttgactgatgttgtgagtgtaaatgcatttggttatttctggtatcggtggccacttggatggatttttttacattctgttccccagttacaggaaggagtccctttggtgtgtgaatatgtgtgcctgtagagggtggggcagggtggggtggggatggaaatgtgtggcatgcacatgagttgaaattcttttatgcatttttttgaagaaaaaaaaaaaaaaacaactctgaggacataggggatgtcagtttcctatggaagagacacctctgacccgttattcttataatcaaaatctgaagggaaaaaaatgttttagttctttccccactcgttgggttcaactagattaaaaggctgattttcagaaa

SEQ ID NO: 360612 - DNA, 2459 bp, Homo sapiens
cgggcgggcggcgcccaatgggctgcgcggagcgtcacttcccggcagcgggaggcgagtggcgagtggcgagtggcgagtgtcaggggggcggccggcgggggcggggcggccggaggaggcgttggcagcgggctcggacccacgcggcgccgcggcccgcctggcctgcagcgctcccacccccggcggcggcacgatgccctttgacttcaggaggtttgacatctacaggaaggtgcccaaggaccttacgcagccaacgtacaccggggccattatctccatctgctgctgcctcttcatcctcttcctcttcctctcggagctcaccggatttataacgacagaagttgtgaacgagctctatgtcgatgacccagacaaggacagcggtggcaagatcgacgtcagtctgaacatcagtttacccaatctgcactgcgagttggttgggcttgacattcaggatgagatgggcaggcacgaagtgggccacatcgacaactccatgaagatcccgctgaacaatggggcaggctgccgcttcgaggggcagttcagcatcaacaaggtccccggcaacttccacgtgtccacacacagtgccacagcccagccacagaacccagacatgacgcatgtcatccacaagctctcctttggggacacgctacaggtccagaacatccacggagctttcaatgctctcgggggagcagacagactcacctccaaccccctggcctcccacgactacatcctgaagattgtgcccacggtttatgaggacaagagtggcaagcagcggtactcctaccagtacacggtggccaacaaggaatacgtcgcctacagccacacgggccgcatcatccctgcaatctggttccgctacgacctcagccccatcacggtcaagtacacagagagacggcagccgctgtacagattcatcaccacgatctgtgccatcattggcgggaccttcaccgtcgccggcatcctggactcatgcatcttcacagcctctgaggcctggaagaagatccagctgggcaagatgcattgacgccacacccagcctaatggccgaggaccctgggcatcgccagccttgcctccagtgccctgtctcctttggccctcaatctggtcccaaatctggctgtgtcccaaagggtgtgtgggaagtggggggaaagtagaggatggctcgatgttttgcagctacctcttttccccgtgtttctttttagacaaattacactgcctgaagttgcagttcccctttccctggggagccccaagaacagagtcaggcaaggggtggggagtccagggatcttggggacccctcctaggagagctgcagtctcttccctcaggggaacatcccagaatgcatatcgatcagctctcagccaggcttcgacaatctcgcagcccccactaggtggacacattaatgatttggtttctcccctgggcagccaacctgccccagaggcaccagacctgggctttcagctttgggaccaggctgcccaaaggtactcctttatacacccggcaccttccacgaaagatggtacttcccaagcaagcccctatgatttgtcactatagatggaaccctgacttctgccccatcccttgggtgcagagcacttgggtttctctacagccatcgtggcccacttgacactgtgctcctccatcagctggtcacatgccaacacgttcccagcccctgaggcagctccagggtgccccacctgctcctgaggtgggtccctaccctgctgctcctcttcatcctttcccttttgtcctgaaagggaggagcaatggtccaggcattaattccacccagggaattttagctatgccctcatgtcccagggagagagccacacgcctgttttccatttatagcaagattgtttgcatacttttgtaatgaaggggagtgtccagtggaaggatttttaaaattatcttatggatagctcaagtctctgccatttgtaatttttggctctaagctccgattggagacgcttctccttgtgcatgtgagttgactgatgttgtgagtgtaaatgcatttggttatttctggtatcggtggccacttggatggatttttttacattctgttccccagttacaggaaggagtccctttggtgtgtgaatatgtgtgcctgtagagggtggggcagggtggggtggggatggaaatgtgtggcatgcacatgagttgaaattcttttatgcatttttttgaagaaaaaaaaaaaaaaacaactctgaggacataggggatgtcagtttcctatggaagagacacctctgacccgttattcttataatcaaaatctgaagggaaaaaaatgttttagttctttccccactcgttgggttcaactagattaaaaggctgattttcagaaa

SEQ ID NO: 360613 - DNA, 2476 bp, Homo sapiens
cgggcgggcggcgcccaatgggctgcgcggagcgtcacttcccggcagcgggaggcgagtggcgagtggcgagtggcgagtgtcaggggggcggccggcgggggcggggcggccggaggaggcgttggcagcgggctcggacccacgcggcgccgcggcccgcctggcctgcagcgctcccacccccggcggcggcacgatgccctttgacttcaggaggtttgacatctacaggaaggtgcccaaggaccttacgcagccaacgtacaccggggccattatctccatctgctgctgcctcttcatcctcttcctcttcctctcggagctcaccggatttataacgacagaagttgtgaacgagctctatgtcgatgacccagacaaggacagcggtggcaagatcgacgtcagtctgaacatcagtttacccaatctgcactgcgagttggttgggcttgacattcaggatgagatgggcaggcacgaagtgggccacatcgacaactccatgaagatcccgctgaacaatggggcaggctgccgcttcgaggggcagttcagcatcaacaaggtccccggcaacttccacgtgtccacacacagtgccacagcccagccacagaacccagacatgacgcatgtcatccacaagctctcctttggggacacgctacaggtccagaacatccacggagctttcaatgctctcgggggagcagacagactcacctccaaccccctggcctcccacgactacatcctgaagattgtgcccacggtttatgaggacaagagtggcaagcagcggtactcctaccagtacacggtggccaacaaggaatacgtcgcctacagccacacgggccgcatcatccctgcaatctggttccgctacgacctcagccccatcacggtcaagtacacagagagacggcagccgctgtacagattcatcaccacgatctgtgccatcattggcgggaccttcaccgtcgccggcatcctggactcatgcatcttcacagcctctgaggcctggaagaagatccagctgggcaagatgcattgacgccacacccagcctaatggccgaggaccctgggcatcgccagccttgcctccagtgccctgtctcctttggccctcaatctggtcccaaatctggctgtgtcccaaagggtgtgtgggaagtggggggaaagtagaggatggctcgatgttttgcagctacctcttttccccgtgtttctttttagacaaattacactgcctgaagttgcagttcccctttccctggggagccccaagaacagagtcaggcaaggggtggggagtccagggatcttggggacccctcctaggagagctgcagtctcttccctcaggggaacatcccagaatgcatatcgatcagctctcagccaggcttcgacaatctcgcagcccccactaggtggacacattaatgatttggtttctcccctgggcagccaacctgccccagaggcaccagacctgggctttcagctttgggaccaggctgcccaaaggtactcctttatacacccggcaccttccacgaaagatggtacttcccaagcaagcccctatgatttgtcactatagatggaaccctgacttctgccccatcccttcctgcccaacctagaacccaggcctcaagtctttaccccacccctttcttgttcttccaagaagcagatgcccagttgctcagcagcagcggtagagacttgaatctgcccaccagtcacaaggcgggtcacagattcctcttcctctcttctcctcgttcctctgaaccctccaccaatgtgcctcagcctgtgtgctgtgtggcaacagcattctggttcccactgccaagatctcccaccactctgctgggatctgcagtggcagggagtgggggttgtgtaaaggggaagtcatcttttgagatccagatagacatggtttgtgcacttacgtccagatgggaagcatccttcctgcaaccctaaaataatcatgcagcctctcagacggacgccatcggtcccaaggccttaggtggaggaagcaaagcaggccaggcctgtcctgtccgtggacctctaccttctggactccctacgggtgcagagcacttgggtttctctacagccatcgtggcccacttgacactgtgctcctccatcagctggtcacatgccaacacgttcccagcccctgaggcagctccaggtggggatggaaatgtgtggcatgcacatgagttgaaattcttttatgcatttttttgaagaaaaaaaaaaaaaaacaactctgaggacataggggatgtcagtttcctatggaagagacacctctgacccgttattcttataatcaaaatctgaagggaaaaaaatgttttagttctttccccactcgttgggttcaactagattaaaaggctgattttcagaaa

SEQ ID NO: 360614 - DNA, 2176 bp, Homo sapiens
cgggcgggcggcgcccaatgggctgcgcggagcgtcacttcccggcagcgggaggcgagtggcgagtggcgagtggcgagtgtcaggggggcggccggcgggggcggggcggccggaggaggcgttggcagcgggctcggacccacgcggcgccgcggcccgcctggcctgcagcgctcccacccccggcggcggcacgatgccctttgacttcaggaggtttgacatctacaggaaggtgcccaaggaccttacgcagccaacgtacaccggggccattatctccatctgctgctgcctcttcatcctcttcctcttcctctcggagctcaccggatttataacgacagaagttgtgaacgagctctatgtcgatgacccagacaaggacagcggtggcaagatcgacgtcagtctgaacatcagtttacccaatctgcactgcgagttggttgggcttgacattcaggatgagatgggcaggcacgaagtgggccacatcgacaactccatgaagatcccgctgaacaatggggcaggctgccgcttcgaggggcagttcagcatcaacaaggtccccggcaacttccacgtgtccacacacagtgccacagcccagccacagaacccagacatgacgcatgtcatccacaagctctcctttggggacacgctacaggtccagaacatccacggagctttcaatgctctcgggggagcagacagactcacctccaaccccctggcctcccacgactacatcctgaagattgtgcccacggtttatgaggacaagagtggcaagcagcggtactcctaccagtacacggtggccaacaaggaatacgtcgcctacagccacacgggccgcatcatccctgcaatctggttccgctacgacctcagccccatcacggtcaagtacacagagagacggcagccgctgtacagattcatcaccacgatctgtgccatcattggcgggaccttcaccgtcgccggcatcctggactcatgcatcttcacagcctctgaggcctggaagaagatccagctgggcaagatgcattgacgccacacccagcctaatggccgaggaccctgggcatcgccagccttgcctccagtgccctgtctcctttggccctcaatctggtcccaaatctggctgtgtcccaaagggtgtgtgggaagtggggggaaagtagaggatggctcgatgttttgcagctacctcttttccccgtgtttctttttagacaaattacactgcctgaagttgcagttcccctttccctggggagccccaagaacagagtcaggcaaggggtggggagtccagggatcttggggacccctcctaggagagctgcagtctcttccctcaggggaacatcccagaatgcatatcgatcagctctcagccaggcttcgacaatctcgcagcccccactaggtggacacattaatgatttggtttctcccctgggcagccaacctgccccagaggcaccagacctgggctttcagctttgggaccaggctgcccaaaggtactcctttatacacccggcaccttccacgaaagatggtacttcccaagcaagcccctatgatttgtcactatagatggaaccctgacttctgccccatcccttcctgcccaacctagaacccaggcctcaagtctttaccccacccctttcttgttcttccaagaagcagatgcccagtttctctgccatttgtaatttttggctctaagctccgattggagacgcttctccttgtgcatgtgagttgactgatgttgtgagtgtaaatgcatttggttatttctggtatcggtggccacttggatggatttttttacattctgttccccagttacaggaaggagtccctttggtgtgtgaatatgtgtgcctgtagagggtggggcagggtggggtggggatggaaatgtgtggcatgcacatgagttgaaattcttttatgcatttttttgaagaaaaaaaaaaaaaaacaactctgaggacataggggatgtcagtttcctatggaagagacacctctgacccgttattcttataatcaaaatctgaagggaaaaaaatgttttagttctttccccactcgttgggttcaactagattaaaaggctgattttcagaaa

SEQ ID NO: 360615 - DNA, 1853 bp, Homo sapiens
cgggcgggcggcgcccaatgggctgcgcggagcgtcacttcccggcagcgggaggcgagtggcgagtggcgagtggcgagtgtcaggggggcggccggcgggggcggggcggccggaggaggcgttggcagcgggctcggacccacgcggcgccgcggcccgcctggcctgcagcgctcccacccccggcggcggcacgatgccctttgacttcaggaggtttgacatctacaggaaggtgcccaaggaccttacgcagccaacgtacaccggggccattatctccatctgctgctgcctcttcatcctcttcctcttcctctcggagctcaccggatttataacgacagaagttgtgaacgagctctatgtcgatgacccagacaaggacagcggtggcaagatcgacgtcagtctgaacatcagtttacccaatctgcactgcgagttggttgggcttgacattcaggatgagatgggcaggcacgaagtgggccacatcgacaactccatgaagatcccgctgaacaatggggcaggctgccgcttcgaggggcagttcagcatcaacaaggtccccggcaacttccacgtgtccacacacagtgccacagcccagccacagaacccagacatgacgcatgtcatccacaagctctcctttggggacacgctacaggtccagaacatccacggagctttcaatgctctcgggggagcagacagactcacctccaaccccctggcctcccacgactacatcctgaagattgtgcccacggtttatgaggacaagagtggcaagcagcggtactcctaccagtacacggtggccaacaaggaatacgtcgcctacagccacacgggccgcatcatccctgcaatctggttccgctacgacctcagccccatcacggtcaagtacacagagagacggcagccgctgtacagattcatcaccacgatctgtgccatcattggcgggaccttcaccgtcgccggcatcctggactcatgcatcttcacagcctctgaggcctggaagaagatccagctgggcaagatgcattgacgccacacccagcctaatggccgaggaccctgggcatcgccagccttgcctccagtgccctgtctcctttggccctcaatctggtcccaaatctggctgtgtcccaaagggtgtgtgggaagtggggggaaagtagaggatggctcgatgttttgcagctacctcttttccccgtgtttctttttagacaaattacactgcctgaagttgcagttcccctttccctggggagccccaagaacagagtcaggcaaggggtggggagtccagggatcttggggacccctcctaggagagctgcagtctcttccctcaggggaacatcccagaatgcatatcgatcagctctcagccaggcttcgacaatctcgcagcccccactaggtggacacattaatgatttggtttctcccctgggcagccaacctgccccagaggcaccagacctgggctttcagctttgggaccaggctgcccaaaggtactcctttatacacccggcaccttccacgaaagatggtacttcccaagcaagcccctatgatttgtcactatatggggatggaaatgtgtggcatgcacatgagttgaaattcttttatgcatttttttgaagaaaaaaaaaaaaaaacaactctgaggacataggggatgtcagtttcctatggaagagacacctctgacccgttattcttataatcaaaatctgaagggaaaaaaatgttttagttctttccccactcgttgggttcaactagattaaaaggctgattttcagaaa

SEQ ID NO: 360616 - DNA, 1621 bp, Homo sapiens
cgggcgggcggcgcccaatgggctgcgcggagcgtcacttcccggcagcgggaggcgagtggcgagtggcgagtggcgagtgtcaggggggcggccggcgggggcggggcggccggaggaggcgttggcagcgggctcggacccacgcggcgccgcggcccgcctggcctgcagcgctcccacccccggcggcggcacgatgccctttgacttcaggagcaggctgcccaaaggtactcctttatacacccggcaccttccacgaaagatggtacttcccaagcaagcccctatgatttgtcactatagatggaaccctgacttctgccccatcccttcctgcccaacctagaacccaggcctcaagtctttaccccacccctttcttgttcttccaagaagcagatgcccagttgctcagcagcagcggtagagacttgaatctgcccaccagtcacaaggcgggtcacagattcctcttcctctcttctcctcgttcctctgaaccctccaccaatgtgcctcagcctgtgtgctgtgtggcaacagcattctggttcccactgccaagatctcccaccactctgctgggatctgcagtggcagggagtgggggttgtgtaaaggggaagtcatcttttgagatccagatagacatggtttgtgcacttacgtccagatgggaagcatccttcctgcaaccctaaaataatcatgcagcctctcagacggacgccatcggtcccaaggccttaggtggaggaagcaaagcaggccaggcctgtcctgtccgtggacctctaccttctggactccctacgggtgcagagcacttgggtttctctacagccatcgtggcccacttgacactgtgctcctccatcagctggtcacatgccaacacgttcccagcccctgaggcagctccagggtgccccacctgctcctgaggtgggtccctaccctgctgctcctcttcatcctttcccttttgtcctgaaagggaggagcaatggtccaggcattaattccacccagggaattttagctatgccctcatgtcccagggagagagccacacgcctgttttccatttatagcaagattgtttgcatacttttgtaatgaaggggagtgtccagtggaaggatttttaaaattatcttatggatagctcaagtctctgccatttgtaatttttggctctaagctccgattggagacgcttctccttgtgcatgtgagttgactgatgttgtgagtgtaaatgcatttggttatttctggtatcggtggccacttggatggatttttttacattctgttccccagttacaggaaggagtccctttggtgtgtgaatatgtgtgcctgtagagggtggggcagggtggggtggggatggaaatgtgtggcatgcacatgagttgaaattcttttatgcatttttttgaagaaaaaaaaaaaaaaacaactctgaggacataggggatgtcagtttcctatggaagagacacctctgacccgttattcttataatcaaaatctgaagggaaaaaaatgttttagttctttccccactcgttgggttcaactagattaaaaggctgattttcagaaa

SEQ ID NO: 360617 - DNA, 1088 bp, Homo sapiens
cgggcgggcggcgcccaatgggctgcgcggagcgtcacttcccggcagcgggaggcgagtggcgagtggcgagtggcgagtgtcaggggggcggccggcgggggcggggcggccggaggaggcgttggcagcgggctcggacccacgcggcgccgcggcccgcctggcctgcagcgctcccacccccggcggcggcacgatgccctttgacttcaggaggtttgacatctacaggaaggtgcccaaggaccttacgcagccaacgtacaccggggccattatctccatctgctgctgcctcttcatcctcttcctcttcctctcggagctcaccggatttataacgacagaagttgtgaacgagctctatgtcgatgacccagacaaggacagcggtggcaagatcgacgtcagtctgaacatcagtttacccaatctgcactgcgagttggttgggcttgacattcaggatgagatgggcaggcacgaagtgggccacatcgacaactccatgaagatcccgctgaacaatggggcaggctgccgcttcgaggggcagttcagcatcaacaaggtccccggcaacttccacgtgtccacacacagtgccacagcccagccacagaacccagacatgacgcatgtcatccacaagctctcctttggggacacgctacaggtccagaacatccacggagctttcaatgctctcgggggagcagacagactcacctccaaccccctggcctcccacgactacatcctgaagattgtgcccacggtttatgaggacaagagtggcaagcagcggtactcctaccagtacacggtggccaacaaggaatacgtcgcctacagccacacgggccgcatcatccctgcaatctggttccgctacgacctcagccccatcacggtcaagtacacagagagacggcagccgctgtacagattcatcaccacgatctgtgccatcattggcgggaccttcaccgtcgccggcatcctggactctgggcactgtttggactctgagcactgtttggactctgggcactgtttggactccgggcactgtttggactctg

SEQ ID NO: 360618 - DNA, 1100 bp, Homo sapiens
agcgctttgtgactggtgggcagattcaagtctctaccgctgctgctgagcaactgggcatctgcttcttggaagaacaagaaaggggtggggtaaagacttgaggggaagtcatcttttgagatccagatagacatggtttgtgcacttacgtccagatgggaagcatccttcctgcaaccctaaaataatcatgcagcctctcagacggacgccatcggtcccaaggccttaggtggaggaagcaaagcaggccaggcctgtcctgtccgtggacctctaccttctggactccctacgggtgcagagcacttgggtttctctacagccatcgtggcccacttgacactgtgctcctccatcagctggtcacatgccaacacgttcccagcccctgaggcagctccagggtgccccacctgctcctgaggtgggtccctaccctgctgctcctcttcatcctttcccttttgtcctgaaagggaggagcaatggtccaggcattaattccacccagggaattttagctatgccctcatgtcccagggagagagccacacgcctgttttccatttatagcaagattgtttgcatacttttgtaatgaaggggagtgtccagtggaaggatttttaaaattatcttatggatagctcaagtctctgccatttgtaatttttggctctaagctccgattggagacgcttctccttgtgcatgtgagttgactgatgttgtgagtgtaaatgcatttggttatttctggtatcggtggccacttggatggatttttttacattctgttccccagttacaggaaggagtccctttggtgtgtgaatatgtgtgcctgtagagggtggggcagggtggggtggggatggaaatgtgtggcatgcacatgagttgaaattcttttatgcatttttttgaagaaaaaaaaaaaaaaacaactctgaggacataggggatgtcagtttcctatggaagagacacctctgacccgttattcttataatcaaaatctgaagggaaaaaaatgttttagttctttccccactcgttgggttcaactagattaaaaggctgattttcagaaa

SEQ ID NO: 360619 - DNA, 880 bp, Homo sapiens
cgggcgggcggcgcccaatgggctgcgcggagcgtcacttcccggcagcgggaggcgagtggcgagtggcgagtggcgagtgtcaggggggcggccggcgggggcggggcggccggaggaggcgttggcagcgggctcggacccacgcggcgccgcggcccgcctggcctgcagcgctcccacccccggcggcggcacgatgccctttgacttcaggaggtttgacatctacaggaaggtgcccaaggaccttacgcagccaacgtacaccggggccattatctccatctgctgctgcctcttcatcctcttcctcttcctctcggagctcaccggatttataacgacagaagttgtgaacgagctctatgtcgatgacccagacaaggacagcggtggcaagatcgacgtcagtctgaacatcagtttacccaatctgcactgcgagttggttgggcttgacattcaggatgagatgggcaggcacgaagtgggccacatcgacaactccatgaagatcccgctgaacaatggggcaggctgccgcttcgaggggcagttcagcatcaacaaggtccccggcaacttccacgtgtccacacacagtgccacagcccagccacagaacccagacatgacgcatgtcatccacaagctctcctttggggacacgctacaggtccagaacatccacggagctttcaatgctctcgggggagcagacagactcacctccaaccccctggcctcccacgactacatcctgaagattgtgcccacggtttatgaggacaagagtggcaagcagcggtactcctaccagtacacggtggccaacaagaatacgtcgctttccacctagacgtcgctttccacctag

SEQ ID NO: 360620 - DNA, 914 bp, Homo sapiens
  misc_feature (780)..(780): n is a, c, g, or t
cgggcgggcggcgcccaatgggctgcgcggagcgtcacttcccggcagcgggaggcgagtggcgagtggcgagtggcgagtgtcaggggggcggccggcgggggcggggcggccggaggaggcgttggcagcgggctcggacccacgcggcgccgcggcccgcctggcctgcagcgctcccacccccggcggcggcacgatgccctttgacttcaggaggtttgacatctacaggaaggtgcccaaggaccttacgcagccaacgtacaccggggccattatctccatctgctgctgcctcttcatcctcttcctcttcctctcggagctcaccggatttataacgacagaagttgtgaacgagctctatgtcgatgacccagacaaggacagcggtggcaagatcgacgtcagtctgaacatcagtttacccaatctgcactgcgagttggttgggcttgacattcaggatgagatgggcaggcacgaagtgggccacatcgacaactccatgaagatcccgctgaacaatggggcaggctgccgcttcgaggggcagttcagcatcaacaaggtccccggcaacttccacgtgtccacacacagtgccacagcccagccacagaacccagacatgacgcatgtcatccacaagctctcctttggggacacgctacaggtccagaacatccacggagctttcaatgctctcgggggagcagacagactcacctccaaccgggcttttccaatcaagaatacatcctgaagactggtgcncacggtgttatgaaggacaagagtgtgcaagtcatgcggtaattcctaccagagcacggtgaccaatcaaggtatacgtcgcttacttatgagggatactgtaggtcaacctgcaggatgacagctgcagtcat

SEQ ID NO: 360621 - DNA, 3388 bp, Homo sapiens
  misc_feature (3053)..(3053): n is a, c, g, or t
cgggcgggcggcgcccaatgggctgcgcggagcgtcacttcccggcagcgggaggcgagtggcgagtggcgagtggcgagtgtcaggggggcggccggcgggggcggggcggccggaggaggcgttggcagcgggctcggacccacgcggcgccgcggcccgcctggcctgcagcgctcccacccccggcggcggcacgatgccctttgacttcaggaggtttgacatctacaggaaggtgcccaaggaccttacgcagccaacgtacaccggggccattatctccatctgctgctgcctcttcatcctcttcctcttcctctcggagctcaccggatttataacgacagaagttgtgaacgagctctatgtcgatgacccagacaaggacagcggtggcaagatcgacgtcagtctgaacatcagtttacccaatctgcactgcgagttggttgggcttgacattcaggatgagatgggcaggcacgaagtgggccacatcgacaactccatgaagatcccgctgaacaatggggcaggctgccgcttcgaggggcagttcagcatcaacaagaaccaggagcttcagatcctaagtcaagtgggtgaacgcagtgcccttgggagggccgaggcacccggtggcagctggcagggttttgctcagcacgtgccggccttcctcgaagctcggtactgtcacagtggagcctctcaacaacgctgtgaggcagcaccatttgacaggttaggatgctggggcccagagaggttaagtgtcttgcccgaggtcacacagctatctgcatgtcccacaactccccttcccagccccagccaaactgagccactggccactcctggcttctccttgtccctcctgcagcctctgctcagaacgcccttcctccagaccctgacacctgagctggggttgcaaagtcactggccacatccagcccaaagataaattttgtttgtccagtatagcatttaactgcatcagaaccagtatgaaaagaccaggaatccagatttctggcttttaaaagtcagaggctctcactacactgggtccgtgttcccgctatgacaatgacctggcaccaatgggcagtgttcccctttagagagggtgtgtgctgtcccttcccacagtccctggcaggcggctggaaggccaggcctggtcatctgtcaagcagggtggacttcttacgtgacagttcagggctcccttaagtgctaaagcagaagctgcaaggctttcttaaggtttcgagtgttgctgggagaaatctgctgcatgttgtgggttaaagggagtctctcaccagcccaggccctcaggaggaggagataccaggaggcagggatgctgggggtcgtggttcactgggggctctctctgcccatgagctgccacacagcacctttgccatgccccgtaatttggattttatggtggttgtgatggaaagccatttgagggttttgaacagggaggcaatgtaatcagatttatgccttagaactggactatccaataggttgccaccagccacataaggctatttaaattaattcaaattaaatgtacaattcagtcactcattctcatcaaccacatttcaagtgctcaaagccacgtgctggctaggggccacagcgttagacagtgcagagagaaagcacttccatcgctgaggaaagttctgctggaccgcacacccttagaaggatggctctggtggccgggcgcggtggctcaaacctgtaatcccagcactttgggaggccgaggtgggtggatcacgaggtcaggagatcgagaccatcccggctaacatggtgaaaccctgcctctactaaaaatacaaaaaaaaacaaaattagccgggcgtggttgcgggcacctgtagtcccagctactcaggaggctgaggcgggagaatggcatgaacccgggaggtggagcttgcagtgagccaagatcgtaccactgcactccagtctgggcgacagagtgagactccatctcaaaacaaacaaaaaaaggatggggctgggctggagagggtggcaggcagtggttgtggcagtggagctggggagatgtggtcggattagggaggtagaatcaataagactcagtgaagaatcggatgtgggggtaagggcacatgtggaagcaaagaaacctttgacgtctttgtcttgacaaccgggtggtcctgtttctagacatggaagcttagaaaagcctggagtctgtgggaagtaggtagggctgggcactggtcattccactctggtttcctttggggttcccattaggtgtctacagggagaggtgaaattggaagttggaggtgtggagagttcaggagagggttctggaccacagatgttgaggtgggagtcattagtgaatagatgatgttggaagtcatgggtcctcagagtgggggctccttaagcctccaggccagcagcatcagcatcacctgggagattgttaggaatgcagattctcaggcccccctaagacccaccgactctgtgctagaacaagcgcccctcagagattctgatgccactgaagtttgaggagcattggtttaagcaagattacctacggagaggctgtagatccgtgttctaaacctggggtccacagacacccccaagaagagcggattgaatgcaagagatctatgaagttggatgggggaaaaattgacatctttatttttgctaaactcgatctaaagtttagcatttccatctgcgatgaatgtaggccacaaaccacagtagtattagcagtgcctgggacctcctcaacaacagaaattgccggtatttatagcacgttacagttgttgcagataatttccagagactgtttatatgcaccactgttttaaaattacggtgattggccaggtgcagtggctcacacctgtaatcccagcactttgggaggccaaagtgggtggatcacttgaggagttcaagaccagcctggtcaacatgtcaaaaccctgtanctacaaaaaaatacaaaagttaaccaagcctatgcttgtagtcacagctactcgggaggccgaggtgggagggtcttctgagcccagggaggtagaggcttcagtgagctgagatcgcaccaccacactccagcctgggtgacagagtgaaacccttaatcaatcagtcaataaaaattacagtaattattagacccaccactaggtcatcttatttgatgcatcagtaaagcagcatattcaaatgtggatttttaaatattttaattactatttaaatatctctttactttgtaatcctatgcattttacgcattaaaacattttaagcattt

SEQ ID NO: 360622 - DNA, 246 bp, Homo sapiens
cactgcccccctcgcctcacgtttagcggagtcattgtcctgtcccctgtagtctttggaccccagaccatgagctcctggaggtccccagcccggcctgcccctgcaatggatgaatgaaggctcccagagagaacaggctggcccccatcctcccgcgtctctgggtttgtgactgttgtctccctttggctcctgcagtggttgggcttgacattcaggatgagatgggcaggcacgaagtgg

SEQ ID NO: 360623 - DNA, 752 bp, Homo sapiens
cacatgctgggaagtttctgtcctctgcacctgttcatgctgttccctctgcccagatgcctttcgctctcttcctgagtaatgcagactcatcttcagagccttaacacaggatgtccttccccctgggaagccctccctgaatacagcctgcaccctcaattgagccgggggccttccctgtaacccccatggtctgcaaattcctctgggccagggtggatcccacagagtctcattgtctgttccaagtctgtgtcacaggggcttggccaaggccagattcttgtctgctcatctccccagttccggcatctcctgaaggactggcgccatgtggccatcagcccaggctgcggaggtagatggcatccaggcatcagaggagggagcagtgcgtccaacagacgtgagctgagactgcagctctcgacatgtgaccttagcaagtttcttcactgctctgagcctccattttcttttctgtaaaatgggaattatcagatgacaaagtcaaaggattcagtgttgtttgtttagtcattcattcattcaaaaagtgtctattgagcacctgctatgtgtcggagtctggggagcacagcagggcgtggacatgctaatgggaggaggcagacgagaacaggatgggtatgagatggcaggtgatcccagaggctgtagcaggtaaggggatggggaatgggggccagggtgctcttttgcacaggtggacgtggagggcctctctg

SEQ ID NO: 360624 - DNA, 1703 bp, Homo sapiens
aaaggcagggggtggggctgcttcatattgaggctcgagtcataaggggctctggagggtctgtgggcacagccccacacccttgtcctggggcctctttcctcttccctctaggctggtctcccttcgtcagtgcccaccacccttaacagtttgcatttctgttgtttcttccagtctccatctgctgctgcctcttcatcctcttcctcttcctctcggagctcaccggatttataacgacagaagttgtgaacgagctctatgtcgatgacccagacaaggacagcggtggcaagatcgacgtcagtctgaacatcagtttacccaatctgcactgcgagttggttgggcttgacattcaggatgagatgggcaggcacgaagtgggccacatcgacaactccatgaagatcccgctgaacaatggggcaggctgccgcttcgaggggcagttcagcatcaacaaggtccccggcaacttccacgtgtccacacacagtgccacagcccagccacagaacccagacatgacgcatgtcatccacaagctctcctttggggacacgctacaggtccagaacatccacggagctttcaatgctctcgggggagcagacagactcacctccaaccccctggcctcccacgactacatcctgaagattgtgcccacggtttatgaggacaagagtggcaagcagcggtactcctaccagtacacggtggccaacaaggaatacgtcgcctacagccacacgggccgcatcatccctgcaatctggttccgctacgacctcagccccatcacggtcaagtacacagagagacggcagccgctgtacagattcatcaccacgatctgtgccatcattggcgggaccttcaccgtcgccggcatcctggactcatgcatcttcacagcctctgaggcctggaagaagatccagctgggcaagatgcattgacgccacacccagcctaatggccgaggaccctgggcatcgccagccttgcctccagtgccctgtctcctttggccctcaatctggtcccaaatctggctgtgtcccaaagggtgtgtgggaagtggggggaaagtagaggatggctcgatgttttgcagctacctcttttccccgtgtttctttttagacaaattacactgcctgaagttgcagttcccctttccctggggagccccaagaacagagtcaggcaaggggtggggagtccaggggaacatcccagaatgcatatcgatcagctctcagccaggcttcgacaatctcgcagcccccactaggtggacacattaatgatttggtttctcccctgggcagccaacctgccccagaggcaccagacctgggctttcagctttgggaccaggctgcccaaaggtactcctttatacacccggcaccttccacgaaagatggtacttcccaagcaagcccctatgatttgtcactatatggggatggaaatgtgtggcatgcacatgagttgaaattcttttatgcatttttttgaagaaaaaaaaaaaaaaacaactctgaggacataggggatgtcagtttcctatggaagagacacctctgacccgttattcttataatcaaaatctgaagggaaaaaaatgttttagttctttccccactcgttgggttcaactagattaaaaggctgattttcagaaa

SEQ ID NO: 360625 - DNA, 3948 bp, Homo sapiens
  misc_feature (3613)..(3613): n is a, c, g, or t
gaagcccaggctctccttagttgactgtgtgttaatcacccagcaatttcattactcaacagctctccagagttgcacattacagctggggtagaaattgggtgctgaaggccaggcagagcatttggctgtagggaggccgatcctcctcgggcctgttaccggcgggtctttgttcttagacctggggttcttggcctcacggattccaaggaatggaacgttgggccatgcgtgtgaacgagctctatgtcgatgacccagacaaggacagcggtggcaagatcgacgtcagtctgaacatcagtttacccaatctgcactgcgagttggttgggcttgacattcaggatgagatgggcaggcacgaagtgggccacatcgacaactccatgaagatcccgctgaacaatggggcaggctgccgcttcgaggggcagttcagcatcaacaaggtatggaagccctgcctcagccctttctacctgctcccctttcctgctgtctccccgctccctggaaactggttgtggaggcactcactcgacctgaccctgacacagcccccagcaagcgagggttcgtgtccagctgcctggccgttcctgctgagaatctggatgggggtccaggctccctggggttttaagcccctgatggctggttcaggaaggagctactcttctctccagtgagggggacaatgatgagaagacctgaggatttgcagcccccagccctgggttcaagtcccagctctaccccttcttggcccctacaagtcacttgacccatcttaggctgagggtgtgatggcgataatagtatcacgataccacccacttcacaaagtttgtgtggggattaaatgagctaatgcagattcattcattcagaaaaatttttgaatggcacgttctgtgttccagggtcggtgataggctctggggcagcgttcctgggctggtggggctcccattctggtagagggagacagtctacaaaccagaaagcatcagggatgctaagtgcagtgatgaggaataaagccaaggggagtgagatgaggtgggcttgaaagtaccttgtccgctcagaaggaccattcaaggttcactgttgttttgtcctcagaaccaggagcttcagatcctaagtcaagtgggtgaacgcagtgcccttgggagggccgaggcacccggtggcagctggcagggttttgctcagcacgtgccggccttcctcgaagctcggtactgtcacagtggagcctctcaacaacgctgtgaggcagcaccatttgacaggttaggatgctggggcccagagaggttaagtgtcttgcccgaggtcacacagctatctgcatgtcccacaactccccttcccagccccagccaaactgagccactggccactcctggcttctccttgtccctcctgcagcctctgctcagaacgcccttcctccagaccctgacacctgagctggggttgcaaagtcactggccacatccagcccaaagataaattttgtttgtccagtatagcatttaactgcatcagaaccagtatgaaaagaccaggaatccagatttctggcttttaaaagtcagaggctctcactacactgggtccgtgttcccgctatgacaatgacctggcaccaatgggcagtgttcccctttagagagggtgtgtgctgtcccttcccacagtccctggcaggcggctggaaggccaggcctggtcatctgtcaagcagggtggacttcttacgtgacagttcagggctcccttaagtgctaaagcagaagctgcaaggctttcttaaggtttcgagtgttgctgggagaaatctgctgcatgttgtgggttaaagggagtctctcaccagcccaggccctcaggaggaggagataccaggaggcagggatgctgggggtcgtggttcactgggggctctctctgcccatgagctgccacacagcacctttgccatgccccgtaatttggattttatggtggttgtgatggaaagccatttgagggttttgaacagggaggcaatgtaatcagatttatgccttagaactggactatccaataggttgccaccagccacataaggctatttaaattaattcaaattaaatgtacaattcagtcactcattctcatcaaccacatttcaagtgctcaaagccacgtgctggctaggggccacagcgttagacagtgcagagagaaagcacttccatcgctgaggaaagttctgctggaccgcacacccttagaaggatggctctggtggccgggcgcggtggctcaaacctgtaatcccagcactttgggaggccgaggtgggtggatcacgaggtcaggagatcgagaccatcccggctaacatggtgaaaccctgcctctactaaaaatacaaaaaaaaacaaaattagccgggcgtggttgcgggcacctgtagtcccagctactcaggaggctgaggcgggagaatggcatgaacccgggaggtggagcttgcagtgagccaagatcgtaccactgcactccagtctgggcgacagagtgagactccatctcaaaacaaacaaaaaaaggatggggctgggctggagagggtggcaggcagtggttgtggcagtggagctggggagatgtggtcggattagggaggtagaatcaataagactcagtgaagaatcggatgtgggggtaagggcacatgtggaagcaaagaaacctttgacgtctttgtcttgacaaccgggtggtcctgtttctagacatggaagcttagaaaagcctggagtctgtgggaagtaggtagggctgggcactggtcattccactctggtttcctttggggttcccattaggtgtctacagggagaggtgaaattggaagttggaggtgtggagagttcaggagagggttctggaccacagatgttgaggtgggagtcattagtgaatagatgatgttggaagtcatgggtcctcagagtgggggctccttaagcctccaggccagcagcatcagcatcacctgggagattgttaggaatgcagattctcaggcccccctaagacccaccgactctgtgctagaacaagcgcccctcagagattctgatgccactgaagtttgaggagcattggtttaagcaagattacctacggagaggctgtagatccgtgttctaaacctggggtccacagacacccccaagaagagcggattgaatgcaagagatctatgaagttggatgggggaaaaattgacatctttatttttgctaaactcgatctaaagtttagcatttccatctgcgatgaatgtaggccacaaaccacagtagtattagcagtgcctgggacctcctcaacaacagaaattgccggtatttatagcacgttacagttgttgcagataatttccagagactgtttatatgcaccactgttttaaaattacggtgattggccaggtgcagtggctcacacctgtaatcccagcactttgggaggccaaagtgggtggatcacttgaggagttcaagaccagcctggtcaacatgtcaaaaccctgtanctacaaaaaaatacaaaagttaaccaagcctatgcttgtagtcacagctactcgggaggccgaggtgggagggtcttctgagcccagggaggtagaggcttcagtgagctgagatcgcaccaccacactccagcctgggtgacagagtgaaacccttaatcaatcagtcaataaaaattacagtaattattagacccaccactaggtcatcttatttgatgcatcagtaaagcagcatattcaaatgtggatttttaaatattttaattactatttaaatatctctttactttgtaatcctatgcattttacgcattaaaacattttaagcattt

SEQ ID NO: 360626 - DNA, 2941 bp, Homo sapiens
cgggcgggcggcgcccaatgggctgcgcggagcgtcacttcccggcagcgggaggcgagtggcgagtggcgagtggcgagtgtcaggggggcggccggcgggggcggggcggccggaggaggcgttggcagcgggctcggacccacgcggcgccgcggcccgcctggcctgcagcgctcccacccccggcggcggcacgatgccctttgacttcaggaggtttgacatctacaggaaggtgcccaaggaccttacgcagccaacgtacaccggggccattatctccatctgctgctgcctcttcatcctcttcctcttcctctcggagctcaccggatttataacgacagaagttgtgaacgagctctatgtcgatgacccagacaaggacagcggtggcaagatcgacgtcagtctgaacatcagtttacccaatctgcactgcgagttggttgggcttgacattcaggatgagatgggcaggcacgaagtgggccacatcgacaactccatgaagatcccgctgaacaatggggcaggctgccgcttcgaggggcagttcagcatcaacaaggtccccggcaacttccacgtgtccacacacagtgccacagcccagccacagaacccagacatgacgcatgtcatccacaagctctcctttggggacacgctacaggtccagaacatccacggagctttcaatgctctcgggggagcagacagactcacctccaaccccctggcctcccacgactacatcctgaagattgtgcccacggtttatgaggacaagagtggcaagcagcggtactcctaccagtacacggtggccaacaaggaatacgtcgcctacagccacacgggccgcatcatccctgcaatctggttccgctacgacctcagccccatcacggtcaagtacacagagagacggcagccgctgtacagattcatcaccacgatctgtgccatcattggcgggaccttcaccgtcgccggcatcctggactcatgcatcttcacagcctctgaggcctggaagaagatccagctgggcaagatgcattgacgccacacccagcctaatggccgaggaccctgggcatcgccagccttgcctccagtgccctgtctcctttggccctcaatctggtcccaaatctggctgtgtcccaaagggtgtgtgggaagtggggggaaagtagaggatggctcgatgttttgcagctacctcttttccccgtgtttctttttagacaaattacactgcctgaagttgcagttcccctttccctggggagccccaagaacagagtcaggcaaggggtggggagtccagggatcttggggacccctcctaggagagctgcagtctcttccctcaggggaacatcccagaatgcatatcgatcagctctcagccaggcttcgacaatctcgcagcccccactaggtggacacattaatgatttggtttctcccctgggcagccaacctgccccagaggcaccagacctgggctttcagctttgggaccaggctgcccaaaggtactcctttatacacccggcaccttccacgaaagatggtacttcccaagcaagcccctatgatttgtcactatagatggaaccctgacttctgccccatcccttcctgcccaacctagaacccaggcctcaagtctttaccccacccctttcttgttcttccaagaagcagatgcccagttgctcagcagcagcggtagagacttgaatctgcccaccagtcacaaggcgggtcacagattcctcttcctctcttctcctcgttcctctgaaccctccaccaatgtgcctcagcctgtgtgctgtgtggcaacagcattctggttcccactgccaagatctcccaccactctgctgggatctgcagtggcagggagtgggggttgtgtaaaggggaagtcatcttttgagatccagatagacatggtttgtgcacttacgtccagatgggaagcatccttcctgcaaccctaaaataatcatgcagcctctcagacggacgccatcggtcccaaggccttaggtggaggaagcaaagcaggccaggcctgtcctgtccgtggacctctaccttctggactccctacgggtgcagagcacttgggtttctctacagccatcgtggcccacttgacactgtgctcctccatcagctggtcacatgccaacacgttcccagcccctgaggcagctccagggtgccccacctgctcctgaggtgggtccctaccctgctgctcctcttcatcctttcccttttgtcctgaaagggaggagcaatggtccaggcattaattccacccagggaattttagctatgccctcatgtcccagggagagagccacacgcctgttttccatttatagcaagattgtttgcatacttttgtaatgaaggggagtgtccagtggaaggatttttaaaattatcttatggatagctcaagtctctgccatttgtaatttttggctctaagctccgattggagacgcttctccttgtgcatgtgagttgactgatgttgtgagtgtaaatgcatttggttatttctggtatcggtggccacttggatggatttttttacattctgttccccagttacaggaaggagtccctttggtgtgtgaatatgtgtgcctgtagagggtggggcagggtggggtggggatggaaatgtgtggcatgcacatgagttgaaattcttttatgcatttttttgaagaaaaaaaaaaaaaaacaactctgaggacataggggatgtcagtttcctatggaagagacacctctgacccgttattcttataatcaaaatctgaagggaaaaaaatgttttagttctttccccactcgttgggttcaactagattaaaaggctgattttcagaaa

SEQ ID NO: 360627 - DNA, 2757 bp, Homo sapiens
cggtccaggctggaccattgacgctgaactgccctcgaagtcggcagctgccccattgttcagcgggatcttcatggagttgtcgatgtggccattatctccatctgctgctgcctcttcatcctcttcctcttcctctcggagctcaccggatttataacgacagaagttgtgaacgagctctatgtcgatgacccagacaaggacagcggtggcaagatcgacgtcagtctgaacatcagtttacccaatctgcactgcgagttggttgggcttgacattcaggatgagatgggcaggcacgaagtgggccacatcgacaactccatgaagatcccgctgaacaatggggcaggctgccgcttcgaggggcagttcagcatcaacaaggtccccggcaacttccacgtgtccacacacagtgccacagcccagccacagaacccagacatgacgcatgtcatccacaagctctcctttggggacacgctacaggtccagaacatccacggagctttcaatgctctcgggggagcagacagactcacctccaaccccctggcctcccacgactacatcctgaagattgtgcccacggtttatgaggacaagagtggcaagcagcggtactcctaccagtacacggtggccaacaaggaatacgtcgcctacagccacacgggccgcatcatccctgcaatctggttccgctacgacctcagccccatcacggtcaagtacacagagagacggcagccgctgtacagattcatcaccacgatctgtgccatcattggcgggaccttcaccgtcgccggcatcctggactcatgcatcttcacagcctctgaggcctggaagaagatccagctgggcaagatgcattgacgccacacccagcctaatggccgaggaccctgggcatcgccagccttgcctccagtgccctgtctcctttggccctcaatctggtcccaaatctggctgtgtcccaaagggtgtgtgggaagtggggggaaagtagaggatggctcgatgttttgcagctacctcttttccccgtgtttctttttagacaaattacactgcctgaagttgcagttcccctttccctggggagccccaagaacagagtcaggcaaggggtggggagtccagggatcttggggacccctcctaggagagctgcagtctcttccctcaggggaacatcccagaatgcatatcgatcagctctcagccaggcttcgacaatctcgcagcccccactaggtggacacattaatgatttggtttctcccctgggcagccaacctgccccagaggcaccagacctgggctttcagctttgggaccaggctgcccaaaggtactcctttatacacccggcaccttccacgaaagatggtacttcccaagcaagcccctatgatttgtcactatagatggaaccctgacttctgccccatcccttcctgcccaacctagaacccaggcctcaagtctttaccccacccctttcttgttcttccaagaagcagatgcccagttgctcagcagcagcggtagagacttgaatctgcccaccagtcacaaggcgggtcacagattcctcttcctctcttctcctcgttcctctgaaccctccaccaatgtgcctcagcctgtgtgctgtgtggcaacagcattctggttcccactgccaagatctcccaccactctgctgggatctgcagtggcagggagtgggggttgtgtaaaggggaagtcatcttttgagatccagatagacatggtttgtgcacttacgtccagatgggaagcatccttcctgcaaccctaaaataatcatgcagcctctcagacggacgccatcggtcccaaggccttaggtggaggaagcaaagcaggccaggcctgtcctgtccgtggacctctaccttctggactccctacgggtgcagagcacttgggtttctctacagccatcgtggcccacttgacactgtgctcctccatcagctggtcacatgccaacacgttcccagcccctgaggcagctccagggtgccccacctgctcctgaggtgggtccctaccctgctgctcctcttcatcctttcccttttgtcctgaaagggaggagcaatggtccaggcattaattccacccagggaattttagctatgccctcatgtcccagggagagagccacacgcctgttttccatttatagcaagattgtttgcatacttttgtaatgaaggggagtgtccagtggaaggatttttaaaattatcttatggatagctcaagtctctgccatttgtaatttttggctctaagctccgattggagacgcttctccttgtgcatgtgagttgactgatgttgtgagtgtaaatgcatttggttatttctggtatcggtggccacttggatggatttttttacattctgttccccagttacaggaaggagtccctttggtgtgtgaatatgtgtgcctgtagagggtggggcagggtggggtggggatggaaatgtgtggcatgcacatgagttgaaattcttttatgcatttttttgaagaaaaaaaaaaaaaaacaactctgaggacataggggatgtcagtttcctatggaagagacacctctgacccgttattcttataatcaaaatctgaagggaaaaaaatgttttagttctttccccactcgttgggttcaactagattaaaaggctgattttcagaaa

SEQ ID NO: 360628 - DNA, 2888 bp, Homo sapiens
cgggcgggcggcgcccaatgggctgcgcggagcgtcacttcccggcagcgggaggcgagtggcgagtggcgagtggcgagtgtcaggggggcggccggcgggggcggggcggccggaggaggcgttggcagcgggctcggacccacgcggcgccgcggcccgcctggcctgcagcgctcccacccccggcggcggcacgatgccctttgacttcaggaggtttgacatctacaggaaggtgcccaaggaccttacgcagccaacgtacaccggggccattatctccatctgctgctgcctcttcatcctcttcctcttcctctcggagctcaccggatttataacgacagaagttgtgaacgagctctatgtcgatgacccagacaaggacagcggtggcaagatcgacgtcagtctgaacatcagtttacccaatctgcactgcgagttggttgggcttgacattcaggatgagatgggcaggcacgaagtgggccacatcgacaactccatgaagatcccgctgaacaatggggcaggctgccgcttcgaggggcagttcagcatcaacaaggtccccggcaacttccacgtgtccacacacagtgccacagcccagccacagaacccagacatgacgcatgtcatccacaagctctcctttggggacacgctacaggtccagaacatccacggagctttcaatgctctcgggggagcagacagactcacctccaaccccctggcctcccacgactacatcctgaagattgtgcccacggtttatgaggacaagagtggcaagcagcggtactcctaccagtacacggtggccaacaaggaatacgtcgcctacagccacacgggccgcatcatccctgcaatctggttccgctacgacctcagccccatcacggtcaagtacacagagagacggcagccgctgtacagattcatcaccacgatctgtgccatcattggcgggaccttcaccgtcgccggcatcctggactcatgcatcttcacagcctctgaggcctggaagaagatccagctgggcaagatgcattgacgccacacccagcctaatggccgaggaccctgggcatcgccagccttgcctccagtgccctgtctcctttggccctcaatctggtcccaaatctggctgtgtcccaaagggtgtgtgggaagtggggggaaagtagaggatggctcgatgttttgcagctacctcttttccccgtgtttctttttagacaaattacactgcctgaagttgcagttcccctttccctggggagccccaagaacagagtcaggcaaggggtggggagtccagggatcttggggacccctcctaggagagctgcagtctcttccctcaggggaacatcccagaatgcatatcgatcagctctcagccaggcttcgacaatctcgcagcccccactaggtggacacattaatgatttggtttctcccctgggcagccaacctgccccagaggcaccagacctgggctttcagctttgggaccaggctgcccaaaggtactcctttatacacccggcaccttccacgaaagatggtacttcccaagcaagcccctatgatttgtcactatagatggaaccctgacttctgccccatcccttcctgcccaacctagaacccaggcctcaagtctttaccccacccctttcttgttcttccaagaagcagatgcccagttgctcagcagcagcggtagagacttgaatctgcccaccagtcacaaggcgggtcacagattcctcttcctctcttctcctcgttcctctgaaccctccaccaatgtgcctcagcctgtgtgctgtgtggcaacagcattctggttcccactgccaagatctcccaccactctgctgggatctgcagtggcagggagtgggggttgtgtaaaggggaagtcatcttttgagatccagatagacatggtttgtgcacttacgtccagatgggaagcatccttcctgcaaccgtggaggaagcaaagcaggccaggcctgtcctgtccgtggacctctaccttctggactccctacgggtgcagagcacttgggtttctctacagccatcgtggcccacttgacactgtgctcctccatcagctggtcacatgccaacacgttcccagcccctgaggcagctccagggtgccccacctgctcctgaggtgggtccctaccctgctgctcctcttcatcctttcccttttgtcctgaaagggaggagcaatggtccaggcattaattccacccagggaattttagctatgccctcatgtcccagggagagagccacacgcctgttttccatttatagcaagattgtttgcatacttttgtaatgaaggggagtgtccagtggaaggatttttaaaattatcttatggatagctcaagtctctgccatttgtaatttttggctctaagctccgattggagacgcttctccttgtgcatgtgagttgactgatgttgtgagtgtaaatgcatttggttatttctggtatcggtggccacttggatggatttttttacattctgttccccagttacaggaaggagtccctttggtgtgtgaatatgtgtgcctgtagagggtggggcagggtggggtggggatggaaatgtgtggcatgcacatgagttgaaattcttttatgcatttttttgaagaaaaaaaaaaaaaaacaactctgaggacataggggatgtcagtttcctatggaagagacacctctgacccgttattcttataatcaaaatctgaagggaaaaaaatgttttagttctttccccactcgttgggttcaactagattaaaaggctgattttcagaaa

SEQ ID NO: 360629 - DNA, 3162 bp, Homo sapiens
cgggcgggcggcgcccaatgggctgcgcggagcgtcacttcccggcagcgggaggcgagtggcgagtggcgagtggcgagtgtcaggggggcggccggcgggggcggggcggccggaggaggcgttggcagcgggctcggacccacgcggcgccgcggcccgcctggcctgcagcgctcccacccccggcggcggcacgatgccctttgacttcaggaggtttgacatctacaggaaggtgcccaaggaccttacgcagccaacgtacaccggggccattatctccatctgctgctgcctcttcatcctcttcctcttcctctcggagctcaccggatttataacgacagaagttgtgaacgagctctatgtcgatgacccagacaaggacagcggtggcaagatcgacgtcagtctgaacatcagtttacccaatctgcactgcgagttggttgggcttgacattcaggatgagatgggcaggcacgaagtgggccacatcgacaactccatgaagatcccgctgaacaatggggcaggctgccgcttcgaggggcagttcagcatcaacaaggaagttgaccagcagccagatgtcagagtttgcgtgttttgagcagcagcggcagcctcaccagagaccccacggtgacctcgtttcatcagccagccccgcaggaggaggacaggatgggacatgcttacaaaatcagactttgatgggctgctgcacgataagctatattccctcctcggacacagctcgcacagtcttcttcattgggctggaataaggtccccggcaacttccacgtgtccacacacagtgccacagcccagccacagaacccagacatgacgcatgtcatccacaagctctcctttggggacacgctacaggtccagaacatccacggagctttcaatgctctcgggggagcagacagactcacctccaaccccctggcctcccacgactacatcctgaagattgtgcccacggtttatgaggacaagagtggcaagcagcggtactcctaccagtacacggtggccaacaaggaatacgtcgcctacagccacacgggccgcatcatccctgcaatctggttccgctacgacctcagccccatcacggtcaagtacacagagagacggcagccgctgtacagattcatcaccacgatctgtgccatcattggcgggaccttcaccgtcgccggcatcctggactcatgcatcttcacagcctctgaggcctggaagaagatccagctgggcaagatgcattgacgccacacccagcctaatggccgaggaccctgggcatcgccagccttgcctccagtgccctgtctcctttggccctcaatctggtcccaaatctggctgtgtcccaaagggtgtgtgggaagtggggggaaagtagaggatggctcgatgttttgcagctacctcttttccccgtgtttctttttagacaaattacactgcctgaagttgcagttcccctttccctggggagccccaagaacagagtcaggcaaggggtggggagtccagggatcttggggacccctcctaggagagctgcagtctcttccctcaggggaacatcccagaatgcatatcgatcagctctcagccaggcttcgacaatctcgcagcccccactaggtggacacattaatgatttggtttctcccctgggcagccaacctgccccagaggcaccagacctgggctttcagctttgggaccaggctgcccaaaggtactcctttatacacccggcaccttccacgaaagatggtacttcccaagcaagcccctatgatttgtcactatagatggaaccctgacttctgccccatcccttcctgcccaacctagaacccaggcctcaagtctttaccccacccctttcttgttcttccaagaagcagatgcccagttgctcagcagcagcggtagagacttgaatctgcccaccagtcacaaggcgggtcacagattcctcttcctctcttctcctcgttcctctgaaccctccaccaatgtgcctcagcctgtgtgctgtgtggcaacagcattctggttcccactgccaagatctcccaccactctgctgggatctgcagtggcagggagtgggggttgtgtaaaggggaagtcatcttttgagatccagatagacatggtttgtgcacttacgtccagatgggaagcatccttcctgcaaccctaaaataatcatgcagcctctcagacggacgccatcggtcccaaggccttaggtggaggaagcaaagcaggccaggcctgtcctgtccgtggacctctaccttctggactccctacgggtgcagagcacttgggtttctctacagccatcgtggcccacttgacactgtgctcctccatcagctggtcacatgccaacacgttcccagcccctgaggcagctccagggtgccccacctgctcctgaggtgggtccctaccctgctgctcctcttcatcctttcccttttgtcctgaaagggaggagcaatggtccaggcattaattccacccagggaattttagctatgccctcatgtcccagggagagagccacacgcctgttttccatttatagcaagattgtttgcatacttttgtaatgaaggggagtgtccagtggaaggatttttaaaattatcttatggatagctcaagtctctgccatttgtaatttttggctctaagctccgattggagacgcttctccttgtgcatgtgagttgactgatgttgtgagtgtaaatgcatttggttatttctggtatcggtggccacttggatggatttttttacattctgttccccagttacaggaaggagtccctttggtgtgtgaatatgtgtgcctgtagagggtggggcagggtggggtggggatggaaatgtgtggcatgcacatgagttgaaattcttttatgcatttttttgaagaaaaaaaaaaaaaaacaactctgaggacataggggatgtcagtttcctatggaagagacacctctgacccgttattcttataatcaaaatctgaagggaaaaaaatgttttagttctttccccactcgttgggttcaactagattaaaaggctgattttcagaaa

SEQ ID NO: 360630 - DNA, 3051 bp, Homo sapiens
cgggcgggcggcgcccaatgggctgcgcggagcgtcacttcccggcagcgggaggcgagtggcgagtggcgagtggcgagtgtcaggggggcggccggcgggggcggggcggccggaggaggcgttggcagcgggctcggacccacgcggcgccgcggcccgcctggcctgcagcgctcccacccccggcggcggcacgatgccctttgacttcaggaggtttgacatctacaggaaggtgcccaaggaccttacgcagccaacgtacaccggggccattatctccatctgctgctgcctcttcatcctcttcctcttcctctcggagctcaccggatttataacgacagaagttgtgaacgagctctatgtcgatgacccagacaaggacagcggtggcaagatcgacgtcagtctgaacatcagtttacccaatctgcactgcgagttggttgggcttgacattcaggatgagatgggcaggcacgaagtgggccacatcgacaactccatgaagatcccgctgaacaatggggcaggctgccgcttcgaggggcagttcagcatcaacaaggtccccggcaacttccacgtgtccacacacagtgccacagcccagccacagaacccagacatgacgcatgtcatccacaagctctcctttggggacacgctacaggtccagaacatccacggagctttcaatgctctcgggggagcagacagactcacctccaaccccctggcctcccacgactacatcctgaagattgtgcccacggtttatgaggacaagagtggcaagcagcggtactcctaccagtacacggtggccaacaaggaatacgtcgcctacagccacacgggccgcatcatccctgcaatctggttccgctacgacctcagccccatcacggtcaagtacacagagagacggcagccgctgtacagattcatcaccacgatctgtgccatcattggcgggaccttcaccgtcgccggcatcctggactcatgcatcttcacagcctctgaggcctggaagaagatccagctgggcaagatgcattgacgccacacccagcctaatggccgaggaccctgggcatcgccagccttgcctccagtgccctgtctcctttggccctcaatctggtcccaaatctggctgtgtcccaaagggtgtgtgggaagtggggggaaagtagaggatggctcgatgttttgcagctacctcttttccccgtgtttctttttagacaaattacactgcctgaagttgcagttcccctttccctggggagccccaagaacagagtcaggcaaggggtggggagtccagggatcttggggacccctcctaggagagctgcagtctcttccctcaggggaacatcccagaatgcatatcgatcagctctcagccaggcttcgacaatctcgcagcccccactaggtggacacattaatgatttggtttctcccctgggcagccaacctgccccagaggcaccagacctgggctttcagctttgggaccaggctgcccaaaggtactcctttatacacccggcaccttccacgaaagatggtacttcccaagcaagcccctatgatttgtcactatagatggaaccctgacttctgccccatcccttcctgcccaacctagaacccaggcctcaagtctttaccccacccctttcttgttcttccaagaagcagatgcccagttgctcagcagcagcggtagagacttgaatctgcccaccagtcacaaggcgggtcacagattcctcttcctctcttctcctcgttcctctgaaccctccaccaatgtgcctcagcctgtgtgctgtgtggcaacagcattctggttcccactgccaagatctcccaccactctgctgggatctgcagtggcagggagtgggggttgtgtaaaggggaagtcatcttttgagatccagatagacatggtttgtgcacttacgtccagatgggaagcatccttcctgcaaccctaaaataatcatgcagcctctcagacggacgccatcggtcccaaggccttaggtggaggaagcaaagcaggccaggcctgtcctgtccgtggacctctaccttctggactccctacgggtgcagagcacttgggtttctctacagccatcgtggcccatcgacaactccatgaagatcccgctgtacagattcatcaccacgatctgtgccatcattggcgggaccttcaccgtcgccggcatcctggactcatgcatcttcacagcctctgaggcctggaagaagatccagctggtcacatgccaacacgttcccagcccctgaggcagctccagggtgccccacctgctcctgaggtgggtccctaccctgctgctcctcttcatcctttcccttttgtcctgaaagggaggagcaatggtccaggcattaattccacccagggaattttagctatgccctcatgtcccagggagagagccacacgcctgttttccatttatagcaagattgtttgcatacttttgtaatgaaggggagtgtccagtggaaggatttttaaaattatcttatggatagctcaagtctctgccatttgtaatttttggctctaagctccgattggagacgcttctccttgtgcatgtgagttgactgatgttgtgagtgtaaatgcatttggttatttctggtatcggtggccacttggatggatttttttacattctgttccccagttacaggaaggagtccctttggtgtgtgaatatgtgtgcctgtagagggtggggcagggtggggtggggatggaaatgtgtggcatgcacatgagttgaaattcttttatgcatttttttgaagaaaaaaaaaaaaaaacaactctgaggacataggggatgtcagtttcctatggaagagacacctctgacccgttattcttataatcaaaatctgaagggaaaaaaatgttttagttctttccccactcgttgggttcaactagattaaaaggctgattttcagaaa

SEQ ID NO: 360631 - DNA, 2703 bp, Homo sapiens
tcagcaaagcataacacgagaaatcagtttcaactggagaatgggtcttggggggcaaggttagtccttctgagcaagaggcatttgaaagatgcttggctataagcaaagtcagtctctcagaggggagggagggggctccaggaagggctgacacaggcagaactgcgggatggcactgaagatgcacaccaggaaggcagttcagacaacaggctccaactcagggaccactgtgccctaaagttccatgttccaacagttcccaggctagtccaggccactgaccacagcccatcagaccacccagggtcccaagcacacaagcctaacgctgtccccggcaacttccacgtgtccacacacagtgccacagcccagccacagaacccagacatgacgcatgtcatccacaagctctcctttggggacacgctacaggtccagaacatccacggagctttcaatgctctcgggggagcagacagactcacctccaaccccctggcctcccacgactacatcctgaagattgtgcccacggtttatgaggacaagagtggcaagcagcggtactcctaccagtacacggtggccaacaaggaatacgtcgcctacagccacacgggccgcatcatccctgcaatctggttccgctacgacctcagccccatcacggtcaagtacacagagagacggcagccgctgtacagattcatcaccacgatctgtgccatcattggcgggaccttcaccgtcgccggcatcctggactcatgcatcttcacagcctctgaggcctggaagaagatccagctgggcaagatgcattgacgccacacccagcctaatggccgaggaccctgggcatcgccagccttgcctccagtgccctgtctcctttggccctcaatctggtcccaaatctggctgtgtcccaaagggtgtgtgggaagtggggggaaagtagaggatggctcgatgttttgcagctacctcttttccccgtgtttctttttagacaaattacactgcctgaagttgcagttcccctttccctggggagccccaagaacagagtcaggcaaggggtggggagtccagggatcttggggacccctcctaggagagctgcagtctcttccctcaggggaacatcccagaatgcatatcgatcagctctcagccaggcttcgacaatctcgcagcccccactaggtggacacattaatgatttggtttctcccctgggcagccaacctgccccagaggcaccagacctgggctttcagctttgggaccaggctgcccaaaggtactcctttatacacccggcaccttccacgaaagatggtacttcccaagcaagcccctatgatttgtcactatagatggaaccctgacttctgccccatcccttcctgcccaacctagaacccaggcctcaagtctttaccccacccctttcttgttcttccaagaagcagatgcccagttgctcagcagcagcggtagagacttgaatctgcccaccagtcacaaggcgggtcacagattcctcttcctctcttctcctcgttcctctgaaccctccaccaatgtgcctcagcctgtgtgctgtgtggcaacagcattctggttcccactgccaagatctcccaccactctgctgggatctgcagtggcagggagtgggggttgtgtaaaggggaagtcatcttttgagatccagatagacatggtttgtgcacttacgtccagatgggaagcatccttcctgcaaccctaaaataatcatgcagcctctcagacggacgccatcggtcccaaggccttaggtggaggaagcaaagcaggccaggcctgtcctgtccgtggacctctaccttctggactccctacgggtgcagagcacttgggtttctctacagccatcgtggcccacttgacactgtgctcctccatcagctggtcacatgccaacacgttcccagcccctgaggcagctccagggtgccccacctgctcctgaggtgggtccctaccctgctgctcctcttcatcctttcccttttgtcctgaaagggaggagcaatggtccaggcattaattccacccagggaattttagctatgccctcatgtcccagggagagagccacacgcctgttttccatttatagcaagattgtttgcatacttttgtaatgaaggggagtgtccagtggaaggatttttaaaattatcttatggatagctcaagtctctgccatttgtaatttttggctctaagctccgattggagacgcttctccttgtgcatgtgagttgactgatgttgtgagtgtaaatgcatttggttatttctggtatcggtggccacttggatggatttttttacattctgttccccagttacaggaaggagtccctttggtgtgtgaatatgtgtgcctgtagagggtggggcagggtggggtggggatggaaatgtgtggcatgcacatgagttgaaattcttttatgcatttttttgaagaaaaaaaaaaaaaaacaactctgaggacataggggatgtcagtttcctatggaagagacacctctgacccgttattcttataatcaaaatctgaagggaaaaaaatgttttagttctttccccactcgttgggttcaactagattaaaaggctgattttcagaaa

SEQ ID NO: 360632 - DNA, 2426 bp, Homo sapiens
cagtctgaacatccgtttacccaatctgccgcttcgaggggcagttcagcatcaacaaggtccccggcaacttccacgtgtccacacacagtgccacagcccagccacagaacccagacatgacgcatgtcatccacaagctctcctttggggacacgctacaggtccagaacatccacggagctttcaatgctctcgggggagcagacagactcacctccaaccccctggcctcccacgactacatcctgaagattgtgcccacggtttatgaggacaagagtggcaagcagcggtactcctaccagtacacggtggccaacaaggaatacgtcgcctacagccacacgggccgcatcatccctgcaatctggttccgctacgacctcagccccatcacggtcaagtacacagagagacggcagccgctgtacagattcatcaccacgatctgtgccatcattggcgggaccttcaccgtcgccggcatcctggactcatgcatcttcacagcctctgaggcctggaagaagatccagctgggcaagatgcattgacgccacacccagcctaatggccgaggaccctgggcatcgccagccttgcctccagtgccctgtctcctttggccctcaatctggtcccaaatctggctgtgtcccaaagggtgtgtgggaagtggggggaaagtagaggatggctcgatgttttgcagctacctcttttccccgtgtttctttttagacaaattacactgcctgaagttgcagttcccctttccctggggagccccaagaacagagtcaggcaaggggtggggagtccagggatcttggggacccctcctaggagagctgcagtctcttccctcaggggaacatcccagaatgcatatcgatcagctctcagccaggcttcgacaatctcgcagcccccactaggtggacacattaatgatttggtttctcccctgggcagccaacctgccccagaggcaccagacctgggctttcagctttgggaccaggctgcccaaaggtactcctttatacacccggcaccttccacgaaagatggtacttcccaagcaagcccctatgatttgtcactatagatggaaccctgacttctgccccatcccttcctgcccaacctagaacccaggcctcaagtctttaccccacccctttcttgttcttccaagaagcagatgcccagttgctcagcagcagcggtagagacttgaatctgcccaccagtcacaaggcgggtcacagattcctcttcctctcttctcctcgttcctctgaaccctccaccaatgtgcctcagcctgtgtgctgtgtggcaacagcattctggttcccactgccaagatctcccaccactctgctgggatctgcagtggcagggagtgggggttgtgtaaaggggaagtcatcttttgagatccagatagacatggtttgtgcacttacgtccagatgggaagcatccttcctgcaaccctaaaataatcatgcagcctctcagacggacgccatcggtcccaaggccttaggtggaggaagcaaagcaggccaggcctgtcctgtccgtggacctctaccttctggactccctacgggtgcagagcacttgggtttctctacagccatcgtggcccacttgacactgtgctcctccatcagctggtcacatgccaacacgttcccagcccctgaggcagctccagggtgccccacctgctcctgaggtgggtccctaccctgctgctcctcttcatcctttcccttttgtcctgaaagggaggagcaatggtccaggcattaattccacccagggaattttagctatgccctcatgtcccagggagagagccacacgcctgttttccatttatagcaagattgtttgcatacttttgtaatgaaggggagtgtccagtggaaggatttttaaaattatcttatggatagctcaagtctctgccatttgtaatttttggctctaagctccgattggagacgcttctccttgtgcatgtgagttgactgatgttgtgagtgtaaatgcatttggttatttctggtatcggtggccacttggatggatttttttacattctgttccccagttacaggaaggagtccctttggtgtgtgaatatgtgtgcctgtagagggtggggcagggtggggtggggatggaaatgtgtggcatgcacatgagttgaaattcttttatgcatttttttgaagaaaaaaaaaaaaaaacaactctgaggacataggggatgtcagtttcctatggaagagacacctctgacccgttattcttataatcaaaatctgaagggaaaaaaatgttttagttctttccccactcgttgggttcaactagattaaaaggctgattttcagaaa

SEQ ID NO: 360633 - DNA, 2901 bp, Homo sapiens
cgggcgggcggcgcccaatgggctgcgcggagcgtcacttcccggcagcgggaggcgagtggcgagtggcgagtggcgagtgtcaggggggcggccggcgggggcggggcggccggaggaggcgttggcagcgggctcggacccacgcggcgccgcggcccgcctggcctgcagcgctcccacccccggcggcggcacgatgccctttgacttcaggaggtttgacatctacaggaaggtgcccaaggaccttacgcagccaacgtacaccggggccattatctccatctgctgctgcctcttcatcctcttcctcttcctctcggagctcaccggatttataacgacagaagttgtgaacgagctctatgtcgatgacccagacaaggacagcggtggcaagatcgacgtcagtctgaacatcagtttacccaatctgcactgcgagttggttgggcttgacattcaggatgagatgggcaggcacgaagtgggccacatcgacaactccatgaagatcccgctgaacaatggggcaggctgccgcttcgaggggcagttcagcatcaacaaggtccccggcaacttccacgtgtccacacacagtgccacagcccagccacagaacccagacatgacgcatgtcatccacaagctctcctttggggacacgctacaggtccagaacatccacggagctttcaatgctctcgggggagcagacagactcacctccaaccccctggcctcccacgactacatcctgaagattgtgcccacggtttatgaggacaagagtggcaagcagcggtactcctaccagtacacggtggccaacaaggaatacgtcgcctacagccacacgggccgcatcatccctgcaatctggttccgctacgacctcagccccatcacggtcaagtacacagagagacggcagccgctgtacagattcatcaccacgatctgtgccatcattggcgggaccttcaccgtcgccggcatcctggactcatgcatcttcacagcctctgaggcctggaagaagatccagctgggcaagatgcattgacgccacacccagcctaatggccgaggaccctgggcatcgccagccttgcctccagtgccctgtctcctttggccctcaatctggtcccaaatctggctgtgtcccaaagggtgtgtgggaagtggggggaaagtagaggatggctcgatgttttgcagctacctcttttccccgtgtttctttttagacaaattacactgcctgaagttgcagttcccctttccctggggagccccaagaacagagtcaggcaaggggtggggagtccagggatcttggggacccctcctaggagagctgcagtctcttccctcaggggaacatcccagaatgcatatcgatcagctctcagccaggcttcgacaatctcgcagcccccactaggtggacacattaatgatttggtttctcccctgggcagccaacctgccccagaggcaccagacctgggctttcagctttgggaccaggctgcccaaaggtactcctttatacacccggcaccttccacgaaagatggtacttcccaagcaagcccctatgatttgtcactatagatggaaccctgacttctgccccatcccttcctgcccaacctagaacccaggcctcaagtctttaccccacccctttcttgttcttccaagaagcagatgcccagttgctcagcagcagcggtagagacttgaatctgcccaccagtcacaaggcgggtcacagattcctcttcctctcttctcctcgttcctctgaaccctccaccaatgtgcctcagcctgtgtgctgtgtggcaacagcattctggttcccactgccaagatctcccaccactctgctgggatctgcagtggcagggagtgggggttgtgtaaaggggaagtcatcttttgagatccagatagacatggtttgtgcacttacgtccagatgggaagcatccttcctgcaaccctaaaataatcatgcagcctctcagacggacgccatcggtcccaaggccttaggtggaggaagcaaagcaggccaggcctgtcctgtccgtggacctctaccttctggactccctaccacttgacactgtgctcctccatcagctggtcacatgccaacacgttcccagcccctgaggcagctccagggtgccccacctgctcctgaggtgggtccctaccctgctgctcctcttcatcctttcccttttgtcctgaaagggaggagcaatggtccaggcattaattccacccagggaattttagctatgccctcatgtcccagggagagagccacacgcctgttttccatttatagcaagattgtttgcatacttttgtaatgaaggggagtgtccagtggaaggatttttaaaattatcttatggatagctcaagtctctgccatttgtaatttttggctctaagctccgattggagacgcttctccttgtgcatgtgagttgactgatgttgtgagtgtaaatgcatttggttatttctggtatcggtggccacttggatggatttttttacattctgttccccagttacaggaaggagtccctttggtgtgtgaatatgtgtgcctgtagagggtggggcagggtggggtggggatggaaatgtgtggcatgcacatgagttgaaattcttttatgcatttttttgaagaaaaaaaaaaaaaaacaactctgaggacataggggatgtcagtttcctatggaagagacacctctgacccgttattcttataatcaaaatctgaagggaaaaaaatgttttagttctttccccactcgttgggttcaactagattaaaaggctgattttcagaaa

SEQ ID NO: 360634 - DNA, 2336 bp, Homo sapiens
cgggcgggcggcgcccaatgggctgcgcggagcgtcacttcccggcagcgggaggcgagtggcgagtggcgagtggcgagtgtcaggggggcggccggcgggggcggggcggccggaggaggcgttggcagcgggctcggacccacgcggcgccgcggcccgcctggcctgcagcgctcccacccccggcggcggcacgatgccctttgacttcaggaggtttgacatctacaggaaggtgcccaaggaccttacgcagccaacgtacaccggggccattatctccatctgctgctgcctcttcatcctcttcctcttcctctcggagctcaccggatttataacgacagaagttgtgaacgagctctatgtcgatgacccagacaaggacagcggtggcaagatcgacgtcagtctgaacatcagtttacccaatctgcactgcgagttggttgggcttgacattcaggatgagatgggcaggcacgaagtgggccacatcgacaactccatgaagatcccgctgaacaatggggcaggctgccgcttcgaggggcagttcagcatcaacaaggtccccggcaacttccacgtgtccacacacagtgccacagcccagccacagaacccagacatgacgcatgtcatccacaagctctcctttggggacacgctacaggtccagaacatccacggagctttcaatgctctcgggggagcagacagactcacctccaaccccctggcctcccacgactacatcctgaagattgtgcccacggtttatgaggacaagagtggcaagcagcggtactcctaccagtacacggtggccaacaaggaatacgtcgcctacagccacacgggccgcatcatccctgcaatctggttccgctacgacctcagccccatcacggtcaagtacacagagagacggcagccgctgtacagattcatcaccacgatctgtgccatcattggcgggaccttcaccgtcgccggcatcctggactcatgcatcttcacagcctctgaggcctggaagaagatccagctgggcaagatgcattgacgccacacccagcctaatggccgaggaccctgggcatcgccagccttgcctccagtgccctgtctcctttggccctcaatctggtcccaaatctggctgtgtcccaaagggtgtgtgggaagtggggggaaagtagaggatggctcgatgttttgcagctacctcttttccccgtgtttctttttagacaaattacactgcctgaagttgcagttcccctttccctggggagccccaagaacagagtcaggcaaggggtggggagtccagggatcttggggacccctcctaggagagctgcagtctcttccctcaggggaacatcccagaatgcatatcgatcagctctcagccaggcttcgacaatctcgcagcccccactaggtggacacattaatgatttggtttctcccctgggcagccaacctgccccagaggcaccagacctgggctttcagctttgggaccaggctgcccaaaggtactcctttatacacccggcaccttccacgaaagatggtacttcccaagcaagcccctatgatttgtcactatagatggaaccctgacttctgccccatcccttcctgcccaacctagaacccaggcctcaagtctttaccccacccctttcttgttcttccaagaagcagatgcccagttgctcagcagcagcggtagagacttgaatctgcccaccagtcacaaggcgggtcacagattcctcttcctctcttctcctcgttcctctgaaccctccaccaatgtgcctcagcctgtgtgctgtgtggcaacagcattctggttcccactgccaagatctcccaccactctgctgggatctgcagtggcagggagtgggggttgtgtaaaggggaagtcatcttttgagatccagatagacatggtttgtgcacttacgtccagatgggaagcatccttcctgcaaccctaaaataatcatgcagcctctcagacggacgccatcggtcccaaggccttaggtggaggaagcaaagcaggccaggcctgtcctgtccgtggacctctaccttctggactccctacgggtgcagagcacttgggtttctctacagccatcgtggcccacttgacactgtgctcctccatcagctggtcacatgccaacacgttcccagcccctgaggcagctccagggtgccccacctgctcctgaggtgggtccctaccctgctgctcctctgcttcttaaggaaccagaaaagggagagggaaccaacca

SEQ ID NO: 360635 - DNA, 1728 bp, Homo sapiens
cgggcgggcggcgcccaatgggctgcgcggagcgtcacttcccggcagcgggaggcgagtggcgagtggcgagtggcgagtgtcaggggggcggccggcgggggcggggcggccggaggaggcgttggcagcgggctcggacccacgcggcgccgcggcccgcctggcctgcagcgctcccacccccggcggcggcacgatgccctttgacttcaggaggtttgacatctacaggaaggtgcccaaggaccttacgcagccaacgtacaccggggccattatctccatctgctgctgcctcttcatcctcttcctcttcctctcggagctcaccggatttataacgacagaagttgtgaacgagctctatgtcgatgacccagacaaggacagcggtggcaagatcgacgtcagtctgaacatcagtttacccaatctgcactgcgagttggttgggcttgacattcaggatgagatgggcaggcacgaagtgggccacatcgacaactccatgaagatcccgctgaacaatggggcaggctgccgcttcgaggggcagttcagcatcaacaaggtccccggcaacttccacgtgtccacacacagtgccacagcccagccacagaacccagacatgacgcatgtcatccacaagctctcctttggggacacgctacaggtccagaacatccacggagctttcaatgctctcgggggagcagacagactcacctccaaccccctggcctcccacgactacatcctgaagattgtgcccacggtttatgaggacaagagtggcaagcagcggtactcctaccagtacacggtggccaacaaggaatacgtcgcctacagccacacgggccgcatcatccctgcaatctggttccgctacgacctcagccccatcacggtcaagtacacagagagacggcagccgctgtacagattcatcaccacgatctgtgccatcattggcgggaccttcaccgtcgccggcatcctggactcatgcatcttcacagcctctgaggcctggaagaagatccagctgggcaagatgcattgacgccacacccagcctaatggccgaggaccctgggcatcgccagccttgcctccagtgccctgtctcctttggccctcaatctggtcccaaatctggctgtgtcccaaagggtgtgtgggaagtggggggaaagtagaggatggctcgatgttttgcagctacctcttttccccgtgtttctttttagacaaattacactgcctgaagttgcagttcccctttccctggggagccccaagaacagagtcaggcaaggggtggggagtccagggatcttggggacccctcctaggagagctgcagtctcttccctcaggggaacatcccagaatgcatatcgatcagctctcagccaggcttcgacaatctcgcagcccccactaggtggacacattaatgatttggtttctcccctgggcagccaacctgccccagaggcaccagacctgggctttcagctttgggaccaggctgcccaaaggtactcctttatacacccggcaccttccacgaaagatggtacttcccaagcaagcccctatgatttgtcactatagatggaaccctgacttctgccccatcccttcagaagatttgtcactcacttacgctgtctggcagctcagccctgatgttggcgatgctgtgagactcga

SEQ ID NO: 360636 - DNA, 882 bp, Homo sapiens
cgggcgggcggcgcccaatgggctgcgcggagcgtcacttcccggcagcgggaggcgagtggcgagtggcgagtggcgagtgtcaggggggcggccggcgggggcggggcggccggaggaggcgttggcagcgggctcggacccacgcggcgccgcggcccgcctggcctgcagcgctcccacccccggcggcggcacgatgccctttgacttcaggaggtttgacatctacaggaaggtgcccaaggaccttacgcagccaacgtacaccggggccattatctccatctgctgctgcctcttcatcctcttcctcttcctctcggagctcaccggatttataacgacagaagttgtgaacgagctctatgtcgatgacccagacaaggacagcggtggcaagatcgacgtcagtctgaacatcagtttacccaatctgcactgcgagttggttgggcttgacattcaggatgagatgggcaggcacgaagtgggccacatcgacaactccatgaagatcccgctgaacaatggggcaggctgccgcttcgaggggcagttcagcatcaacaaggtccccggcaacttccacgtgtccacacacagtgccacagcccagccacagaacccagacatgacgcatgtcatccacaagctctcctttggggacacgctacaggtccagaacatccacggagctttcaatgctctcgggggagcagacagactcacctccaaccccctggcctcccacgactacatcctgaagattgtgcccacggtttatgaggacaagagtggcaagcagcggtactcctaccagtacacggtggccaacaaggtgcgttggcccaacacggtgcgtggcccaaccagtgcgtg

SEQ ID NO: 360637 - DNA, 1473 bp, Homo sapiens
cgggcgggcggcgcccaatgggctgcgcggagcgtcacttcccggcagcgggaggcgagtggcgagtggcgagtggcgagtgtcaggggggcggccggcgggggcggggcggccggaggaggcgttggcagcgggctcggacccacgcggcgccgcggcccgcctggcctgcagcgctcccacccccggcggcggcacgatgccctttgacttcaggaggtttgacatctacaggaaggtgcccaaggaccttacgcagccaacgtacaccggggccattatctccatctgctgctgcctcttcatcctcttcctcttcctctcggagctcaccggatttataacgacagaagttgtgaacgagctctatgtcgatgacccagacaaggacagcggtggcaagatcgacgtcagtctgaacatcagtttacccaatctgcactgcgagttggttgggcttgacattcaggatgagatgggcaggcacgaagtgggccacatcgacaactccatgaagatcccgctgaacaatggggcaggctgccgcttcgaggggcagttcagcatcaacaaggtccccggcaacttccacgtgtccacacacagtgccacagcccagccacagaacccagacatgacgcatgtcatccacaagctctcctttggggacacgctacaggtccagaacatccacggagctttcaatgctctcgggggagcagacagactcacctccaaccctaaccagtgggaaggtggacccagccccgtccagacccagaccctgacggagaaggaagaaggcttgtcccggggcacagcagacgcacgcacgcagtggataccagctattaccattattgttgctctcatcacagccacatcatcatccttagtggaactaattacctaagatcccacagggagctatggcagaaccaggatctgttctgcctccaggtcgcaccgtgagaacaggtctgtgggtggcccagtcagctgtgaccacatggctgcctcccccacacctcactctcctcctgctcagactcctcccatcgacagtggctcctcctagagtcctcgccctccttagctcctggcaccttggcccagatcaaagagaaccgcacatctccacacgcagacaggagagcacgcatacctttcgtgcacaccaacacacatgagctcacatggccccagacacgtgcacagaatgggcccgggaggcctgtgtgctcaagcagacctgcagacccactgctgcacagggtacctggatttttcttatttcctcacctgagctcaccttttaacccacatcttttcttattatttcctgaaatgcgtttgctctcccattgtcagggatccaaggcaaagaaaacatccctctgtgacctgcccccccgacaaatcgaacctcatttttctgtgtccctgtgagtccttgtccataagcagaactca

SEQ ID NO: 360638 - DNA, 847 bp, Homo sapiens
cgggcgggcggcgcccaatgggctgcgcggagcgtcacttcccggcagcgggaggcgagtggcgagtggcgagtggcgagtgtcaggggggcggccggcgggggcggggcggccggaggaggcgttggcagcgggctcggacccacgcggcgccgcggcccgcctggcctgcagcgctcccacccccggcggcggcacgatgccctttgacttcaggaggtttgacatctacaggaaggtgcccaaggaccttacgcagccaacgtacaccggggccattatctccatctgctgctgcctcttcatcctcttcctcttcctctcggagctcaccggatttataacgacagaagttgtgaacgagctctatgtcgatgacccagacaaggacagcggtggcaagatcgacgtcagtctgaacatcagtttacccaatctgcactgcgagttggttgggcttgacattcaggatgagatgggcaggcacgaagtgggccacatcgacaactccatgaagatcccgctgaacaatggggcaggctgccgcttcgaggggcagttcagcatcaacaagtctgtgtcacaggggcttggccaaggccagattcttgtctgctcatctccccagttccggcatctcctgaaggactggcgccatgtggccatcagcccaggctgcggaggtagatggcatccaggcatcagaggagggagcagtgcgtccaacagacgtgagctgagactgcagctctcgacatgtgaccttagcaagtttcttcactgctctgagcctccattttcttttctgtaaaatgggaattatcagatgacaaagtcaaaggattca

SEQ ID NO: 360639 - DNA, 636 bp, Homo sapiens
ccgtgttatgaagttttgcccaatggaatgtggtgaaagtgatcatgtagttgttttaagcgtaacctttaagaagtcttgcatgcttccacttgcttttctgggatcctgctcagctgctatagaacaaacctgggctagcctactgggagatgagattatgtggagcagcagtgagccatctgtcttagaatagccgacacttagccaacctagcaactgggggaaaatatgcgggaatgagtccaacagagaccagaagaattgcccagcggagcccagcccaaatagccaatctatagcattgtgacccaaataaatgcatgttgttttaagaccaaaaaaaggaaaagagaggtggggtgcagtggctcatgcctgtaatcctagcactttgggaggttgaggtggatgggtcacctgaggtcaggagttcaagaccagcatggccaacatggcaaaatccgtctctacgaaaaatataaaattagccaggcgtggtggtgaatgcctgtagtcccagctactctggaggctgaggcaggagaaccacttgaatctgggagacggaggttgcagtgagccaagatcacctcactgcactccagcctaggtaacagagcgagactctgtctc

SEQ ID NO: 360640 - DNA, 355 bp, Homo sapiens
aggaagattattcagcagaaacaaacccttcctctgatgagcagaagtggtggatgtcagtaatttaaaaatggaaaatcaagtcattcagaatactttttatagggataatcttttaaaattgcacactgagcatttaatcaatgtaagtaatatggcaccattatctaggttgcacatttgtgaaagcatcagtatatgatgcgttccatggttgggatctaatgatacccagatcaagccatgacataactagtgcagtgtgcaagattcaagccctattcagtcagaattcttcctttgaaatgaggattgacaattaagctttttttttttttttttaaacggagtctgg

SEQ ID NO: 360641 - DNA, 550 bp, Homo sapiens
ataaatgtgtaaaagtccccaacaagccagatgtctttcaatgggtttatgaataaagaaattatgatgcatccacaccacgggctactcttggcaataaagaggaacacactactgttacacaagaatgtggatgaccctcggaagaagtcaatctccgaaggacacatactgcattatcaaatttatgtaaatttgtgaaataacaattatagtacagaacagattggtggctgccagggattggggcagaaacaaggtgtgagtataaaggggtagcatgaaggagctttgtcactgtgacggcagttacatgaatctgcatatgagctaaaactgcacagagatataaacataggcacactcacatattaaaacaaacttcataagtagacccagtgcattatgagttgttacccttccctcctttttacaaaagaaagatctaaaaaatccttttacctgtattgcagttggataggccttcttttgtcaaatcaattatagaatcaagtttcttctgtacagcctaaaaaaattgtaaaaaaaa

SEQ ID NO: 360642 - DNA, 207 bp, Homo sapiens
tatgatttttgtcattttgaggattttatatcagtaggatcatactgtacgtgaccttccaagactgctttttttcacccagcgtaacgttcttgggctccacccagcttgctatgttgcctcctttttcctgctgagggctagcccgtggcacgggtgcaccagagtttaactgttcaccatgatccccacatcatgttttcatag

SEQ ID NO: 360643 - DNA, 598 bp, Homo sapiens
agcctcctaccgtggctcccacctcctatgtctccagagatcaaggcaatggggagggaaagctggcaggaggcagtcccttgtgggcctgaggccctttggctcctaagtgtccacattctgttctcttccaagtcccttcattgttaagctgattctccaacaagatgcaatgaacagatgcaatgtctaccccgcgctgggcgagttcccgaggccatgggctgtttggaatcacacttcattaagagacaaactgttccttcccttattgtgccttaatgcttatgacaaggcagctctgaattgatcccaagctggagcctctgaatgctttaaagagtttgaatatagacggtttgaggcaaaaagggagctttaaatattgctcagtggcccccatctcccctcttcccacatttactgaggcacgagatgggatgggacctgtcccgggtcacagcagcagtcgtcagcgccttggccctcctggcttgtaggatgctgcttttcctgggcttctggcagtccaggccaggatgggggagccaggaattcatgttgtcattggaaaagctgataaacaggagcacaattc

SEQ ID NO: 360644 - DNA, 1246 bp, Homo sapiens
actgctgcacaggcaaccaacatacttagtgcccagagccttctctctgggcccaggactcagtgatggggccttacttagccctgcctcctgggtggggtgggggagctgagggatcgtgaggacaagaggtagagggaaaagaaaagaagatggtgtttgaggataggggagggacaggagaggggacagaaaggtcccagagcatgatgatgaaggaaagggatctggcattcatgaagcacctacgatggttcaggcacaaacactgaaacctcaaattggccctggcagaaggggaccatcatagcaaggtgggggggggggtgcagaaagtgagtttctgtttcaagaacagacttcactagttcagagttgcacagctagtgaggtatggagctgggctttgaatcaggtcagctgcctgaatgcccaacttcttcagcccttggaaggagagggtggggagaagaagaaggaaaagacaaggaagaaagaaagaagagagaaggggagaggaatggaagtccaaagagtgggaggaatttgatttcagaaccatctccagctgacccttgagccagcaaggacagggagaagggaagagcaagaacacgaagggcctcaagcaccgggatgcctttgccagccttagataattcccagagcgcacagagccctgcaggttcctgggtccttctccagagaagaggcacagagattctggcagcaaggttcagaaggggtgaggaaactgggcactgacaaagggaggggattggctcaaattcgaccccagagtcagctctggtggggttgggagcctggatgggtgggagaagatagaatccaatcgtgaaaaccataagggaccttcaaactcatcttgcccagatgtctcccatttcacagatgagggaactgaggttttgagagcttcccctgaggactctgcaaaacgaggtggtgtctggtttggatgaaagtggtcggtgattcctcaactcctgccctgcctccctctctcgttcctccctaacatgttatgctcttgttggggctgggatgccctaggcccaaggttaccaaatcctgggtttggaaaattgctgctgggggtggtatctaggaccagagaggaatctactatttctactgtgaaataattcagcagggggtcttcttacttcttccctttgaggacaaagtttctctcgaataaagagactgaagcaaaaaaaaaaaa

SEQ ID NO: 360645 - DNA, 1407 bp, Homo sapiens
agcctcctaccgtggctcccacctcctatgtctccagagatcaaggcaatggggagggaaagctggcaggaggcagtcccttgtgggcctgaggccctttggctcctaagtgtccacattctgttctcttccaagtcccttcattgttaagctgattctccaacaagatgcaatgaacagatgcaatgtctaccccgcgctgggcgagttcccgaggccatgggctgtttggaatcacacttcattaagagacaaactgttccttcccttattgtgccttaatgcttatgacaaggcagctctgaattgatcccaagctggagcctctgaatgctttaaagagtttgaatatagacggtttgagagcatgatgatgaaggaaagggatctggcattcatgaagcacctacgatggttcaggcacaaacactgaaacctcaaattggccctggcagaaggggaccatcatagcaaggtgggggggggggtgcagaaagtgagtttctgtttcaagaacagacttcactagttcagagttgcacagctagtgaggtatggagctgggctttgaatcaggtcagctgcctgaatgcccaacttcttcagcccttggaaggagagggtggggagaagaagaaggaaaagacaaggaagaaagaaagaagagagaaggggagaggaatggaagtccaaagagtgggaggaatttgatttcagaaccatctccagctgacccttgagccagcaaggacagggagaagggaagagcaagaacacgaagggcctcaagcaccgggatgcctttgccagccttagataattcccagagcgcacagagccctgcaggttcctgggtccttctccagagaagaggcacagagattctggcagcaaggttcagaaggggtgaggaaactgggcactgacaaagggaggggattggctcaaattcgaccccagagtcagctctggtggggttgggagcctggatgggtgggagaagatagaatccaatcgtgaaaaccataagggaccttcaaactcatcttgcccagatgtctcccatttcacagatgagggaactgaggttttgagagcttcccctgaggactctgcaaaacgaggtggtgtctggtttggatgaaagtggtcggtgattcctcaactcctgccctgcctccctctctcgttcctccctaacatgttatgctcttgttggggctgggatgccctaggcccaaggttaccaaatcctgggtttggaaaattgctgctgggggtggtatctaggaccagagaggaatctactatttctactgtgaaataattcagcagggggtcttcttacttcttccctttgaggacaaagtttctctcgaataaagagactgaagcaaaaaaaaaaaa

SEQ ID NO: 360646 - DNA, 3657 bp, Homo sapiens
aaagatgcttaaggaaaaagtgtgaaataaggctttcatatcctgcataactgacttaatcggggcacagactattagcagaaaatgctattccagtgaaccatgaggaatccactagacagagagctttataaccagaataactagagacatcaatttaaagactgctgatttaaaagcagaaagaaaaaaaagctgatttaaaggcaaagtaattaataaaactaactaattttgtctgcccaagttcttgcagtttggaaataatacttccatggaattttactttcacaaacctggagtaactacatgtactttaaagtaacaaattatacgccacttagcgattctgcagtggaattgatgatgttaacctgttacttatatagagctttatagtatgcaaacagatttatgtctttctgtcttttgaactaactgaattgcttttttaaaatttccagttaacacctgttacaaaatcacattgaatgcctttggttggttctctgctccatcgagtctgctgttttctgtgaacacaacaccatcttactctttgtctcctttgcctgtgaagtcctgattactgctttcttcacctggttaaatcctgcttatttcttatttcccacaaagccatcactgacccttttgctaggctagagtagtgtacatttctgtacgctacatacttcattagatgtacttttctcacccgtatttattcatgtgtgtctctgcctctcctacagattataagctcattgagggaagagatcacattaatcttcatagttccatgtacaattctcagcacatcatagacactgataaactaagctgttattgagagcccttcccctcatttataatgtacaagagtaaaatctggatttgctcataaattgtcaggcactgaacacaaattatatctgtattacaaaaaattcacattataatgcacattgttttctgttacagttctgaaatttttgtgccagaactctactcagccataaccacaaattgatatttcagcatgaactatttaaagataatttaacaataacgtctattgagtacatataccaggcactgaaagttagtgtattatctcattttgtctttcctaacagacccaagaggtataggtcctattattttccatatcttacaaataaagaggatgagagattatttgtaaagccaggattcaaacccaggtgtgtctcagagcctatacacttaatcaccacactatattggctaagagagatgcaagcaatattgatggttcatggttggtgatcaaaatagtatctgtcaaccaactattctgatactttttttttaaatactaagtttaatccaggacattttagtcccaaatttggatattaaaggaaaactaaatatgttacctgcaaataaagttttgttttccaaaaagaaaattattaaagggcacttcaacactgtgactttaagtactagaaatattttagtaaaaacagactaaactgaaacattgagcagtgaatcctttaaagagcaaggttataaggttttaattgttactttttttcctgcttcatttgcctgtaagtgactttattaaaaaacctaagtatatatgtcatacatttacccaaggaaagtgtacaaactaccttgaatattagacatattgatttttggctgtgtgcctgtgtaattatcttaggagaaattctttgtgggtaagtggggacatttttacgataatgtaatttcttgaatagccagctcttcaaaagctatttgtaaaaaatatttaaaagtttcttagttatacaaagttaggaaccactgttctaggaactggaattgtgttatttttattcctctggaggaaaaatgagatcttcgtaatgatctctttaaattgactatttagaaaagttaggagttcagagaagctttcttcaattgtgaaaacaatacaaaatagctagctgattggaatgcagaaaaatgcagattaatcaggataccattaaacatctctgtttttccttcctttcttgtagtttatttatgtgaatcagtcctttgctccttccccagaccaagaagttggaactctctatgagtgttttggcagtgatggtaaactggttttacattactgcaagtctcaggcgtggggatgaaccacaaagaaaatcaacttgctactacatgaaatggattttcacggaagagacagctctgaaaagttttgatgcttgtggcaagagacttaacagatgtgatctatttagtatgtgtctactctatgtttatgcataagaaaacatccatagcatgaatggactcagaaaaatgtgatttgtattaatgcaccagtcatcataaaagatggtcatgatagtacacccattgctcctacttgttactattattgctgcagatctgcctccaaggttgaaaaggagactaagactgtataaacatcttcattgtcagttctcaaaatgactgaaattgttttcatggtaaaagttaatatactaaagggttcctttttttttaatgtttacatttatctctatgtttacctttttagtcacattgacctgctggctgaatacctcaaatagtccagtagagggcagtccaccaggcagaaaaggttaggcgttttggtttcacatctttgctggggaataataggggaaatggctgtttttgctaatttttagctaatatctagccaggagagcaagcacataggacagactgaaagactgtaattttacacaatacacatggcttaattattttattgggatacagaaaaatataaattctggacaaataagtcatatacctgttttcagtcctaacatttaaggattcttgagtcccaatcacataactgtggtgttactctgtcatttatatggtgtcaaaagcacttgatgagtaaacccagtagcatctttttgagtgtttcataatgcattttccaacttgaaaacaataattgaaaaatagccttattgtatattttatgccatgactaaaagtgccatttttactgatgctattagactgataatttcttgaagtgaaatttaacctttttttctctttagtattatgtttataatgccatatttttagaaagcattccagatcaggcatggtggcttacacctgtaatcccagcactttggaaggctgaggtgtggggattgcgtgaagccacaagtttgagaccagcctggttagcaaggcaagatccccaactctacaaaaaaataaaaattaaaaaaaaattattaggctgcagaggcaagaggatcccctgagcccagaagttcaagggtatagtgagtcgtgattgtaccactgcattcctgctgagcaacagagtgagaccccatctcaaaaaagaaaaaaaaaggcattctagtaaatcgaatgtaatgtgaatggaatttcaaaacaggatctaagatggtatgtagtagaattcaaagtaatatcattttaaagttaaatgagtatggaaaaggtctgttctctagttttgtccagttcagtttactgaaggaatatatttaattatattcatatatttaacaaataaaaatatgttgaattttc

SEQ ID NO: 360647 - DNA, 4300 bp, Homo sapiens
tggagtgtgcgcattcgaccgagcacagacacgttgcccaccgctcctctcccgaggtctgtagtcgcggagaaacacatgttgcgttactaacgttcagaggtctgcgacagcttcgatttgaatgactagccgggaacaccaagtttcactgtgtaattgcgtccccctactccggcgcctcctttgcgacgctccctggagaaaagcacgcccactgcacgcgctcagtcgctacttccgctctcgagtgtctccaagcaagatggcggaggagccgcagtctgtgttgcagcttcctacttcaattgctgctggaggggaaggacttacggatgtctccccagaaacaaccaccccggagcccccgtcttccgctgcagtttccccgggaacagaggaacctgctggcgacaccaagaaaaaaattgacattttgctaaaggctgtgggagacactcctattatgaaaacaaagaagtgggcagtagagcgaacacgaaccatccaaggactcattgacttcatcaaaaagtttcttaaacttgtggcctcagaacagttgtttatttatgtgaatcagtcctttgctccttccccagaccaagaagttggaactctctatgagtgttttggcagtgatggtaaactggttttacattactgcaagtctcaggcgtggggatgaaccacaaagaaaatcaacttgctactacatgaaatggattttcacggaagagacagctctgaaaagttttgatgcttgtggcaagagacttaacagatgtgatctatttagtatgtgtctactctatgtttatgcataagaaaacatccatagcatgaatggactcagaaaaatgtgatttgtattaatgcaccagtcatcataaaagatggtcatgatagtacacccattgctcctacttgttactattattgctgcagatctgcctccaaggttgaaaaggagactaagactgtataaacatcttcattgtcagttctcaaaatgactgaaattgttttcatggtaaaagttaatatactaaagggttcctttttttttaatgtttacatttatctctatgtttacctttttagtcacattgacctgctggctgaatacctcaaatagtccagtagagggcagtccaccaggcagaaaaggttaggcgttttggtttcacatctttgctggggaataataggggaaatggctgtttttgctaatttttagctaatatctagccaggagagcaagcacataggacagactgaaagactgtaattttacacaatacacatggcttaattattttattgggatacagaaaaatataaattctggacaaataagtcatatacctgttttcagtcctaacatttaaggattcttgagtcccaatcacataactgtggtgttactctgtcatttatatggtgtcaaaagcacttgatgagtaaacccagtagcatctttttgagtgtttcataatgcattttccaacttgaaaacaataattgaaaaatagccttattgtatattttatgccatgactaaaagtgccatttttactgatgctattagactgataatttcttgaagtgaaatttaacctttttttctctttagtattatgtttataatgccatatttttagaaagcattccagatcaggcatggtggcttacacctgtaatcccagcactttggaaggctgaggtgtggggattgcgtgaagccacaagtttgagaccagcctggttagcaaggcaagatccccaactctacaaaaaaataaaaattaaaaaaaaattattaggctgcagaggcaagaggatcccctgagcccagaagttcaagggtatagtgagtcgtgattgtaccactgcattcctgctgagcaacagagtgagaccccatctcaaaaaagaaaaaaaaaggcattctagtaaatcgaatgtaatgtgaatggaatttcaaaacaggatctaagatggtatgtagtagaattcaaagtaatatcattttaaagttaaatgagtatggaaaaggtctgttctctagttttgtccagttcagtttactgaaggaatatatttaattatattcatatatttaacaaataaaaatatgttgaattttcgtattgtttgccactgagggttcagatgatagacctcaaaaaaatcgaaaatactggttgaaatttgtagcatccatttagttattctttttgacctaaataacttaatagtttattaaatctaaggttagctaaatatgtagctaaccttatttgttttctttcctaacaactctgaagaatacataggactttgcacttttttttttttttttttttttaaagagacagcgtttcggtcttgttgcccaggctggactgtaatggcacaatcttggctcattgcaacctctacctcccgggttcaagtgattctcctgcctcagcctcctgagtagctgggattacaggcacctgccaccacacccgcctaattttttgttatttttagtggagacagggttttaccattttggccaggctggtctcaaactcctgactgacctcaggtgatccacccgccttggcctcccaaagtgctgggattataggtgtgagccaccgtgccgggcctggactttgtactttttcaaatcatatttaattatttcttgatctttactcaaagaattattctgcgctaaatttgcaacattaaacaataattaagcctggatccgataagttattgggtgactagaacctacaacacaatttatttttaatttaaactctcaagtctgattaaacttgggggaaaaactgaacattcaggtgatattttaaattttctttgtgactaaatagatgtcattaatatcatgcttcatcttactgtgcatagatgacccatggcacacaaagtatatgtataatattgcaatattgtacttccatctttaaaagtatgccaaagacttcataatgaattcaccatatttaaggaataaggcaaattaatgtttatccgaaatcaaaatgagattggataattcctggaatctgatttctgtaagtttcagtcctaaagggaccttaaatatctactagaacgaagtacagtgtatttctcagattacatgacattagtcaaccaatttagttgtaacacaaagtgagaaagccttaggtgttgaaggagtgtgaaaataaaaatctcttttcatgcagtttctgcttcattttccaaggattataatatgctgagtaaacttttggcactaaggaagccagctacaggccacgtaatgaaaactattcagaaaacagttcagcaaatactactatttgaatacagttcaaatcgtatttatataaatactctgcctacattatttaacccaaactggattattcaccattctttgaagatgccttgtgttttctgttatctacttctgctcgtgcagtttacttacaccttcaccctttcaaatcctaactcttcttcaaggcctgattcagattttaactttttaaaggctatctgaatcattcaaggagaagataccctttctctcataaaaacacttagagcaaactaccactattaaatcacttattgcatactgcctcagagccatgtgtccagttattctggtttttatctggtacccacacacacataatacttagtacatttccttatatgtaaataattagtaatgtaacacatcgagtgaatgaaattgtgattagcaaagtatgacagctaaaaacaaaggaaattttgtatagtttaagtttttgtacagcagaaggtaatggaaaatatttgcaacatatgacagtgtttttaatgtcttaagtatatgaagaatttgtttcaattggtaagaaaagaccaactgaaaaataggcaaaacataccaaatttcgattcacaaaaagatacaaatggccaacaaaacatgaaacaccttgaaccccattggttacaaaaaatacaaataaaaacaatgctgactgacaataaaaataatgtacatcttgctattagcagagttgtggggaaatcctgtcatattttggtgaatagaatatgagttggtatatcacttttagggggccatttggcaatatcaaaaaccttgaaacgtaagtataaacttcagtttgttcgtataacctgtcattcacatattgagtgcctactatgtcctaaatattggaataacactaataaagctcataagagactaaaaaaaaac

SEQ ID NO: 360648 - DNA, 3661 bp, Homo sapiens
tggagtgtgcgcattcgaccgagcacagacacgttgcccaccgctcctctcccgaggtctgtagtcgcggagaaacacatgttgcgttactaacgttcagaggtctgcgacagcttcgatttgaatgactagccgggaacaccaagtttcactgtgtaattgcgtccccctactccggcgcctcctttgcgacgctccctggagaaaagcacgcccactgcacgcgctcagtcgctacttccgctctcgagtgtctccaagcaagatggcggaggagccgcagtctgtgttgcagcttcctacttcaattgctgctggaggggaaggacttacggatgtctccccagaaacaaccaccccggagcccccgtcttccgctgcagtttccccgggaacagaggaacctgctggcgacaccaagaaaaaaattgacattttgctaaaggctgtgggagacactcctattatgaaaacaaagaagtgggcagtagagcgaacacgaaccatccaaggactcattgacttcatcaaaaagtttcttaaacttgtggcctcagaacagttgtttatttatgtgaatcagtcctttgctccttccccagaccaagaagttggaactctctatgagtgttttggcagtgatggtaaactggttttacattactgcaagtctcaggcgtggggatgaaccacaaagaaaatcaacttgctactacatgaaatggattttcacggaagagacagctctgaaaagttttgatgcttgtggcaagagacttaacagatgtgatctatttagtatgtgtctactctatgtttatgcataagaaaacatccatagcatgaatggactcagaaaaatgtgatttgtattaatgcaccagtcatcataaaagatggtcatgatagtacacccattgctcctacttgttactattattgctgcagatctgcctccaaggttgaaaaggagactaagactgtataaacatcttcattgtcagttctcaaaatgactgaaattgttttcatggtaaaagttaatatactaaagggttcctttttttttaatgtttacatttatctctatgtttacctttttagtcacattgacctgctggctgaatacctcaaatagtccagtagagggcagtccaccaggcagaaaaggttaggcgttttggtttcacatctttgctggggaataataggggaaatggctgtttttgctaatttttagctaatatctagccaggagagcaagcacataggacagactgaaagactgtaattttacacaatacacatggcttaattattttattgggatacagaaaaatataaattctggacaaataagtcatatacctgttttcagtcctaacatttaaggattcttgagtcccaatcacataactgtggtgttactctgtcatttatatggtgtcaaaagcacttgatgagtaaacccagtagcatctttttgagtgtttcataatgcattttccaacttgaaaacaataattgaaaaatagccttattgtatattttatgccatgactaaaagtgccatttttactgatgctattagactgataatttcttgaagtgaaatttaacctttttttctctttagtattatgtttataatgccatatttttagaaagcattccagatcaggcatggtggcttacacctgtaatcccagcactttggaaggctgaggtgtggggattgcgtgaagccacaagtttgagaccagcctggttagcaaggcaagatccccaactctacaaaaaaataaaaattaaaaaaaaattattaggctgcagaggcaagaggatcccctgagcccagaagttcaagggtatagtgagtcgtgattgtaccactgcattcctgctgagcaacagagtgagaccccatctcaaaaaagaaaaaaaaaggcattctagtaaatcgaatgtaatgtgaatggaatttcaaaacaggatctaagatggtatgtagtagaattcaaagtaatatcattttaaagttaaatgagtatggaaaaggtctgttctctagttttgtccagttcagtttactgaaggaatatatttaattatattcatatatttaacaaataaaaatatgttgaattttcgtattgtttgccactgagggttcagatgatagacctcaaaaaaatcgaaaatactggttgaaatttgtagcatccatttagttattctttttgacctaaataacttaatagtttattaaatctaaggttagctaaatatgtagctaaccttatttgttttctttcctaacaactctgaagaatacataggactttgcacttttttttttttttttttttttaaagagacagcgtttcggtcttgttgcccaggctggactgtaatggcacaatcttggctcattgcaacctctacctcccgggttcaagtgattctcctgcctcagcctcctgagtagctgggattacaggcacctgccaccacacccgcctaattttttgttatttttagtggagacagggttttaccattttggccaggctggtctcaaactcctgactgacctcaggtgatccacccgccttggcctcccaaagtgctgggattataggtgtgagccaccgtgccgggcctggactttgtactttttcaaatcatatttaattatttcttgatctttactcaaagaattattctgcgctaaatttgcaacattaaacaataattaagcctggatccgataagttattgggtgactagaacctacaacacaatttatttttaatttaaactctcaagtctgattaaacttgggggaaaaactgaacattcaggtgatattttaaattttctttgtgactaaatagatgtcattaatatcatgcttcatcttactgtgcatagatgacccatggcacacaaagtatatgtataatattgcaatattgtacttccatctttaaaagtatgccaaagacttcataatgaattcaccatatttaaggaataaggcaaattaatgtttatccgaaatcaaaatgagattggataattcctggaatctgatttctgtaagtttcagtcctaaagggaccttaaatatctactagaacgaagtacagtgtatttctcagattacatgacattagtcaaccaatttagttgtaacacaaagtgagaaagccttaggtgttgaaggagtgtgaaaataaaaatctcttttcatgcagtttctgcttcattttccaaggattataatatgctgagtaaacttttggcactaaggaagccagctacaggccacgtaatgaaaactattcagaaaacagttcagcaaatactactatttgaatacagttcaaatcgtatttatataaatactctgcctacattatttaacccaaactggattattcaccattctttgaagatgccttgtgttttctgttatctacttctgctcgtgcagtttacttacaccttcaccctttcaaatcctaactcttcttcaaggcctgattcagattttaactttttaaaggctatctgaatcattcaaggagaagataccctttctctcataaaaacacttagagcaaactaccactattaaatcacttattgcatactg

SEQ ID NO: 360649 - DNA, 3256 bp, Homo sapiens
tggagtgtgcgcattcgaccgagcacagacacgttgcccaccgctcctctcccgaggtctgtagtcgcggagaaacacatgttgcgttactaacgttcagaggtctgcgacagcttcgatttgaatgactagccgggaacaccaagtttcactgtgtaattgcgtccccctactccggcgcctcctttgcgacgctccctggagaaaagcacgcccactgcacgcgctcagtcgctacttccgctctcgagtgtctccaagcaagatggcggaggagccgcagtctgtgttgcagcttcctacttcaattgctgctggaggggaaggacttacggatgtctccccagaaacaaccaccccggagcccccgtcttccgctgcagtttccccgggaacagaggaacctgctggcgacaccaagaaaaaaattgacattttgctaaaggctgtgggagacactcctattatgaaaacaaagaagtgggcagtagagcgaacacgaaccatccaaggactcattgacttcatcaaaaagtttcttaaacttgtggcctcagaacagttgtttatttatgtgaatcagtcctttgctccttccccagaccaagaagttggaactctctatgagtgttttggcagtgatggtaaactggttttacattactgcaagtctcaggcgtggggatgaaccacaaagaaaatcaacttgctactacatgaaatggattttcacggaagagacagctctgaaaagttttgatgcttgtggcaagagacttaacagatgtgatctatttagtatgtgtctactctatgtttatgcataagaaaacatccatagcatgaatggactcagaaaaatgtgatttgtattaatgcaccagtcatcataaaagatggtcatgatagtacacccattgctcctacttgttactattattgctgcagatctgcctccaaggttgaaaaggagactaagactgtataaacatcttcattgtcagttctcaaaatgactgaaattgttttcatggtaaaagttaatatactaaagggttcctttttttttaatgtttacatttatctctatgtttacctttttagtcacattgacctgctggctgaatacctcaaatagtccagtagagggcagtccaccaggcagaaaaggttaggcgttttggtttcacatctttgctggggaataataggggaaatggctgtttttgctaatttttagctaatatctagccaggagagcaagcacataggacagactgaaagactgtaattttacacaatacacatggcttaattattttattgggatacagaaaaatataaattctggacaaataagtcatatacctgttttcagtcctaacatttaaggattcttgagtcccaatcacataactgtggtgttactctgtcatttatatggtgtcaaaagcacttgatgagtaaacccagtagcatctttttgagtgtttcataatgcattttccaacttgaaaacaataattgaaaaatagccttattgtatattttatgccatgactaaaagtgccatttttactgatgctattagactgataatttcttgaagtgaaatttaacctttttttctctttagtattatgtttataatgccatatttttagaaagcattccagatcaggcatggtggcttacacctgtaatcccagcactttggaaggctgaggtgtggggattgcgtgaagccacaagtttgagaccagcctggttagcaaggcaagatccccaactctacaaaaaaataaaaattaaaaaaaaattattaggctgcagaggcaagaggatcccctgagcccagaagttcaagggtatagtgagtcgtgattgtaccactgcattcctgctgagcaacagagtgagaccccatctcaaaaaagaaaaaaaaaggcattctagtaaatcgaatgtaatgtgaatggaatttcaaaacaggatctaagatggtatgtagtagaattcaaagtaatatcattttaaagttaaatgagtatggaaaaggtctgttctctagttttgtccagttcagtttactgaaggaatatatttaattatattcatatatttaacaaataaaaatatgttgaattttcgtattgtttgccactgagggttcagatgatagacctcaaaaaaatcgaaaatactggttgaaatttgtagcatccatttagttattctttttgacctaaataacttaatagtttattaaatctaaggttagctaaatatgtagctaaccttatttgttttctttcctaacaactctgaagaatacataggactttgcacttttttttttttttttttttttaaagagacagcgtttcggtcttgttgcccaggctggactgtaatggcacaatcttggctcattgcaacctctacctcccgggttcaagtgattctcctgcctcagcctcctgagtagctgggattacaggcacctgccaccacacccgcctaattttttgttatttttagtggagacagggttttaccattttggccaggctggtctcaaactcctgactgacctcaggtgatccacccgccttggcctcccaaagtgctgggattataggtgtgagccaccgtgccgggcctggactttgtactttttcaaatcatatttaattatttcttgatctttactcaaagaattattctgcgctaaatttgcaacattaaacaataattaagcctggatccgataagttattgggtgactagaacctacaacacaatttatttttaatttaaactctcaagtctgattaaacttgggggaaaaactgaacattcaggtgatattttaaattttctttgtgactaaatagatgtcattaatatcatgcttcatcttactgtgcatagatgacccatggcacacaaagtatatgtataatattgcaatattgtacttccatctttaaaagtatgccaaagacttcataatgaattcaccatatttaaggaataaggcaaattaatgtttatccgaaatcaaaatgagattggataattcctggaatctgatttctgtaagtttcagtcctaaagggaccttaaatatctactagaacgaagtacagtgtatttctcagattacatgacattagtcaaccaatttagttgtaacacaaagtgagaaagccttaggtgttgaaggagtgtgaaaataaaaatctcttttcat

SEQ ID NO: 360650 - DNA, 3424 bp, Homo sapiens
  misc_feature (3281)..(3282): n is a, c, g, or t
  misc_feature (3289)..(3289): n is a, c, g, or t
  misc_feature (3294)..(3295): n is a, c, g, or t
  misc_feature (3307)..(3307): n is a, c, g, or t
  misc_feature (3316)..(3316): n is a, c, g, or t
  misc_feature (3318)..(3318): n is a, c, g, or t
tggagtgtgcgcattcgaccgagcacagacacgttgcccaccgctcctctcccgaggtctgtagtcgcggagaaacacatgttgcgttactaacgttcagaggtctgcgacagcttcgatttgaatgactagccgggaacaccaagtttcactgtgtaattgcgtccccctactccggcgcctcctttgcgacgctccctggagaaaagcacgcccactgcacgcgctcagtcgctacttccgctctcgagtgtctccaagcaagatggcggaggagccgcagtctgtgttgcagcttcctacttcaattgctgctggaggggaaggacttacggatgtctccccagaaacaaccaccccggagcccccgtcttccgctgcagtttccccgggaacagaggaacctgctggcgacaccaagaaaaaaattgacattttgctaaaggctgtgggagacactcctattatgaaaacaaagaagtgggcagtagagcgaacacgaaccatccaaggactcattgacttcatcaaaaagtttcttaaacttgtggcctcagaacagttgtttatttatgtgaatcagtcctttgctccttccccagaccaagaagttggaactctctatgagtgttttggcagtgatggtaaactggttttacattactgcaagtctcaggcgtggggatgaaccacaaagaaaatcaacttgctactacatgaaatggattttcacggaagagacagctctgaaaagttttgatgcttgtggcaagagacttaacagatgtgatctatttagtatgtgtctactctatgtttatgcataagaaaacatccatagcatgaatggactcagaaaaatgtgatttgtattaatgcaccagtcatcataaaagatggtcatgatagtacacccattgctcctacttgttactattattgctgcagatctgcctccaaggttgaaaaggagactaagactgtataaacatcttcattgtcagttctcaaaatgactgaaattgttttcatggtaaaagttaatatactaaagggttcctttttttttaatgtttacatttatctctatgtttacctttttagtcacattgacctgctggctgaatacctcaaatagtccagtagagggcagtccaccaggcagaaaaggttaggcgttttggtttcacatctttgctggggaataataggggaaatggctgtttttgctaatttttagctaatatctagccaggagagcaagcacataggacagactgaaagactgtaattttacacaatacacatggcttaattattttattgggatacagaaaaatataaattctggacaaataagtcatatacctgttttcagtcctaacatttaaggattcttgagtcccaatcacataactgtggtgttactctgtcatttatatggtgtcaaaagcacttgatgagtaaacccagtagcatctttttgagtgtttcataatgcattttccaacttgaaaacaataattgaaaaatagccttattgtatattttatgccatgactaaaagtgccatttttactgatgctattagactgataatttcttgaagtgaaatttaacctttttttctctttagtattatgtttataatgccatatttttagaaagcattccagatcaggcatggtggcttacacctgtaatcccagcactttggaaggctgaggtgtggggattgcgtgaagccacaagtttgagaccagcctggttagcaaggcaagatccccaactctacaaaaaaataaaaattaaaaaaaaattattaggctgcagaggcaagaggatcccctgagcccagaagttcaagggtatagtgagtcgtgattgtaccactgcattcctgctgagcaacagagtgagaccccatctcaaaaaagaaaaaaaaaggcattctagtaaatcgaatgtaatgtgaatggaatttcaaaacaggatctaagatggtatgtagtagaattcaaagtaatatcattttaaagttaaatgagtatggaaaaggtctgttctctagttttgtccagttcagtttactgaaggaatatatttaattatattcatatatttaacaaataaaaatatgttgaattttcgtattgtttgccactgagggttcagatgatagacctcaaaaaaatcgaaaatactggttgaaatttgtagcatccatttagttattctttttgacctaaataacttaatagtttattaaatctaaggttagctaaatatgtagctaaccttatttgttttctttcctaacaactctgaagaatacataggactttgcacttttttttttttttttttttttaaagagacagcgtttcggtcttgttgcccaggctggactgtaatggcacaatcttggctcattgcaacctctacctcccgggttcaagtgattctcctgcctcagcctcctgagtagctgggattacaggcacctgccaccacacccgcctaattttttgttatttttagtggagacagggttttaccattttggccaggctggtctcaaactcctgactgacctcaggtgatccacccgccttggcctcccaaagtgctgggattataggtgtgagccaccgtgccgggcctggactttgtactttttcaaatcatatttaattatttcttgatctttactcaaagaattattctgcgctaaatttgcaacattaaacaataattaagcctggatccgataagttattgggtgactagaacctacaacacaatttatttttaatttaaactctcaagtctgattaaacttgggggaaaaactgaacattcaggtgatattttaaattttctttgtgactaaatagatgtcattaatatcatgcttcatcttactgtgcatagatgacccatggcacacaaagtatatgtataatattgcaatattgtacttccatctttaaaagtatgccaaagacttcataatgaattcaccatatttaaggaataaggcaaattaatgtttatccgaaatcaaaatgagattggataattcctggaatctgatttctgtaagtttcagtcctaaagggaccttaaatatctactagaacgaagtacagtgtatttctcagattacatgacattagtcaaccaatttagttgtaacacaaagtgagaaagccttaggtgttgaaggagtgtgaaaataaaaatctcttttcattaaaaaaaaaaaaaaaaaaaaaaanntgttggnggccnngcccgaaatttnaaccctcgntngggccgcccgggaagaacttccaagtccgaaaccggccgccggctggttcccaaaaagccggccggtctgaaccggggctggtcggtcccgccgtaccccgggggg

SEQ ID NO: 360651 - DNA, 3256 bp, Homo sapiens
tggagtgtgcgcattcgaccgagcacagacacgttgcccaccgctcctctcccgaggtctgtagtcgcggagaaacacatgttgcgttactaacgttcagaggtctgcgacagcttcgatttgaatgactagccgggaacaccaagtttcactgtgtaattgcgtccccctactccggcgcctcctttgcgacgctccctggagaaaagcacgcccactgcacgcgctcagtcgctacttccgctctcgagtgtctccaagcaagatggcggaggagccgcagtctgtgttgcagcttcctacttcaattgctgctggaggggaaggacttacggatgtctccccagaaacaaccaccccggagcccccgtcttccgctgcagtttccccgggaacagaggaacctgctggcgacaccaagaaaaaaattgacattttgctaaaggctgtgggagacactcctattatgaaaacaaagaagtgggcagtagagcgaacacgaaccatccaaggactcattgacttcatcaaaaagtttcttaaacttgtggcctcagaacagttgtttatttatgtgaatcagtcctttgctccttccccagaccaagaagttggaactctctatgagtgttttggcagtgatggtaaactggttttacattactgcaagtctcaggcgtggggatgaaccacaaagaaaatcaacttgctactacatgaaatggattttcacggaagagacagctctgaaaagttttgatgcttgtggcaagagacttaacagatgtgatctatttagtatgtgtctactctatgtttatgcataagaaaacatccatagcatgaatggactcagaaaaatgtgatttgtattaatgcaccagtcatcataaaagatggtcatgatagtacacccattgctcctacttgttactattattgctgcagatctgcctccaaggttgaaaaggagactaagactgtataaacatcttcattgtcagttctcaaaatgactgaaattgttttcatggtaaaagttaatatactaaagggttcctttttttttaatgtttacatttatctctatgtttacctttttagtcacattgacctgctggctgaatacctcaaatagtccagtagagggcagtccaccaggcagaaaaggttaggcgttttggtttcacatctttgctggggaataataggggaaatggctgtttttgctaatttttagctaatatctagccaggagagcaagcacataggacagactgaaagactgtaattttacacaatacacatggcttaattattttattgggatacagaaaaatataaattctggacaaataagtcatatacctgttttcagtcctaacatttaaggattcttgagtcccaatcacataactgtggtgttactctgtcatttatatggtgtcaaaagcacttgatgagtaaacccagtagcatctttttgagtgtttcataatgcattttccaacttgaaaacaataattgaaaaatagccttattgtatattttatgccatgactaaaagtgccatttttactgattgctgggattataggtgtgagccaccgtgccgggcctggactttgtactttttcaaatcatatttaattatttcttgatctttactcaaagaattattctgcgctaaatttgcaacattaaacaataattaagcctggatccgataagttattgggtgactagaacctacaacacaatttatttttaatttaaactctcaagtctgattaaacttgggggaaaaactgaacattcaggtgatattttaaattttctttgtgactaaatagatgtcattaatatcatgcttcatcttactgtgcatagatgacccatggcacacaaagtatatgtataatattgcaatattgtacttccatctttaaaagtatgccaaagacttcataatgaattcaccatatttaaggaataaggcaaattaatgtttatccgaaatcaaaatgagattggataattcctggaatctgatttctgtaagtttcagtcctaaagggaccttaaatatctactagaacgaagtacagtgtatttctcagattacatgacattagtcaaccaatttagttgtaacacaaagtgagaaagccttaggtgttgaaggagtgtgaaaataaaaatctcttttcatgcagtttctgcttcattttccaaggattataatatgctgagtaaacttttggcactaaggaagccagctacaggccacgtaatgaaaactattcagaaaacagttcagcaaatactactatttgaatacagttcaaatcgtatttatataaatactctgcctacattatttaacccaaactggattattcaccattctttgaagatgccttgtgttttctgttatctacttctgctcgtgcagtttacttacaccttcaccctttcaaatcctaactcttcttcaaggcctgattcagattttaactttttaaaggctatctgaatcattcaaggagaagataccctttctctcataaaaacacttagagcaaactaccactattaaatcacttattgcatactgcctcagagccatgtgtccagttattctggtttttatctggtacccacacacacataatacttagtacatttccttatatgtaaataattagtaatgtaacacatcgagtgaatgaaattgtgattagcaaagtatgacagctaaaaacaaaggaaattttgtatagtttaagtttttgtacagcagaaggtaatggaaaatatttgcaacatatgacagtgtttttaatgtcttaagtatatgaagaatttgtttcaattggtaagaaaagaccaactgaaaaataggcaaaacataccaaatttcgattcacaaaaagatacaaatggccaacaaaacatgaaacaccttgaaccccattggttacaaaaaatacaaataaaaacaatgctgactgacaataaaaataatgtacatcttgctattagcagagttgtggggaaatcctgtcatattttggtgaatagaatatgagttggtatatcacttttagggggccatttggcaatatcaaaaaccttgaaacgtaagtataaacttcagtttgttcgtataacctgtcattcacatattgagtgcctactatgtcctaaatattggaataacactaataaagctcataagagactaaaaaaaaac

SEQ ID NO: 360652 - DNA, 4416 bp, Homo sapiens
tggagtgtgcgcattcgaccgagcacagacacgttgcccaccgctcctctcccgaggtctgtagtcgcggagaaacacatgttgcgttactaacgttcagaggtctgcgacagcttcgatttgaatgactagccgggaacaccaagtttcactgtgtaattgcgtccccctactccggcgcctcctttgcgacgctccctggagaaaagcacgcccactgcacgcgctcagtcgctacttccgctctcgagtgtctccaagcaagatggcggaggagccgcagtctgtgttgcagcttcctacttcaattgctgctggaggggaaggacttacggatgtctccccagaaacaaccaccccggagcccccgtcttccgctgcagtttccccgggaacagaggaacctgctggcgacaccaagaaaaaaaatgacagtggtctctggccgggcgcggtggctcactcctgtaatcccagcactttggtaggctgaggcgggtggatcacctgaggtcaagagttcgagaccagcctggccaacatgttgacattttgctaaaggctgtgggagacactcctattatgaaaacaaagaagtgggcagtagagcgaacacgaaccatccaaggactcattgacttcatcaaaaagtttcttaaacttgtggcctcagaacagttgtttatttatgtgaatcagtcctttgctccttccccagaccaagaagttggaactctctatgagtgttttggcagtgatggtaaactggttttacattactgcaagtctcaggcgtggggatgaaccacaaagaaaatcaacttgctactacatgaaatggattttcacggaagagacagctctgaaaagttttgatgcttgtggcaagagacttaacagatgtgatctatttagtatgtgtctactctatgtttatgcataagaaaacatccatagcatgaatggactcagaaaaatgtgatttgtattaatgcaccagtcatcataaaagatggtcatgatagtacacccattgctcctacttgttactattattgctgcagatctgcctccaaggttgaaaaggagactaagactgtataaacatcttcattgtcagttctcaaaatgactgaaattgttttcatggtaaaagttaatatactaaagggttcctttttttttaatgtttacatttatctctatgtttacctttttagtcacattgacctgctggctgaatacctcaaatagtccagtagagggcagtccaccaggcagaaaaggttaggcgttttggtttcacatctttgctggggaataataggggaaatggctgtttttgctaatttttagctaatatctagccaggagagcaagcacataggacagactgaaagactgtaattttacacaatacacatggcttaattattttattgggatacagaaaaatataaattctggacaaataagtcatatacctgttttcagtcctaacatttaaggattcttgagtcccaatcacataactgtggtgttactctgtcatttatatggtgtcaaaagcacttgatgagtaaacccagtagcatctttttgagtgtttcataatgcattttccaacttgaaaacaataattgaaaaatagccttattgtatattttatgccatgactaaaagtgccatttttactgatgctattagactgataatttcttgaagtgaaatttaacctttttttctctttagtattatgtttataatgccatatttttagaaagcattccagatcaggcatggtggcttacacctgtaatcccagcactttggaaggctgaggtgtggggattgcgtgaagccacaagtttgagaccagcctggttagcaaggcaagatccccaactctacaaaaaaataaaaattaaaaaaaaattattaggctgcagaggcaagaggatcccctgagcccagaagttcaagggtatagtgagtcgtgattgtaccactgcattcctgctgagcaacagagtgagaccccatctcaaaaaagaaaaaaaaaggcattctagtaaatcgaatgtaatgtgaatggaatttcaaaacaggatctaagatggtatgtagtagaattcaaagtaatatcattttaaagttaaatgagtatggaaaaggtctgttctctagttttgtccagttcagtttactgaaggaatatatttaattatattcatatatttaacaaataaaaatatgttgaattttcgtattgtttgccactgagggttcagatgatagacctcaaaaaaatcgaaaatactggttgaaatttgtagcatccatttagttattctttttgacctaaataacttaatagtttattaaatctaaggttagctaaatatgtagctaaccttatttgttttctttcctaacaactctgaagaatacataggactttgcacttttttttttttttttttttttaaagagacagcgtttcggtcttgttgcccaggctggactgtaatggcacaatcttggctcattgcaacctctacctcccgggttcaagtgattctcctgcctcagcctcctgagtagctgggattacaggcacctgccaccacacccgcctaattttttgttatttttagtggagacagggttttaccattttggccaggctggtctcaaactcctgactgacctcaggtgatccacccgccttggcctcccaaagtgctgggattataggtgtgagccaccgtgccgggcctggactttgtactttttcaaatcatatttaattatttcttgatctttactcaaagaattattctgcgctaaatttgcaacattaaacaataattaagcctggatccgataagttattgggtgactagaacctacaacacaatttatttttaatttaaactctcaagtctgattaaacttgggggaaaaactgaacattcaggtgatattttaaattttctttgtgactaaatagatgtcattaatatcatgcttcatcttactgtgcatagatgacccatggcacacaaagtatatgtataatattgcaatattgtacttccatctttaaaagtatgccaaagacttcataatgaattcaccatatttaaggaataaggcaaattaatgtttatccgaaatcaaaatgagattggataattcctggaatctgatttctgtaagtttcagtcctaaagggaccttaaatatctactagaacgaagtacagtgtatttctcagattacatgacattagtcaaccaatttagttgtaacacaaagtgagaaagccttaggtgttgaaggagtgtgaaaataaaaatctcttttcatgcagtttctgcttcattttccaaggattataatatgctgagtaaacttttggcactaaggaagccagctacaggccacgtaatgaaaactattcagaaaacagttcagcaaatactactatttgaatacagttcaaatcgtatttatataaatactctgcctacattatttaacccaaactggattattcaccattctttgaagatgccttgtgttttctgttatctacttctgctcgtgcagtttacttacaccttcaccctttcaaatcctaactcttcttcaaggcctgattcagattttaactttttaaaggctatctgaatcattcaaggagaagataccctttctctcataaaaacacttagagcaaactaccactattaaatcacttattgcatactgcctcagagccatgtgtccagttattctggtttttatctggtacccacacacacataatacttagtacatttccttatatgtaaataattagtaatgtaacacatcgagtgaatgaaattgtgattagcaaagtatgacagctaaaaacaaaggaaattttgtatagtttaagtttttgtacagcagaaggtaatggaaaatatttgcaacatatgacagtgtttttaatgtcttaagtatatgaagaatttgtttcaattggtaagaaaagaccaactgaaaaataggcaaaacataccaaatttcgattcacaaaaagatacaaatggccaacaaaacatgaaacaccttgaaccccattggttacaaaaaatacaaataaaaacaatgctgactgacaataaaaataatgtacatcttgctattagcagagttgtggggaaatcctgtcatattttggtgaatagaatatgagttggtatatcacttttagggggccatttggcaatatcaaaaaccttgaaacgtaagtataaacttcagtttgttcgtataacctgtcattcacatattgagtgcctactatgtcctaaatattggaataacactaataaagctcataagagactaaaaaaaaac

SEQ ID NO: 360653 - DNA, 4163 bp, Homo sapiens
tggagtgtgcgcattcgaccgagcacagacacgttgcccaccgctcctctcccgaggtctgtagtcgcggagaaacacatgttgcgttactaacgttcagaggtctgcgacagcttcgatttgaatgactagccgggaacaccaagtttcactgtgtaattgcgtccccctactccggcgcctcctttgcgacgctccctggagaaaagcacgcccactgcacgcgctcagtcgctacttccgctctcgagtgtctccaagcaagatggcggaggagccgcagtctgtgttgcagcttcctacttcaattgctgctggaggggaaggacttacggatgtctccccagaaacaaccaccccggagcccccgtcttccgctgcagtttccccgggaacagaggaacctgctggcgacaccaagaaaaaaatttatttatgtgaatcagtcctttgctccttccccagaccaagaagttggaactctctatgagtgttttggcagtgatggtaaactggttttacattactgcaagtctcaggcgtggggatgaaccacaaagaaaatcaacttgctactacatgaaatggattttcacggaagagacagctctgaaaagttttgatgcttgtggcaagagacttaacagatgtgatctatttagtatgtgtctactctatgtttatgcataagaaaacatccatagcatgaatggactcagaaaaatgtgatttgtattaatgcaccagtcatcataaaagatggtcatgatagtacacccattgctcctacttgttactattattgctgcagatctgcctccaaggttgaaaaggagactaagactgtataaacatcttcattgtcagttctcaaaatgactgaaattgttttcatggtaaaagttaatatactaaagggttcctttttttttaatgtttacatttatctctatgtttacctttttagtcacattgacctgctggctgaatacctcaaatagtccagtagagggcagtccaccaggcagaaaaggttaggcgttttggtttcacatctttgctggggaataataggggaaatggctgtttttgctaatttttagctaatatctagccaggagagcaagcacataggacagactgaaagactgtaattttacacaatacacatggcttaattattttattgggatacagaaaaatataaattctggacaaataagtcatatacctgttttcagtcctaacatttaaggattcttgagtcccaatcacataactgtggtgttactctgtcatttatatggtgtcaaaagcacttgatgagtaaacccagtagcatctttttgagtgtttcataatgcattttccaacttgaaaacaataattgaaaaatagccttattgtatattttatgccatgactaaaagtgccatttttactgatgctattagactgataatttcttgaagtgaaatttaacctttttttctctttagtattatgtttataatgccatatttttagaaagcattccagatcaggcatggtggcttacacctgtaatcccagcactttggaaggctgaggtgtggggattgcgtgaagccacaagtttgagaccagcctggttagcaaggcaagatccccaactctacaaaaaaataaaaattaaaaaaaaattattaggctgcagaggcaagaggatcccctgagcccagaagttcaagggtatagtgagtcgtgattgtaccactgcattcctgctgagcaacagagtgagaccccatctcaaaaaagaaaaaaaaaggcattctagtaaatcgaatgtaatgtgaatggaatttcaaaacaggatctaagatggtatgtagtagaattcaaagtaatatcattttaaagttaaatgagtatggaaaaggtctgttctctagttttgtccagttcagtttactgaaggaatatatttaattatattcatatatttaacaaataaaaatatgttgaattttcgtattgtttgccactgagggttcagatgatagacctcaaaaaaatcgaaaatactggttgaaatttgtagcatccatttagttattctttttgacctaaataacttaatagtttattaaatctaaggttagctaaatatgtagctaaccttatttgttttctttcctaacaactctgaagaatacataggactttgcacttttttttttttttttttttttaaagagacagcgtttcggtcttgttgcccaggctggactgtaatggcacaatcttggctcattgcaacctctacctcccgggttcaagtgattctcctgcctcagcctcctgagtagctgggattacaggcacctgccaccacacccgcctaattttttgttatttttagtggagacagggttttaccattttggccaggctggtctcaaactcctgactgacctcaggtgatccacccgccttggcctcccaaagtgctgggattataggtgtgagccaccgtgccgggcctggactttgtactttttcaaatcatatttaattatttcttgatctttactcaaagaattattctgcgctaaatttgcaacattaaacaataattaagcctggatccgataagttattgggtgactagaacctacaacacaatttatttttaatttaaactctcaagtctgattaaacttgggggaaaaactgaacattcaggtgatattttaaattttctttgtgactaaatagatgtcattaatatcatgcttcatcttactgtgcatagatgacccatggcacacaaagtatatgtataatattgcaatattgtacttccatctttaaaagtatgccaaagacttcataatgaattcaccatatttaaggaataaggcaaattaatgtttatccgaaatcaaaatgagattggataattcctggaatctgatttctgtaagtttcagtcctaaagggaccttaaatatctactagaacgaagtacagtgtatttctcagattacatgacattagtcaaccaatttagttgtaacacaaagtgagaaagccttaggtgttgaaggagtgtgaaaataaaaatctcttttcatgcagtttctgcttcattttccaaggattataatatgctgagtaaacttttggcactaaggaagccagctacaggccacgtaatgaaaactattcagaaaacagttcagcaaatactactatttgaatacagttcaaatcgtatttatataaatactctgcctacattatttaacccaaactggattattcaccattctttgaagatgccttgtgttttctgttatctacttctgctcgtgcagtttacttacaccttcaccctttcaaatcctaactcttcttcaaggcctgattcagattttaactttttaaaggctatctgaatcattcaaggagaagataccctttctctcataaaaacacttagagcaaactaccactattaaatcacttattgcatactgcctcagagccatgtgtccagttattctggtttttatctggtacccacacacacataatacttagtacatttccttatatgtaaataattagtaatgtaacacatcgagtgaatgaaattgtgattagcaaagtatgacagctaaaaacaaaggaaattttgtatagtttaagtttttgtacagcagaaggtaatggaaaatatttgcaacatatgacagtgtttttaatgtcttaagtatatgaagaatttgtttcaattggtaagaaaagaccaactgaaaaataggcaaaacataccaaatttcgattcacaaaaagatacaaatggccaacaaaacatgaaacaccttgaaccccattggttacaaaaaatacaaataaaaacaatgctgactgacaataaaaataatgtacatcttgctattagcagagttgtggggaaatcctgtcatattttggtgaatagaatatgagttggtatatcacttttagggggccatttggcaatatcaaaaaccttgaaacgtaagtataaacttcagtttgttcgtataacctgtcattcacatattgagtgcctactatgtcctaaatattggaataacactaataaagctcataagagactaaaaaaaaac

SEQ ID NO: 360654 - DNA, 4738 bp, Homo sapiens
tggagtgtgcgcattcgaccgagcacagacacgttgcccaccgctcctctcccgaggtctgtagtcgcggagaaacacatgttgcgttactaacgttcagaggtctgcgacagcttcgatttgaatgactagccgggaacaccaagtttcactgtgtaattgcgtccccctactccggcgcctcctttgcgacgctccctggagaaaagcacgcccactgcacgcgctcagtcgctacttccgctctcgagtgtctccaagcaagatggcggaggagccgcagtctgtgttgcagcttcctacttcaattgctgctggaggggaaggacttacggatgtctccccagaaacaaccaccccggagcccccgtcttccgctgcagtttccccgggaacagaggaacctgctggcgacaccaagaaaaaaattggttgtgaattcactccttaaaccaaaaaccaaattcttacgcagaatgaagactgctaagggaaagctaaaggcatagatgttacctttttaagaaacacattttggaacctttgtgagttatttcattgcttgagtcagctatcctcaaccctttattgcttgagaatgtttccctttgtaaaagagattgctaaaattacgtgttctaaagcactctgtttagagttagagttgcctatgggaaaagcagcatataagcatcctcgattcagagaggctgatttcgtccttagacgttttccccgttctgtcttaagatgacagtggtctctggccgggcgcggtggctcactcctgtaatcccagcactttggtaggctgaggcgggtggatcacctgaggtcaagagttcgagaccagcctggccaacatgttgacattttgctaaaggctgtgggagacactcctattatgaaaacaaagaagtgggcagtagagcgaacacgaaccatccaaggactcattgacttcatcaaaaagtttcttaaacttgtggcctcagaacagttgtttatttatgtgaatcagtcctttgctccttccccagaccaagaagttggaactctctatgagtgttttggcagtgatggtaaactggttttacattactgcaagtctcaggcgtggggatgaaccacaaagaaaatcaacttgctactacatgaaatggattttcacggaagagacagctctgaaaagttttgatgcttgtggcaagagacttaacagatgtgatctatttagtatgtgtctactctatgtttatgcataagaaaacatccatagcatgaatggactcagaaaaatgtgatttgtattaatgcaccagtcatcataaaagatggtcatgatagtacacccattgctcctacttgttactattattgctgcagatctgcctccaaggttgaaaaggagactaagactgtataaacatcttcattgtcagttctcaaaatgactgaaattgttttcatggtaaaagttaatatactaaagggttcctttttttttaatgtttacatttatctctatgtttacctttttagtcacattgacctgctggctgaatacctcaaatagtccagtagagggcagtccaccaggcagaaaaggttaggcgttttggtttcacatctttgctggggaataataggggaaatggctgtttttgctaatttttagctaatatctagccaggagagcaagcacataggacagactgaaagactgtaattttacacaatacacatggcttaattattttattgggatacagaaaaatataaattctggacaaataagtcatatacctgttttcagtcctaacatttaaggattcttgagtcccaatcacataactgtggtgttactctgtcatttatatggtgtcaaaagcacttgatgagtaaacccagtagcatctttttgagtgtttcataatgcattttccaacttgaaaacaataattgaaaaatagccttattgtatattttatgccatgactaaaagtgccatttttactgatgctattagactgataatttcttgaagtgaaatttaacctttttttctctttagtattatgtttataatgccatatttttagaaagcattccagatcaggcatggtggcttacacctgtaatcccagcactttggaaggctgaggtgtggggattgcgtgaagccacaagtttgagaccagcctggttagcaaggcaagatccccaactctacaaaaaaataaaaattaaaaaaaaattattaggctgcagaggcaagaggatcccctgagcccagaagttcaagggtatagtgagtcgtgattgtaccactgcattcctgctgagcaacagagtgagaccccatctcaaaaaagaaaaaaaaaggcattctagtaaatcgaatgtaatgtgaatggaatttcaaaacaggatctaagatggtatgtagtagaattcaaagtaatatcattttaaagttaaatgagtatggaaaaggtctgttctctagttttgtccagttcagtttactgaaggaatatatttaattatattcatatatttaacaaataaaaatatgttgaattttcgtattgtttgccactgagggttcagatgatagacctcaaaaaaatcgaaaatactggttgaaatttgtagcatccatttagttattctttttgacctaaataacttaatagtttattaaatctaaggttagctaaatatgtagctaaccttatttgttttctttcctaacaactctgaagaatacataggactttgcacttttttttttttttttttttttaaagagacagcgtttcggtcttgttgcccaggctggactgtaatggcacaatcttggctcattgcaacctctacctcccgggttcaagtgattctcctgcctcagcctcctgagtagctgggattacaggcacctgccaccacacccgcctaattttttgttatttttagtggagacagggttttaccattttggccaggctggtctcaaactcctgactgacctcaggtgatccacccgccttggcctcccaaagtgctgggattataggtgtgagccaccgtgccgggcctggactttgtactttttcaaatcatatttaattatttcttgatctttactcaaagaattattctgcgctaaatttgcaacattaaacaataattaagcctggatccgataagttattgggtgactagaacctacaacacaatttatttttaatttaaactctcaagtctgattaaacttgggggaaaaactgaacattcaggtgatattttaaattttctttgtgactaaatagatgtcattaatatcatgcttcatcttactgtgcatagatgacccatggcacacaaagtatatgtataatattgcaatattgtacttccatctttaaaagtatgccaaagacttcataatgaattcaccatatttaaggaataaggcaaattaatgtttatccgaaatcaaaatgagattggataattcctggaatctgatttctgtaagtttcagtcctaaagggaccttaaatatctactagaacgaagtacagtgtatttctcagattacatgacattagtcaaccaatttagttgtaacacaaagtgagaaagccttaggtgttgaaggagtgtgaaaataaaaatctcttttcatgcagtttctgcttcattttccaaggattataatatgctgagtaaacttttggcactaaggaagccagctacaggccacgtaatgaaaactattcagaaaacagttcagcaaatactactatttgaatacagttcaaatcgtatttatataaatactctgcctacattatttaacccaaactggattattcaccattctttgaagatgccttgtgttttctgttatctacttctgctcgtgcagtttacttacaccttcaccctttcaaatcctaactcttcttcaaggcctgattcagattttaactttttaaaggctatctgaatcattcaaggagaagataccctttctctcataaaaacacttagagcaaactaccactattaaatcacttattgcatactgcctcagagccatgtgtccagttattctggtttttatctggtacccacacacacataatacttagtacatttccttatatgtaaataattagtaatgtaacacatcgagtgaatgaaattgtgattagcaaagtatgacagctaaaaacaaaggaaattttgtatagtttaagtttttgtacagcagaaggtaatggaaaatatttgcaacatatgacagtgtttttaatgtcttaagtatatgaagaatttgtttcaattggtaagaaaagaccaactgaaaaataggcaaaacataccaaatttcgattcacaaaaagatacaaatggccaacaaaacatgaaacaccttgaaccccattggttacaaaaaatacaaataaaaacaatgctgactgacaataaaaataatgtacatcttgctattagcagagttgtggggaaatcctgtcatattttggtgaatagaatatgagttggtatatcacttttagggggccatttggcaatatcaaaaaccttgaaacgtaagtataaacttcagtttgttcgtataacctgtcattcacatattgagtgcctactatgtcctaaatattggaataacactaataaagctcataagagactaaaaaaaaac

SEQ ID NO: 360655 - DNA, 4961 bp, Homo sapiens
aaagatgcttaaggaaaaagtgtgaaataaggctttcatatcctgcataactgacttaatcggggcacagactattagcagaaaatgctattccagtgaaccatgaggaatccactagacagagagctttataaccagaataactagagacatcaatttaaagactgctgatttaaaagcagaaagaaaaaaaagctgatttaaaggcaaagtaattaataaaactaactaattttgtctgcccaagttcttgcagtttggaaataatacttccatggaattttactttcacaaacctggagtaactacatgtactttaaagtaacaaattatacgccacttagcgattctgcagtggaattgatgatgttaacctgttacttatatagagctttatagtatgcaaacagatttatgtctttctgtcttttgaactaactgaattgcttttttaaaatttccagttaacacctgttacaaaatcacattgaatgcctttggttggttctctgctccatcgagtctgctgttttctgtgaacacaacaccatcttactctttgtctcctttgcctgtgaagtcctgattactgctttcttcacctggttaaatcctgcttatttcttatttcccacaaagccatcactgacccttttgctaggctagagtagtgtacatttctgtacgctacatacttcattagatgtacttttctcacccgtatttattcatgtgtgtctctgcctctcctacagattataagctcattgagggaagagatcacattaatcttcatagttccatgtacaattctcagcacatcatagacactgataaactaagctgttattgagagcccttcccctcatttataatgtacaagagtaaaatctggatttgctcataaattgtcaggcactgaacacaaattatatctgtattacaaaaaattcacattataatgcacattgttttctgttacagttctgaaatttttgtgccagaactctactcagccataaccacaaattgatatttcagcatgaactatttaaagataatttaacaataacgtctattgagtacatataccaggcactgaaagttagtgtattatctcattttgtctttcctaacagacccaagaggtataggtcctattattttccatatcttacaaataaagaggatgagagattatttgtaaagccaggattcaaacccagtttatttatgtgaatcagtcctttgctccttccccagaccaagaagttggaactctctatgagtgttttggcagtgatggtaaactggttttacattactgcaagtctcaggcgtggggatgaaccacaaagaaaatcaacttgctactacatgaaatggattttcacggaagagacagctctgaaaagttttgatgcttgtggcaagagacttaacagatgtgatctatttagtatgtgtctactctatgtttatgcataagaaaacatccatagcatgaatggactcagaaaaatgtgatttgtattaatgcaccagtcatcataaaagatggtcatgatagtacacccattgctcctacttgttactattattgctgcagatctgcctccaaggttgaaaaggagactaagactgtataaacatcttcattgtcagttctcaaaatgactgaaattgttttcatggtaaaagttaatatactaaagggttcctttttttttaatgtttacatttatctctatgtttacctttttagtcacattgacctgctggctgaatacctcaaatagtccagtagagggcagtccaccaggcagaaaaggttaggcgttttggtttcacatctttgctggggaataataggggaaatggctgtttttgctaatttttagctaatatctagccaggagagcaagcacataggacagactgaaagactgtaattttacacaatacacatggcttaattattttattgggatacagaaaaatataaattctggacaaataagtcatatacctgttttcagtcctaacatttaaggattcttgagtcccaatcacataactgtggtgttactctgtcatttatatggtgtcaaaagcacttgatgagtaaacccagtagcatctttttgagtgtttcataatgcattttccaacttgaaaacaataattgaaaaatagccttattgtatattttatgccatgactaaaagtgccatttttactgatgctattagactgataatttcttgaagtgaaatttaacctttttttctctttagtattatgtttataatgccatatttttagaaagcattccagatcaggcatggtggcttacacctgtaatcccagcactttggaaggctgaggtgtggggattgcgtgaagccacaagtttgagaccagcctggttagcaaggcaagatccccaactctacaaaaaaataaaaattaaaaaaaaattattaggctgcagaggcaagaggatcccctgagcccagaagttcaagggtatagtgagtcgtgattgtaccactgcattcctgctgagcaacagagtgagaccccatctcaaaaaagaaaaaaaaaggcattctagtaaatcgaatgtaatgtgaatggaatttcaaaacaggatctaagatggtatgtagtagaattcaaagtaatatcattttaaagttaaatgagtatggaaaaggtctgttctctagttttgtccagttcagtttactgaaggaatatatttaattatattcatatatttaacaaataaaaatatgttgaattttcgtattgtttgccactgagggttcagatgatagacctcaaaaaaatcgaaaatactggttgaaatttgtagcatccatttagttattctttttgacctaaataacttaatagtttattaaatctaaggttagctaaatatgtagctaaccttatttgttttctttcctaacaactctgaagaatacataggactttgcacttttttttttttttttttttttaaagagacagcgtttcggtcttgttgcccaggctggactgtaatggcacaatcttggctcattgcaacctctacctcccgggttcaagtgattctcctgcctcagcctcctgagtagctgggattacaggcacctgccaccacacccgcctaattttttgttatttttagtggagacagggttttaccattttggccaggctggtctcaaactcctgactgacctcaggtgatccacccgccttggcctcccaaagtgctgggattataggtgtgagccaccgtgccgggcctggactttgtactttttcaaatcatatttaattatttcttgatctttactcaaagaattattctgcgctaaatttgcaacattaaacaataattaagcctggatccgataagttattgggtgactagaacctacaacacaatttatttttaatttaaactctcaagtctgattaaacttgggggaaaaactgaacattcaggtgatattttaaattttctttgtgactaaatagatgtcattaatatcatgcttcatcttactgtgcatagatgacccatggcacacaaagtatatgtataatattgcaatattgtacttccatctttaaaagtatgccaaagacttcataatgaattcaccatatttaaggaataaggcaaattaatgtttatccgaaatcaaaatgagattggataattcctggaatctgatttctgtaagtttcagtcctaaagggaccttaaatatctactagaacgaagtacagtgtatttctcagattacatgacattagtcaaccaatttagttgtaacacaaagtgagaaagccttaggtgttgaaggagtgtgaaaataaaaatctcttttcatgcagtttctgcttcattttccaaggattataatatgctgagtaaacttttggcactaaggaagccagctacaggccacgtaatgaaaactattcagaaaacagttcagcaaatactactatttgaatacagttcaaatcgtatttatataaatactctgcctacattatttaacccaaactggattattcaccattctttgaagatgccttgtgttttctgttatctacttctgctcgtgcagtttacttacaccttcaccctttcaaatcctaactcttcttcaaggcctgattcagattttaactttttaaaggctatctgaatcattcaaggagaagataccctttctctcataaaaacacttagagcaaactaccactattaaatcacttattgcatactgcctcagagccatgtgtccagttattctggtttttatctggtacccacacacacataatacttagtacatttccttatatgtaaataattagtaatgtaacacatcgagtgaatgaaattgtgattagcaaagtatgacagctaaaaacaaaggaaattttgtatagtttaagtttttgtacagcagaaggtaatggaaaatatttgcaacatatgacagtgtttttaatgtcttaagtatatgaagaatttgtttcaattggtaagaaaagaccaactgaaaaataggcaaaacataccaaatttcgattcacaaaaagatacaaatggccaacaaaacatgaaacaccttgaaccccattggttacaaaaaatacaaataaaaacaatgctgactgacaataaaaataatgtacatcttgctattagcagagttgtggggaaatcctgtcatattttggtgaatagaatatgagttggtatatcacttttagggggccatttggcaatatcaaaaaccttgaaacgtaagtataaacttcagtttgttcgtataacctgtcattcacatattgagtgcctactatgtcctaaatattggaataacactaataaagctcataagagactaaaaaaaaac

SEQ ID NO: 360656 - DNA, 2420 bp, Homo sapiens
aaagatgcttaaggaaaaagtgtgaaataaggctttcatatcctgcataactgacttaatcggggcacagactattagcagaaaatgctattccagtgaaccatgaggaatccactagacagagagctttataaccagaataactagagacatcaatttaaagactgctgatttaaaagcagaaagaaaaaaaagctgatttaaaggcaaagtaattaataaaactaactaattttgtctgcccaagttcttgcagtttggaaataatacttccatggaattttactttcacaaacctggagtaactacatgtactttaaagtaacaaattatacgccacttagcgattctgcagtggaattgatgatgttaacctgttacttatatagagctttatagtatgcaaacagatttatgtctttctgtcttttgaactaactgaattgcttttttaaaatttccagttaacacctgttacaaaatcacattgaatgcctttggttggttctctgctccatcgagtctgctgttttctgtgaacacaacaccatcttactctttgtctcctttgcctgtgaagtcctgattactgctttcttcacctggttaaatcctgcttatttcttatttcccacaaagccatcactgacccttttgctaggctagagtagtgtacatttctgtacgctacatacttcattagatgtacttttctcacccgtatttattcatgtgtgtctctgcctctcctacagattataagctcattgagggaagagatcacattaatcttcatagttccatgtacaattctcagcacatcatagacactgataaactaagctgttattgagagcccttcccctcatttataatgtacaagagtaaaatctggatttgctcataaattgtcaggcactgaacacaaattatatctgtattacaaaaaattcacattataatgcacattgttttctgttacagttctgaaatttttgtgccagaactctactcagccataaccacaaattgatatttcagcatgaactatttaaagataatttaacaataacgtctattgagtacatataccaggcactgaaagttagtgtattatctcattttgtctttcctaacagacccaagaggtataggtcctattattttccatatcttacaaataaagaggatgagagattatttgtaaagccaggattcaaacccaggtgtgtctcagagcctatacacttaatcaccacactatattggctaagagagatgcaagcaatattgatggttcatggttggtgatcaaaatagtatctgtcaaccaactattctgatactttttttttaaatactaagtttaatccaggacattttagtcccaaatttggatattaaaggaaaactaaatatgttacctgcaaataaagttttgttttccaaaaagaaaattattaaagggcacttcaacactgtgactttaagtactagaaatattttagtaaaaacagactaaactgaaacattgagcagtgaatcctttaaagagcaaggttataaggttttaattgttactttttttcctgcttcatttgcctgtaagtgactttattaaaaaacctaagtatatatgtcatacatttacccaaggaaagtgtacaaactaccttgaatattagacatattgatttttggctgtgtgcctgtgtaattatcttaggagaaattctttgtgggtaagtggggacatttttacgataatgtaatttcttgaatagccagctcttcaaaagctatttgtaaaaaatatttaaaagtttcttagttatacaaagttaggaaccactgttctaggaactggaattgtgttatttttattcctctggaggaaaaatgagatcttcgtaatgatctctttaaattgactatttagaaaagttaggagttcagagaagctttcttcaattgtgaaaacaatacaaaatagctagctgattggaatgcagaaaaatgcagattaatcaggataccattaaacatctctgtttttccttcctttcttgtagtttatttatgtgaatcagtcctttgctccttccccagaccaagaagttggaactctctatgagtgttttggcagtgatggtaaactggttttacattactgcaagtctcaggcgtggggatgaaccacaaagaaaatcaacttgctactacatgaaatggattttcacggaagagacagctctgaaaagttttgatgcttgtggcaagagacttaacagatgtgatctatttagtatgtgtctactctatgtttatgcataagaaaacatccatagcatgaatggactcagaaaaatgtgatttgtattaatgcaccagtcatcataaaagatggtcatgatagtaca

SEQ ID NO: 360657 - DNA, 913 bp, Homo sapiens
tggagtgtgcgcattcgaccgagcacagacacgttgcccaccgctcctctcccgaggtctgtagtcgcggagaaacacatgttgcgttactaacgttcagaggtctgcgacagcttcgatttgaatgactagccgggaacaccaagtttcactgtgtaattgcgtccccctactccggcgcctcctttgcgacgctccctggagaaaagcacgcccactgcacgcgctcagtcgctacttccgctctcgagtgtctccaagcaagatggcggaggagccgcagtctgtgttgcagcttcctacttcaattgctgctggaggggaaggacttacggatgtctccccagaaacaaccaccccggagcccccgtcttccgctgcagtttccccgggaacagaggaacctgctggcgacaccaagaaaaaaattgacattttgctaaaggctgtgggagacactcctattatgaaaacaaagaagtgggcagtagagcgaacacgaaccatccaaggactcattgacttcatcaaaaagtttcttaaacttgtggcctcagaacagttgtttatttatgtgaatcagtcctttgctccttccccagaccaagaagttggaactctctatgagtgttttggcagtgatggtaaactggttttacattactgcaagtctcaggcgtggggatgaaccacaaagaaaatcaacttgctactacatgaaatggattttcacggaagagacagctctgaaaagttttgatgcttgtggcaagagacttaacagatgtgatctatttagtatgtgtctactctatgtttatgcataagaaaacatccatagcatgaatggactcagaaaaatgtgatttgtattaatgcaccagtcatcataaaagatggtcatgatagtaca

SEQ ID NO: 360658 - DNA, 1030 bp, Homo sapiens
tggagtgtgcgcattcgaccgagcacagacacgttgcccaccgctcctctcccgaggtctgtagtcgcggagaaacacatgttgcgttactaacgttcagaggtctgcgacagcttcgatttgaatgactagccgggaacaccaagtttcactgtgtaattgcgtccccctactccggcgcctcctttgcgacgctccctggagaaaagcacgcccactgcacgcgctcagtcgctacttccgctctcgagtgtctccaagcaagatggcggaggagccgcagtctgtgttgcagcttcctacttcaattgctgctggaggggaaggacttacggatgtctccccagaaacaaccaccccggagcccccgtcttccgctgcagtttccccgggaacagaggaacctgctggcgacaccaagaaaaaaattggttgtgaattcactccttaaaccaaaaaccaaattcttacgcagaatgaagactgctaagggaaagctaaaggcatagatgttacctttttaagaaacacattttggaacctttttgacattttgctaaaggctgtgggagacactcctattatgaaaacaaagaagtgggcagtagagcgaacacgaaccatccaaggactcattgacttcatcaaaaagtttcttaaacttgtggcctcagaacagttgtttatttatgtgaatcagtcctttgctccttccccagaccaagaagttggaactctctatgagtgttttggcagtgatggtaaactggttttacattactgcaagtctcaggcgtggggatgaaccacaaagaaaatcaacttgctactacatgaaatggattttcacggaagagacagctctgaaaagttttgatgcttgtggcaagagacttaacagatgtgatctatttagtatgtgtctactctatgtttatgcataagaaaacatccatagcatgaatggactcagaaaaatgtgatttgtattaatgcaccagtcatcataaaagatggtcatgatagtaca

SEQ ID NO: 360659 - DNA, 2150 bp, Homo sapiens
tggagtgtgcgcattcgaccgagcacagacacgttgcccaccgctcctctcccgaggtctgtagtcgcggagaaacacatgttgcgttactaacgttcagaggtctgcgacagcttcgatttgaatgactagccgggaacaccaagtttcactgtgtaattgcgtccccctactccggcgcctcctttgcgacgctccctggagaaaagcacgcccactgcacgcgctcagtcgctacttccgctctcgagtgtctccaagcaagatggcggaggagccgcagtctgtgttgcagcttcctacttcaattgctgctggaggggaaggacttacggatgtctccccagaaacaaccaccccggagcccccgtcttccgctgcagtttccccgggaacagaggaacctgctggcgacaccaagaaaaaaattgacattttgctaaaggctgtgggagacactcctattatgaaaacaaagaagtgggcagtagagcgaacacgaaccatccaaggactcattgacttcatcaaaaagtttcttaaacttgtggcctcagaacagttgtttatttatgtgaatcagtcctttgctccttccccagaccaagaagttggaactctctatgagtgttttggcagtgatggtaaactggttttacattactgcaagtctcaggcgtggggatgaaccacaaagaaaatcaacttgctactacatgaaatggattttcacggaagagacagctctgaaaagttttgatgcttgtggcaagagacttaacagatgtgatctatttagtatgtgtctactctatgtttatgcataagaaaacatccatagcatgaatggactcagaaaaatgtgatttgtattaatgcaccagtcatcataaaagatggtcatgatagtacacccattgctcctacttgttactattattgctgcagatctgcctccaaggttgaaaaggagactaagactgtataaacatcttcattgtcagttctcaaaatgactgaaattgttttcatggtaaaagttaatatactaaagggttcctttttttttaatgtttacatttatctctatgtttacctttttagtcacattgacctgctggctgaatacctcaaatagtccagtagagggcagtccaccaggcagaaaaggttaggcgttttggtttcacatctttgctggggaataataggggaaatggctgtttttgctaatttttagctaatatctagccaggagagcaagcacataggacagactgaaagactgtaattttacacaatacacatggcttaattattttattgggatacagaaaaatataaattctggacaaataagtcatatacctgttttcagtcctaacatttaaggattcttgagtcccaatcacataactgtggtgttactctgtcatttatatggtgtcaaaagcacttgatgagtaaacccagtagcatctttttgagtgtttcataatgcattttccaacttgaaaacaataattgaaaaatagccttattgtatattttatgccatgactaaaagtgccatttttactgatgctattagactgataatttcttgaagtgaaatttaacctttttttctctttagtattatgtttataatgccatatttttagaaagcattccagatcaggcatggtggcttacacctgtaatcccagcactttggaaggctgaggtgtggggattgcgtgaagccacaagtttgagaccagcctggttagcaaggcaagatccccaactctacaaaaaaataaaaattaaaaaaaaattattaggctgcagaggcaagaggatcccctgagcccagaagttcaagggtatagtgagtcgtgattgtaccactgcattcctgctgagcaacagagtgagaccccatctcaaaaaagaaaaaaaaaggcattctagtaaatcgaatgtaatgtgaatggaatttcaaaacaggatctaagatggtatgtagtagaattcaaagtaatatcattttaaagttaaatgagtatggaaaaggtctgttctctagttttgtccagttcagtttactgaaggaatatatttaattatattcatatatttaacaaataaaaatatgttgaattttc

SEQ ID NO: 360660 - DNA, 4247 bp, Homo sapiens
tggagtgtgcgcattcgaccgagcacagacacgttgcccaccgctcctctcccgaggtctgtagtcgcggagaaacacatgttgcgttactaacgttcagaggtctgcgacagcttcgatttgaatgactagccgggaacaccaagtttcactgtgtaattgcgtccccctactccggcgcctcctttgcgacgctccctggagaaaagcacgcccactgcacgcgctcagtcgctacttccgctctcgagtgtctccaagcaagatggcggaggagccgcagtctgtgttgcagcttcctacttcaattgctgctggaggggaaggacttacggatgtctccccagaaacaaccaccccggagcccccgtcttccgctgcagtttccccgggaacagaggaacctgctggcgacaccaagaaaaaaattgacattttgctaaaggctgtgggagacactcctattatgaaaacaaagaagtgggcagtagagcgaacacgaaccatccaaggactcattgacttcatcatcctttgctccttccccagaccaagaagttggaactctctatgagtgttttggcagtgatggtaaactggttttacattactgcaagtctcaggcgtggggatgaaccacaaagaaaatcaacttgctactacatgaaatggattttcacggaagagacagctctgaaaagttttgatgcttgtggcaagagacttaacagatgtgatctatttagtatgtgtctactctatgtttatgcataagaaaacatccatagcatgaatggactcagaaaaatgtgatttgtattaatgcaccagtcatcataaaagatggtcatgatagtacacccattgctcctacttgttactattattgctgcagatctgcctccaaggttgaaaaggagactaagactgtataaacatcttcattgtcagttctcaaaatgactgaaattgttttcatggtaaaagttaatatactaaagggttcctttttttttaatgtttacatttatctctatgtttacctttttagtcacattgacctgctggctgaatacctcaaatagtccagtagagggcagtccaccaggcagaaaaggttaggcgttttggtttcacatctttgctggggaataataggggaaatggctgtttttgctaatttttagctaatatctagccaggagagcaagcacataggacagactgaaagactgtaattttacacaatacacatggcttaattattttattgggatacagaaaaatataaattctggacaaataagtcatatacctgttttcagtcctaacatttaaggattcttgagtcccaatcacataactgtggtgttactctgtcatttatatggtgtcaaaagcacttgatgagtaaacccagtagcatctttttgagtgtttcataatgcattttccaacttgaaaacaataattgaaaaatagccttattgtatattttatgccatgactaaaagtgccatttttactgatgctattagactgataatttcttgaagtgaaatttaacctttttttctctttagtattatgtttataatgccatatttttagaaagcattccagatcaggcatggtggcttacacctgtaatcccagcactttggaaggctgaggtgtggggattgcgtgaagccacaagtttgagaccagcctggttagcaaggcaagatccccaactctacaaaaaaataaaaattaaaaaaaaattattaggctgcagaggcaagaggatcccctgagcccagaagttcaagggtatagtgagtcgtgattgtaccactgcattcctgctgagcaacagagtgagaccccatctcaaaaaagaaaaaaaaaggcattctagtaaatcgaatgtaatgtgaatggaatttcaaaacaggatctaagatggtatgtagtagaattcaaagtaatatcattttaaagttaaatgagtatggaaaaggtctgttctctagttttgtccagttcagtttactgaaggaatatatttaattatattcatatatttaacaaataaaaatatgttgaattttcgtattgtttgccactgagggttcagatgatagacctcaaaaaaatcgaaaatactggttgaaatttgtagcatccatttagttattctttttgacctaaataacttaatagtttattaaatctaaggttagctaaatatgtagctaaccttatttgttttctttcctaacaactctgaagaatacataggactttgcacttttttttttttttttttttttaaagagacagcgtttcggtcttgttgcccaggctggactgtaatggcacaatcttggctcattgcaacctctacctcccgggttcaagtgattctcctgcctcagcctcctgagtagctgggattacaggcacctgccaccacacccgcctaattttttgttatttttagtggagacagggttttaccattttggccaggctggtctcaaactcctgactgacctcaggtgatccacccgccttggcctcccaaagtgctgggattataggtgtgagccaccgtgccgggcctggactttgtactttttcaaatcatatttaattatttcttgatctttactcaaagaattattctgcgctaaatttgcaacattaaacaataattaagcctggatccgataagttattgggtgactagaacctacaacacaatttatttttaatttaaactctcaagtctgattaaacttgggggaaaaactgaacattcaggtgatattttaaattttctttgtgactaaatagatgtcattaatatcatgcttcatcttactgtgcatagatgacccatggcacacaaagtatatgtataatattgcaatattgtacttccatctttaaaagtatgccaaagacttcataatgaattcaccatatttaaggaataaggcaaattaatgtttatccgaaatcaaaatgagattggataattcctggaatctgatttctgtaagtttcagtcctaaagggaccttaaatatctactagaacgaagtacagtgtatttctcagattacatgacattagtcaaccaatttagttgtaacacaaagtgagaaagccttaggtgttgaaggagtgtgaaaataaaaatctcttttcatgcagtttctgcttcattttccaaggattataatatgctgagtaaacttttggcactaaggaagccagctacaggccacgtaatgaaaactattcagaaaacagttcagcaaatactactatttgaatacagttcaaatcgtatttatataaatactctgcctacattatttaacccaaactggattattcaccattctttgaagatgccttgtgttttctgttatctacttctgctcgtgcagtttacttacaccttcaccctttcaaatcctaactcttcttcaaggcctgattcagattttaactttttaaaggctatctgaatcattcaaggagaagataccctttctctcataaaaacacttagagcaaactaccactattaaatcacttattgcatactgcctcagagccatgtgtccagttattctggtttttatctggtacccacacacacataatacttagtacatttccttatatgtaaataattagtaatgtaacacatcgagtgaatgaaattgtgattagcaaagtatgacagctaaaaacaaaggaaattttgtatagtttaagtttttgtacagcagaaggtaatggaaaatatttgcaacatatgacagtgtttttaatgtcttaagtatatgaagaatttgtttcaattggtaagaaaagaccaactgaaaaataggcaaaacataccaaatttcgattcacaaaaagatacaaatggccaacaaaacatgaaacaccttgaaccccattggttacaaaaaatacaaataaaaacaatgctgactgacaataaaaataatgtacatcttgctattagcagagttgtggggaaatcctgtcatattttggtgaatagaatatgagttggtatatcacttttagggggccatttggcaatatcaaaaaccttgaaacgtaagtataaacttcagtttgttcgtataacctgtcattcacatattgagtgcctactatgtcctaaatattggaataacactaataaagctcataagagactaaaaaaaaac

SEQ ID NO: 360661 - DNA, 840 bp, Homo sapiens
tggagtgtgcgcattcgaccgagcacagacacgttgcccaccgctcctctcccgaggtctgtagtcgcggagaaacacatgttgcgttactaacgttcagaggtctgcgacagcttcgatttgaatgactagccgggaacaccaagtttcactgtgtaattgcgtccccctactccggcgcctcctttgcgacgctccctggagaaaagcacgcccactgcacgcgctcagtcgctacttccgctctcgagtgtctccaagcaagatggcggaggagccgcagtctgtgttgcagcttcctacttcaattgctgctggaggggaaggacttacggatgtctccccagaaacaaccaccccggagcccccgtcttccgctgcagtttccccgggaacagaggaacctgctggcgacaccaagaaaaaaattgacattttgctaaaggctgtgggagacactcctattatgaaaacaaagaagtgggcagtagagcgaacacgaaccatccaaggactcattgacttcatcaaaaagtttcttaaacttgtggcctcagaacagttgtttatttatgtgaatcagtcctttgctccttccccagaccaagaagttggaactctctatgagtgttttggcagtgatggtaaactggttttacattactgcaagtctcaggcgtggggatgaaccacaaagaaaatcaacttgctactacatgaaatggattttcacggaagagacagctctgaaaagttttgatgcttgtggcaagagacttaacagatgtgatctatttagtatgtgtctactctggtaagctactctgaaagtgggtccga

SEQ ID NO: 360662 - DNA, 505 bp, Homo sapiens
agcccgggagtgagagaaagcggctccgggggcatagcgggccagtaagggccgctcctcctttgaagaggttttgcgtctctttccgccggtggcgtcggcgctcacgcaggggcgggtcccggtagcgccaggcggtgcagggcgggaaggggattcgtggcgacggcggcggcagggacagcaggagcagtggtgctgtcagcgcggccgtcggagacatgggagacccggggtcggagataatagaatctgtccctccagctggccctgaggcatctgagtcaacaacggatgaaaatgaagacgacattcagtttgtcagtgaaggaccattacgacctgttcttgaatacattgatctggtcagcagtgatgatgaagagcctagcacctcttatactgatgggtcggcgctttgcctgatgaccctacctctctgacagatctgagaagagtttactcttcagcttttaagtgaataaagatgataaatgtcctaaaa

SEQ ID NO: 360663 - DNA, 5254 bp, Homo sapiens
agcccgggagtgagagaaagcggctccgggggcatagcgggccagtaagggccgctcctcctttgaagaggttttgcgtctctttccgccggtggcgtcggcgctcacgcaggggcgggtcccggtagcgccaggcggtgcagggcgggaaggggattcgtggcgacggcggcggcagggacagcaggagcagtggtgctgtcagcgcggccgtcggagacatgggagacccggggtcggagataatagaatctgtccctccagctggccctgaggcatctgagtcaacaacggatgaaaatgaagacgacattcagtttgtcagtgaaggaccattacgacctgttcttgaatacattgatctggtcagcagtgatgatgaagagcctagcacctcttatactgatgagaatattaaacgtaaagaccatattgattatcagaaggataaagttgctttaactctggctcgtctagcccgccatgttgaagtggagaaacagcagaaagaagagaagaatagagcattcagagaaaaaattgattttcagcatgctcatgggttacaagaattggaatttattcgaggacattctgatacagaagcagcaagactgtgtgtggaccagtggctaaaaatgccaggactcaaaacaggcacaattaattgtggaacaaaaagttcattccgaagaggaggccacacgtgggtgtctgggaaaccaattttatgtcctataatgcactgtaacaaggagtttgacaatgggcaccttctcttaggacatttgaaaaggttcgatcactctccatgtgatccaacaattacactacatggacctttcttcagctcctttgcttgtgtagtatgttataaaaaatttgttactcaacaacaatatagagatcacctttttgataaggaagccacagatgatggacataacaacaaccttcttcctcagattattcagtgttttgcatgtccaaattgcttccttctttttagcagaaaggaggagtgttcaaagcatatgtctggaaagaatcatttccatcagagtttcaaactgggtgataacaaaggaattgcacatccaatatctttcccatcttttgcaaagaaacttttgatctctctgtgcaaagatgttccctttcaagttaagtgtgtggcctgccacaagacactgcgttcccacatggagctcactgcccatttcagagttcattgtcgaaatgctggacctgtagctgtagctagagaagagtgcattacccaggttgcagagaaattcatattaagaggttattgtccagattgcaatcaagtctttgtggatgaaaccagcacccaaaatcataagcagaattcaggacacaaagtccgagtcattaactcagtggaagaatcagtcttactctattgccacagcagcgaagggaacaaggatccttcttctgacttgcatttattgttggatcaatcaaaattttcatcacttaaaagaaccatgtctattaaagaatctagctcactggagtgcattgccattccaaaaaagaagatgaatttaaaagataaaagccatgaaggtgttgcttgtgtccagaaagaaaaatcagtagttaaaacctggttctgtgaatgcaatcagcgattcccaagtgaagatgcagtagaaaagcatgttttctcagcaaacacaatgggttataaatgtgtggtctgtggaaaggtatgtgatgattcaggggtcattcgtttacacatgagccggattcacggaggggcacatttaaataactttcttttctggtgtcggacatgcaaaaaggagttaacaaggaaagatactatcatggcacatgtgactgaatttcataatggacacagatatttttatgagatggatgaggtagaaggtgaaactttgccatcatcctctacaacattggataatttgactgctaacaagccttcatcagctattactgttattgatcattccccggcaaatagttctccgaggggtaaatggcaatgccggatttgtgaagatatgtttgattcccaggaatatgtaaaacagcactgcatgtctttggcaagccacaagtttcatagatacagctgtgctcactgcagaaagccttttcataagatagaaacattgtaccgacattgccaagatgagcatgacaatgagataaagattaaatacttctgtgggctttgtgatcttatctttaatgtggaagaagcatttctgagtcattatgaggagcaccacagcatagattatgtatttgtgtcagaaaaaactgaaacttcaattaaaaccgaagatgattttccagtaatagagaccagtaaccagttaacttgtggttgccgtgagagttacatctgtaaagtcaacagaaaagaagattatagcagatgtctccaaatcatgctggataaaggaaaactgtggtttcgctgcagtttatgttcggcaacagcacagaatttaaccgacatgaacactcatatccatcaagtgcacaaagaaaagagtgatgaggaggagcagcagtatgtaatcaagtgtggcacctgcaccaaagcatttcatgatcctgagagtgcacagcagcatttccatagaaaacattgcttcttacagaaacccagtgtggctcattttggatctgaaaaatcaaacctgtacaagtttactgctagtgcctcacatacagagagaaaactgaaacaggcaataaactattcaaaaagtttagacatggagaaaggagttgagaatgacctaagctatcagaatatagaggaagaaattgttgagcttccagatttggattacctgcgaaccatgactcatatagtctttgtagattttgataactggtcaaacttttttggtcatctaccagggcatctaaaccaaggaacatttatttggggctttcaaggaggaaacaccaattggaagcctccgctcaactgtaagatttataactacctgaacaggattggatgcttcttccttcatcctcgctgtagtaaaagaaaagatgctgctgattttgccatatgtatgcatgctggccgtctagatgaacaactacccaagcaaattcctttcaccatcctctcaggagatcaaggttttctggagctagagaatcaatttaagaagactcagaggccagctcatatactaaaccctcaccacttagagggagatatgatgtgtgccttgttaaatagcatatctgataccaccaaagaatgtgacagtgatgataacatgggtgccaaaaatacttcaataggagaagaatttatatccacagaagatgtggaattagaagaagctattagaagaagtcttgaggaaatgtaattaaagatattaccacacaacatcaagtggccttgaagagactgagataacgaattcttgagtttgttttctaaaggagaccagaaatccactattacaaatgtatttgaaaacatgtttttgctttcatatgttcaaaatctgatctttgttttgtatttttgtgctaatgtgcaaacatgtacagaagaaatagaatacatgttcatgcaaatataaattatgtattctaatataggtgtaacagtttcccagttaactttgaatttatatatttagatttaaaggattaaaaaaaaggaaagctcttgacagttgtttcccaaatagcattagttctttaattttatttgtactgtacaaatgatgctagtttatttttttagcagtgaaaatgaatataaaaaaggtgacataggtcaagttttccataaattctacttctcatgtggcactattatataatacctttgagatctttgtttatgtttattagaagagggtaatggaaactgatcatggaaacatttaaaattttatcagcaatgttctttgtgggtgccatgcatatgtaaattattgctttaattagagcagcacattgctaaaataaaaaatacaccttaatttttaagaaataatttaaatgaaacaatttccattccttttacctgcttagacttttatgtgacttgtatggtctcctggttaaagggaatggtgtcagaatatttgcataaaattatttttcataacagtccttttttatatattggtgtaaacataatattcttcaagaaataatgttgaaagcctactcaggaataatcttccttaactctttaaatttttatttcatgtgaagtgttttcagtttagttattcactgaattgtcagtttccttcatttggtattacatatttaattcttaaatattgaggccccattgtgagtaataaaaaatacgacataagtagaagactaagaagggcttgtcatattatctttgtgtatatgcttcatgttatttaaccagaaatgtcttatctctaaaaatttttagtagtaattatttaccaaacttaaaaacatttctataaatataaagcttttctttatatttaagacaaaatataaaggctagaatttggttccttctctgtaacactaaatattttagtgtgaaattgaatttttttattactatagtcttttcaatctataatttgtgtttttaatttcttgatatgtcacttctgttcctccctgcttgcattttttaaaaactagacattgtggcttgagaatttatcaatcatctttccgaaatgaccacattgtgcttttagtttgtatgtttaagtggtcaagcaaggctctaggaggtagtcactgagctggaccttaaacacatctgcaggagctcacaaaatgggagcaaaagaggcattccagaaagaagagtagttaagcagatgtgggggcagggcaagaggagacagcaccttgttgccagagattctacacaaaggtgtgatggacactgatgctctattaagaagcttttgtggtgtgtgtggtagagaataattaaggcttctgataagacaggaaagggatatttcatcatgactgttaagaaaaggtaactgggttgtttaatgttttaattgataattgtcactgatcgtatttctacttgttaaataattaaaaatcatcttaaaattcatactttgactttaatttagacacaaggagatgtaatcgctgtgtaacatcagagaaagctatatggattatcgtcagaagtaaatgtttctaacattgacaaaaaaaaaaa

SEQ ID NO: 360664 - DNA, 2209 bp, Homo sapiens
ctcctgtttgattatcatttttgccttttctaaaattaataggaggaaacaccaattggaagcctccgctcaactgtaagatttataactacctgaacaggattggatgcttcttccttcatcctcgctgtagtaaaagaaaagatgctgctgattttgccatatgtatgcatgctggccgtctagatgaacaactacccaagcaaattcctttcaccatcctctcaggagatcaaggttttctggagctagagaatcaatttaagaagactcagaggccagctcatatactaaaccctcaccacttagagggagatatgatgtgtgccttgttaaatagcatatctgataccaccaaagaatgtgacagtgatgataacatgggtgccaaaaatacttcaataggagaagaatttatatccacagaagatgtggaattagaagaagctattagaagaagtcttgaggaaatgtaattaaagatattaccacacaacatcaagtggccttgaagagactgagataacgaattcttgagtttgttttctaaaggagaccagaaatccactattacaaatgtatttgaaaacatgtttttgctttcatatgttcaaaatctgatctttgttttgtatttttgtgctaatgtgcaaacatgtacagaagaaatagaatacatgttcatgcaaatataaattatgtattctaatataggtgtaacagtttcccagttaactttgaatttatatatttagatttaaaggattaaaaaaaaggaaagctcttgacagttgtttcccaaatagcattagttctttaattttatttgtactgtacaaatgatgctagtttatttttttagcagtgaaaatgaatataaaaaaggtgacataggtcaagttttccataaattctacttctcatgtggcactattatataatacctttgagatctttgtttatgtttattagaagagggtaatggaaactgatcatggaaacatttaaaattttatcagcaatgttctttgtgggtgccatgcatatgtaaattattgctttaattagagcagcacattgctaaaataaaaaatacaccttaatttttaagaaataatttaaatgaaacaatttccattccttttacctgcttagacttttatgtgacttgtatggtctcctggttaaagggaatggtgtcagaatatttgcataaaattatttttcataacagtccttttttatatattggtgtaaacataatattcttcaagaaataatgttgaaagcctactcaggaataatcttccttaactctttaaatttttatttcatgtgaagtgttttcagtttagttattcactgaattgtcagtttccttcatttggtattacatatttaattcttaaatattgaggccccattgtgagtaataaaaaatacgacataagtagaagactaagaagggcttgtcatattatctttgtgtatatgcttcatgttatttaaccagaaatgtcttatctctaaaaatttttagtagtaattatttaccaaacttaaaaacatttctataaatataaagcttttctttatatttaagacaaaatataaaggctagaatttggttccttctctgtaacactaaatattttagtgtgaaattgaatttttttattactatagtcttttcaatctataatttgtgtttttaatttcttgatatgtcacttctgttcctccctgcttgcattttttaaaaactagacattgtggcttgagaatttatcaatcatctttccgaaatgaccacattgtgcttttagtttgtatgtttaagtggtcaagcaaggctctaggaggtagtcactgagctggaccttaaacacatctgcaggagctcacaaaatgggagcaaaagaggcattccagaaagaagagtagttaagcagatgtgggggcagggcaagaggagacagcaccttgttgccagagattctacacaaaggtgtgatggacactgatgctctattaagaagcttttgtggtgtgtgtggtagagaataattaaggcttctgataagacaggaaagggatatttcatcatgactgttaagaaaaggtaactgggttgtttaatgttttaattgataattgtcactgatcgtatttctacttgttaaataattaaaaatcatcttaaaattca

SEQ ID NO: 360665 - DNA, 1872 bp, Homo sapiens
taaatgttccagggcacacagaaaatgtgacagtgatgataacatgggtgccaaaaatacttcaataggagaagaatttatatccacagaagatgtggaattagaagaagctattagaagaagtcttgaggaaatgtaattaaagatattaccacacaacatcaagtggccttgaagagactgagataacgaattcttgagtttgttttctaaaggagaccagaaatccactattacaaatgtatttgaaaacatgtttttgctttcatatgttcaaaatctgatctttgttttgtatttttgtgctaatgtgcaaacatgtacagaagaaatagaatacatgttcatgcaaatataaattatgtattctaatataggtgtaacagtttcccagttaactttgaatttatatatttagatttaaaggattaaaaaaaaggaaagctcttgacagttgtttcccaaatagcattagttctttaattttatttgtactgtacaaatgatgctagtttatttttttagcagtgaaaatgaatataaaaaaggtgacataggtcaagttttccataaattctacttctcatgtggcactattatataatacctttgagatctttgtttatgtttattagaagagggtaatggaaactgatcatggaaacatttaaaattttatcagcaatgttctttgtgggtgccatgcatatgtaaattattgctttaattagagcagcacattgctaaaataaaaaatacaccttaatttttaagaaataatttaaatgaaacaatttccattccttttacctgcttagacttttatgtgacttgtatggtctcctggttaaagggaatggtgtcagaatatttgcataaaattatttttcataacagtccttttttatatattggtgtaaacataatattcttcaagaaataatgttgaaagcctactcaggaataatcttccttaactctttaaatttttatttcatgtgaagtgttttcagtttagttattcactgaattgtcagtttccttcatttggtattacatatttaattcttaaatattgaggccccattgtgagtaataaaaaatacgacataagtagaagactaagaagggcttgtcatattatctttgtgtatatgcttcatgttatttaaccagaaatgtcttatctctaaaaatttttagtagtaattatttaccaaacttaaaaacatttctataaatataaagcttttctttatatttaagacaaaatataaaggctagaatttggttccttctctgtaacactaaatattttagtgtgaaattgaatttttttattactatagtcttttcaatctataatttgtgtttttaatttcttgatatgtcacttctgttcctccctgcttgcattttttaaaaactagacattgtggcttgagaatttatcaatcatctttccgaaatgaccacattgtgcttttagtttgtatgtttaagtggtcaagcaaggctctaggaggtagtcactgagctggaccttaaacacatctgcaggagctcacaaaatgggagcaaaagaggcattccagaaagaagagtagttaagcagatgtgggggcagggcaagaggagacagcaccttgttgccagagattctacacaaaggtgtgatggacactgatgctctattaagaagcttttgtggtgtgtgtggtagagaataattaaggcttctgataagacaggaaagggatatttcatcatgactgttaagaaaaggtaactgggttgtttaatgttttaattgataattgtcactgatcgtatttctacttgttaaataattaaaaatcatcttaaaattca

SEQ ID NO: 360666 - DNA, 2073 bp, Homo sapiens
ctccatagagatgaatgcatatgattttcaaaacaggagaatttaatgtcaccatttttaatattatttggcaagcactggaaaaaacctagtgtgggaaagtagtgtaacactaatgaactgtattataatgagtaagcttgggtatgagcagttattgaaaataatattgagaatacataaatttatggcacaataactgcatgtattgattcttctttacaaatgtgacagtgatgataacatgggtgccaaaaatacttcaataggagaagaatttatatccacagaagatgtggaattagaagaagctattagaagaagtcttgaggaaatgtaattaaagatattaccacacaacatcaagtggccttgaagagactgagataacgaattcttgagtttgttttctaaaggagaccagaaatccactattacaaatgtatttgaaaacatgtttttgctttcatatgttcaaaatctgatctttgttttgtatttttgtgctaatgtgcaaacatgtacagaagaaatagaatacatgttcatgcaaatataaattatgtattctaatataggtgtaacagtttcccagttaactttgaatttatatatttagatttaaaggattaaaaaaaaggaaagctcttgacagttgtttcccaaatagcattagttctttaattttatttgtactgtacaaatgatgctagtttatttttttagcagtgaaaatgaatataaaaaaggtgacataggtcaagttttccataaattctacttctcatgtggcactattatataatacctttgagatctttgtttatgtttattagaagagggtaatggaaactgatcatggaaacatttaaaattttatcagcaatgttctttgtgggtgccatgcatatgtaaattattgctttaattagagcagcacattgctaaaataaaaaatacaccttaatttttaagaaataatttaaatgaaacaatttccattccttttacctgcttagacttttatgtgacttgtatggtctcctggttaaagggaatggtgtcagaatatttgcataaaattatttttcataacagtccttttttatatattggtgtaaacataatattcttcaagaaataatgttgaaagcctactcaggaataatcttccttaactctttaaatttttatttcatgtgaagtgttttcagtttagttattcactgaattgtcagtttccttcatttggtattacatatttaattcttaaatattgaggccccattgtgagtaataaaaaatacgacataagtagaagactaagaagggcttgtcatattatctttgtgtatatgcttcatgttatttaaccagaaatgtcttatctctaaaaatttttagtagtaattatttaccaaacttaaaaacatttctataaatataaagcttttctttatatttaagacaaaatataaaggctagaatttggttccttctctgtaacactaaatattttagtgtgaaattgaatttttttattactatagtcttttcaatctataatttgtgtttttaatttcttgatatgtcacttctgttcctccctgcttgcattttttaaaaactagacattgtggcttgagaatttatcaatcatctttccgaaatgaccacattgtgcttttagtttgtatgtttaagtggtcaagcaaggctctaggaggtagtcactgagctggaccttaaacacatctgcaggagctcacaaaatgggagcaaaagaggcattccagaaagaagagtagttaagcagatgtgggggcagggcaagaggagacagcaccttgttgccagagattctacacaaaggtgtgatggacactgatgctctattaagaagcttttgtggtgtgtgtggtagagaataattaaggcttctgataagacaggaaagggatatttcatcatgactgttaagaaaaggtaactgggttgtttaatgttttaattgataattgtcactgatcgtatttctacttgttaaataattaaaaatcatcttaaaattca

SEQ ID NO: 360667 - DNA, 1935 bp, Homo sapiens
aagaatacagtcgatgaaactcaacatgtgctgtatttatttaagtttcatcgactgtattcttttcaagaaggaaagtaaaatcaaaatggaaaaacacagcacatgttgagttttctgccctaagtgttaaaattctatgttttttaatgcagatgtggaattagaagaagctattagaagaagtcttgaggaaatgtaattaaagatattaccacacaacatcaagtggccttgaagagactgagataacgaattcttgagtttgttttctaaaggagaccagaaatccactattacaaatgtatttgaaaacatgtttttgctttcatatgttcaaaatctgatctttgttttgtatttttgtgctaatgtgcaaacatgtacagaagaaatagaatacatgttcatgcaaatataaattatgtattctaatataggtgtaacagtttcccagttaactttgaatttatatatttagatttaaaggattaaaaaaaaggaaagctcttgacagttgtttcccaaatagcattagttctttaattttatttgtactgtacaaatgatgctagtttatttttttagcagtgaaaatgaatataaaaaaggtgacataggtcaagttttccataaattctacttctcatgtggcactattatataatacctttgagatctttgtttatgtttattagaagagggtaatggaaactgatcatggaaacatttaaaattttatcagcaatgttctttgtgggtgccatgcatatgtaaattattgctttaattagagcagcacattgctaaaataaaaaatacaccttaatttttaagaaataatttaaatgaaacaatttccattccttttacctgcttagacttttatgtgacttgtatggtctcctggttaaagggaatggtgtcagaatatttgcataaaattatttttcataacagtccttttttatatattggtgtaaacataatattcttcaagaaataatgttgaaagcctactcaggaataatcttccttaactctttaaatttttatttcatgtgaagtgttttcagtttagttattcactgaattgtcagtttccttcatttggtattacatatttaattcttaaatattgaggccccattgtgagtaataaaaaatacgacataagtagaagactaagaagggcttgtcatattatctttgtgtatatgcttcatgttatttaaccagaaatgtcttatctctaaaaatttttagtagtaattatttaccaaacttaaaaacatttctataaatataaagcttttctttatatttaagacaaaatataaaggctagaatttggttccttctctgtaacactaaatattttagtgtgaaattgaatttttttattactatagtcttttcaatctataatttgtgtttttaatttcttgatatgtcacttctgttcctccctgcttgcattttttaaaaactagacattgtggcttgagaatttatcaatcatctttccgaaatgaccacattgtgcttttagtttgtatgtttaagtggtcaagcaaggctctaggaggtagtcactgagctggaccttaaacacatctgcaggagctcacaaaatgggagcaaaagaggcattccagaaagaagagtagttaagcagatgtgggggcagggcaagaggagacagcaccttgttgccagagattctacacaaaggtgtgatggacactgatgctctattaagaagcttttgtggtgtgtgtggtagagaataattaaggcttctgataagacaggaaagggatatttcatcatgactgttaagaaaaggtaactgggttgtttaatgttttaattgataattgtcactgatcgtatttctacttgttaaataattaaaaatcatcttaaaattca

SEQ ID NO: 360668 - DNA, 5419 bp, Homo sapiens
agcccgggagtgagagaaagcggctccgggggcatagcgggccagtaagggccgctcctcctttgaagaggttttgcgtctctttccgccggtggcgtcggcgctcacgcaggggcgggtcccggtagcgccaggcggtgcagggcgggaaggggattcgtggcgacggcggcggcagggacagcaggagcagtggtgctgtcagcgcggccgtcggagacatgggagacccggggtcggagataatagaatctgtccctccagctggccctgaggcatctgagtcaacaacggatgaaaatgaagacgacattcagtttgtcagtgaaggaccattacgacctgttcttgaatacattgatctggtcagcagtgatgatgaagagcctagcacctcttatactgatagaatgcctgaatctaaggtgccatcctctgagaatcatcgcccagaaatgtgctctagctgcaatgttcctcttcccattggagatagcagctccttctctgggagttgttccagcagtccagaaaggatagtttctcaaacttcctctgttgagaacccattggagaaccagaaaaatgatcaaaataattcagatactaagatctctgagacagagacccttaaatcatcacagaattttcagactctgccttcatctccacttctggtcccccaagaatctttggcctcttctgaggtcaaagagaatttacgtatagattcttcttcagcttcacagcatggacgggatgccatcctctatctccagacacaagtagctgaaatgtcccgagtgatacgtgatctgcagtccaggagctgttttagatttcatcattctaggccaagtgagaactcctcagttccttgggacatctccacctctaaagaggaaaatttatccacagttgaagaagaaactgattacaaatcaccatcagctgatgacaaagggcagccatctgaccccagccaatctagtttcacaggtcttttgaagagaatggaacaaagaggtgttataaaaagggtgacattacaatctgaagcggagtcatgtgaagggaaacctgattgtgtgacttctaaaaaacgtttggttcctccattgcatcctcttctgagaattgccaccactgaggtttttaaagaccctgctgattgccatccttcttccttcatgggacacagggtatatcctgtggccaaggacacctctcctttccaaccaaacccaccagctgaaggccccattgtagaagcattagaacacagcaaaagaggaaacacaacatcccctctagattctacctcaaaagaaatggaggtcatgggttgtaggttttaccacgctgcctccattgcagcccgagctgctagctacatggcctatatgactcaatatcagcgtaaactctgggaagacatggaagatctggttcatgacccagaatttgatcgtggaaaagcaagatgcataatatctgatggtatggatgcaggcctttggcaactttgtactactagggacataatggactctgtagtcagagttatggccatggccatagactatagacggcaggcctggcttcgacttacatctctcactaagaaaacccaggagaagatctcccacttgccctttgatggtacttccctttttggacaagatgtgaaagctgttgttgcagaagacaacaatataaaagaaaatgactataaagatcacaaatactataatcagcatcgatacttttatagtcatgatcagaaagcacattatcacaatagaggatactccaaaggggattggtacaaacctcgaaaccacccctatagatatagaaagaagggagactctccagaacgccatgggtacaagaattaataacctgtttaatgttcagcagagtagtcattcaagatcctaactattttacttgttcctccttgtacaaataggatctacaggtaggagatcatctcaaaaactggatgcatgtctggaatgatcacagctgacatttgaattctagacttttgaaatgaagtatataataaagaaactcatgacttggccaagtgagcagtggagactttcttgaaagggttggacaaatgtttatcctttatttctggtccaaaaataagtgtggaggaggaccactcaggaatctgaatcctcttgtgattaaagaaaaatataaagatgtgttcctcaggaaaatcttatttgtaaactgaggactagcagattttgaatctagaaataatactagatgtctgtttactaagaccagaggtaaatccttaacttttaggttatcagtgcttccttgttcaggcttcagtttgacagatcttcacaaaatgacacatctgttaaaatgtctttatgtcaagatggtcaactcaccaagagtccgtactactatcaagctctgtgagacttcagaatcagccatgaagctttgtgtcaactggaattcaaatcaaattttgccaaatccagtttgcttccccttggaatggctagatgtcgcaggtctattatggacaccaactggaaaaagacttctacctgtaacatctctgtagaaattgcacagtaactatcttcatcaagactttgatggccaccataccatcactactcataaagctacatgtgagagaattgtttgttgttatcaatcctaatagtctttgacctatcaagctctcgtatcaagctgtaagactgagtcatggtagtctctcactgtaagctgggcctttcaccaagatggccttcttaaacaacctaccttctaaacatttaattcttttgagcttgatagtgcatcacactctaaatacaaaaaagatacgcacatcagtgccctggaaataaaggatgttacacgatccaggcatgcaaatctgaactcctaagaccaagaattccaaacatgcctgacaatcttgtccccttattgtaataaagagggataccatcagtctagattttattgagaatccttaagatttaaagcatagctgtggatgtggtgaagagaacaagccacacagctctgtttctggatatctaagtgatgatatccattaatgatttgaaaggctgaaatcaagatttaagtgatacgctcttggttaattggttacttaatttagtcagattcttagtgtaagagacagcttatctttttgctcccaattggtcccattaatagtttttcaccatactggaactggcagcagatacctcaattatatgtcccacagtatcttctctttagactcaaggtagtggatgtatggtatatcagcccttagatccatgtcttcacagcatgacatcaggaatggagaatatgtcaaatttgaggggtctgaatacatcacctagtattatttgcttggcagccaaaaacagttgtttttattgacagacttaattctgtaacttctgcgttttttcatctgcttgatcaaggcattttggatgtactgctaatggaatatggcactgttttacggtttatgtggcttctgttcttgccacagttgttgcacagtggtaattgatgttttctctggtgccacactttttaataatctattggaagctcattcctcctcccccatcataaccatattcagcacccatttttaaatctacttttcttccttatttgtgctacagaggttgatggcgtaaattttcctacttggaagaaattactttatcagttaatttcagggtactgtattgatcttgtttgtcctatttgtagattaaacttgaactagtcttaataaaggggatattgttttgcaaatttagcccagtcatatcaagagttaatatttatcttatttttctgtattttactcaaaattttatttccacttctgtagaaataggtccatgccagtgttctctacaaagtgtctttcaaactaaactctagaagaatatcgattacctgaacagaaacaaaggcctaagaaatcatacatttttgtagcttatgtgtattgcaccaatcaagcaatcccatgtgctcttgatattggcactgtagttttatcttagaggacttgccactggagaactcagtggtgagagaccttggaaatgttttatgtggctgcacataagtgtttctgactagctaaggctacttcagacttttcactttccatttgtccccttttccttccctgaattagatgctatgtcataaacttggtggtttttgaaatactcttatttcaaaccttaaactaaaccgaaataagttatgcctgagaatgcgtttgtctgaaacgattttggcacttccctttaatatgcttccccttccctttgccttttaaattgtggttaaaaaaaaagaaaaaaaaaggcacataaagctgagcaccttaaccattttttaagcgtatggtagtgttgactatatttgcattgttgcgcagctcctccattcttaaatatttgtaagatgatgttgctgttctcttttcctcctgtgatatttatgttgcccagtaataagtaaaagtatcctttcttagttactctaactgatatgcccaagtgtctccagatactctgttttcctggaagtgtaaaggtattgggaaattatcaaattggtgaccaagtagttctgaaaggatttgaccgtttaatagggatggggacagaatgcagatcaggaagagtttttagtaatagattagtttcttgattgcaaaagaaatatctttaatgtgttaattttttattattttaaaatctctggcatacttgaatgataatgttataaaacttaaagtgaggatttggtctagggagattaccccaatagaatcagaaactcttagtcagataataaatcctcatattatgcctgccatgttcagaacctgcaacaaaattccctactaggccaacctctaacgtttaaatacctctaggttttctaggaggccttggaatagttgcaagtttaatgatctggtattctcaaaaaggatgtatctaatgatcttgattcttcaaaatgttatttcttgattagatatacaatgtatatagagacaatatggtttcttgtagttactgtgtatagagaagtactgtttccatttttatatgaagtgcctttttaattctacacttttctttaaaacttaaactttgatgtcttgcatatattgctggtggtatttatgtgaattttgtacagtgatttaatcttgtagtttatcatttgtacaattgcactatctaaatgtactcccttctgaatgttaatttgttttctttatagcactgttgattcatttcagaaggttgtagagtatacctccctcccccttatttaactaact

SEQ ID NO: 360669 - DNA, 2703 bp, Homo sapiens
  misc_feature (2703)..(2703): n is a, c, g, or t
agcccgggagtgagagaaagcggctccgggggcatagcgggccagtaagggccgctcctcctttgaagaggttttgcgtctctttccgccggtggcgtcggcgctcacgcaggggcgggtcccggtagcgccaggcggtgcagggcgggaaggggattcgtggcgacggcggcggcagggacagcaggagcagtggtgctgtcagcgcggccgtcggagacatgggagacccggggtcggagataatagaatctgtccctccagctggccctgaggcatctgagtcaacaacggatgaaaatgaagacgacattcagtttgtcagtgaaggaccattacgacctgttcttgaatacattgatctggtcagcagtgatgatgaagagcctagcacctcttatactgatgagaatattaaacgtaaagaccatattgattatcagaaggataaagttgctttaactctggctcgtctagcccgccatgttgaagtggagaaacagcagaaagaagagaagaatagagcattcagagaaaaaattgattttcagcatgctcatgggttacaagaattggaatttattcgaggacattctgatacagaagcagcaagactgtgtgtggaccagtggctaaaaatgccaggactcaaaacaggcacaattaattgtggaacaaaaagttcattccgaagaggaggccacacgtgggtgtctgggaaaccaattttatgtcctataatgcactgtaacaaggagtttgacaatgggcaccttctcttaggacatttgaaaaggttcgatcactctccatgtgatccaacaattacactacatggacctttcttcagctcctttgcttgtgtagtatgttataaaaaatttgttactcaacaacaatatagagatcacctttttgataaggaagccacagatgatggacataacaacaaccttcttcctcagattattcagtgttttgcatgtccaaattgcttccttctttttagcagaaaggaggagtgttcaaagcatatgtctggaaagaatcatttccatcagagtttcaaactgggtgataacaaaggaattgcacatccaatatctttcccatcttttgcaaagaaacttttgatctctctgtgcaaagatgttccctttcaagttaagtgtgtggcctgccacaagacactgcgttcccacatggagctcactgcccatttcagagttcattgtcgaaatgctggacctgtagctgtagctagagaagagtgcattacccaggttgcagagaaattcatattaagaggttattgtccagattgcaatcaagtctttgtggatgaaaccagcacccaaaatcataagcagaattcaggacacaaagtccgagtcattaactcagtggaagaatcagtcttactctattgccacagcagcgaagggaacaaggatccttcttctgacttgcatttattgttggatcaatcaaaattttcatcacttaaaagaaccatgtctattaaagaatctagctcactggagtgcattgccattccaaaaaagaagatgaatttaaaagataaaagccatgaaggtgttgcttgtgtccagaaagaaaaatcagtagttaaaacctggttctgtgaatgcaatcagcgattcccaagtgaagatgcagtagaaaagcatgttttctcagcaaacacaatgggttataaatgtgtggtctgtggaaaggtatgtgatgattcaggggtcattcgtttacacatgagccggattcacggaggggcacatttaaataactttcttttctggtgtcggacatgcaaaaaggagttaacaaggaaagatactatcatggcacatgtgactgaatttcataatggacacagatatttttatgagatggatgaggtagaaggtgaaactttgccatcatcctctacaacattggataatttgactgctaacaagccttcatcagctattactgttattgatcattccccggcaaatagttctccgaggggtaaatggcaatgccggatttgtgaagatatgtttgattcccaggaatatgtaaaacagcactgcatgtctttggcaagccacaagtttcatagatacagctgtgctcactgcagaaagccttttcataagatagaaacattgtaccgacattgccaagatgagcatgacaatgagataaagattaaatacttctgtgggctttgtgatcttatctttaatgtggaagaagcatttctgagtcattatgaggagcaccacagcatagattatgtatttgtgtcagaaaaaacaaacacaaaaaacaacaaaaaaaaaaaaattgttgtggggcgcgcccgcggccccggagaaaaaagttcttttaaagagacccttctcgtgtgggggcgcgcgcggcgcccaagttgtggtgtattgtggaaccctgtggcgccaaaagcgtgggtcccaaagagaggagctcgctgggggccagagcacaacgtggcgctggggttttcctacccacaaaggaaaaaaagccgcgcggggggacacccacagggcgggtttcgtgaacacaactccctagggaggggcttccgagcgggcccataagcggcggcgtcatcaccgcggggtcgcaaggagggtcagataatattacgcgggcgcggggggggggggn

SEQ ID NO: 360670 - DNA, 1037 bp, Homo sapiens
agcccgggagtgagagaaagcggctccgggggcatagcgggccagtaagggccgctcctcctttgaagaggttttgcgtctctttccgccggtggcgtcggcgctcacgcaggggcgggtcccggtagcgccaggcggtgcagggcgggaaggggattcgtggcgacggcggcggcagggacagcaggagcagtggtgctgtcagcgcggccgtcggagacatgggagacccggggtcggagataatagaatctgtccctccagctggccctgaggcatctgagtcaacaacggatgaaaatgaagacgacattcagtttgtcagtgaaggaccattacgacctgttcttgaatacattgatctggtcagcagtgatgatgaagagcctagcacctcttatactgatgagaatattaaacgtaaagaccatattgattatcagaaggataaagttgctttaactctggctcgtctagcccgccatgttgaagtggagaaacagcagaaagaagagaagaatagagcattcagagaaaaaattgattttcagcatgctcatgggttacaagaattggaatttattcgaggacattctgatacagaagcagcaagactgtgtgtggaccagtggctaaaaatgccaggactcaaaacaggcacaattaattgtggaacaaaaagttcattccgaagaggaggccacacgtgggtgtctgggaaaccaattttatgtcctataatgcactgtaacaaggagtttgacaatgggcaccttctcttaggacatttgaaaaggtaagtaggatattcataatagtgaatgctgaagatctagtgagctaccaagtgatttcataaaatgaaagcgtaatgctcctttgccattatgattatatagctttatattccaaactcaaattattttgtgccattatgatataattttttcataattgatgaagtcagatttttctagtgggtgtagctttcagctttatgggtatagcttttaaatatttatttttccctgatacag

SEQ ID NO: 360671 - DNA, 677 bp, Homo sapiens
ttcttttcctctccggcgaggggcggtctcggggcggacccgaactacaattcccagcatcctgcgcggcgcggggaaggaagcccgggagtgagagaaagcggctccgggggcatagcgggccagtaagggccgctcctcctttgaagaggttttgcgtctctttccgccggtggcgtcggcgctcacgcaggggcgggtcccggtagcgccaggcggtgcagggcgggaaggggattcgtggcgacggcggcggcagggacagcaggagcagtggtgctgtcagcgcggccgtcggagacatgggagacccggggtcggaggtgagtagtcgagtgagggtcctggcgttctcagaggcgaaccgcgaagggtttgtgttttctgcggtctgaggcctggtgctccgtcgcagcctcggggcgatacctcttcagtgtcttgggccgagcccagctctggggcctggtgcgtgtctgagcgaggaacccgcagcaacaatggccgcccggccccccgcacgggccctggcgttcgttgtggccgcggctgggccagtgggagcgacgttttaaggcaggattgcccttcggtgttgagcttgcgttcctcctggagtagataaggggaattgtgagaggctggtaactaacgcgttttcagcgttgggtccctgc

SEQ ID NO: 360672 - DNA, 5143 bp, Homo sapiens
agcccgggagtgagagaaagcggctccgggggcatagcgggccagtaagggccgctcctcctttgaagaggttttgcgtctctttccgccggtggcgtcggcgctcacgcaggggcgggtcccggtagcgccaggcggtgcagggcgggaaggggattcgtggcgacggcggcggcagggacagcaggagcagtggtgctgtcagcgcggccgtcggagacatgggagacccggggtcggagataatagaatctgtccctccagctggccctgaggcatctgagtcaacaacggatgaaaatgaagacgacattcagtttgtcagtgaaggaccattacgacctgttcttgaatacattgatctggtcagcagtgatgatgaagagcctagcacctcttatactgatgagaatattaaacgtaaagaccatattgattatcagaaggataaagttgctttaactctggctcgtctagcccgccatgttgaagtggagaaacagcagaaagaagagaagaatagagcattcagagaaaaaattgattttcagcatgctcatgggttacaagaattggaatttattcgaggacattctgatacagaagcagcaagactgtgtgtggaccagtggctaaaaatgccaggactcaaaacaggcacaattaattgtggaacaaaaagttcattccgaagaggaggccacacgtgggtgtctgggaaaccaattttatgtcctataatgcactgtaacaaggagtttgacaatgggcaccttctcttaggacatttgaaaaggttcgatcactctccatgtgatccaacaattacactacatggacctttcttcagctcctttgcttgtgtagtatgttataaaaaatttgttactcaacaacaatatagagatcacctttttgataaggaagccacagatgatggacataacaacaaccttcttcctcagattattcagtgttttgcatgtccaaattgcttccttctttttagcagaaaggaggagtgttcaaagcatatgtctggaaagaatcatttccatcagagtttcaaactgggtgataacaaaggaattgcacatccaatatctttcccatcttttgcaaagaaacttttgatctctctgtgcaaagatgttccctttcaagttaagtgtgtggcctgccacaagacactgcgttcccacatggagctcactgcccatttcagagttcattgtcgaaatgctggacctgtagctgtagctagagaagagtgcattacccaggttgcagagaaattcatattaagaggttattgtccagattgcaatcaagtctttgtggatgaaaccagcacccaaaatcataagcagaattcaggacacaaagtccgagtcattaactcagtggaagaatcagtcttactctattgccacagcagcgaagggaacaaggatccttcttctgacttgcatttattgttggatcaatcaaaattttcatcacttaaaagaaccatgtctattaaagaatctagctcactggagtgcattgccattccaaaaaagaagatgaatttaaaagataaaagccatgaaggtgttgcttgtgtccagaaagaaaaatcagtagttaaaacctggttctgtgaatgcaatcagcgattcccaagtgaagatgcagtagaaaagcatgttttctcagcaaacacaatgggttataaatgtgtggtctgtggaaaggtatgtgatgattcaggggtcattcgtttacacatgagccggattcacggaggggcacatttaaataactttcttttctggtgtcggacatgcaaaaaggagttaacaaggaaagatactatcatggcacatgtgactgaatttcataatggacacagatatttttatgagatggatgaggtagaaggtgaaactttgccatcatcctctacaacattggataatttgactgctaacaagccttcatcagctattactgttattgatcattccccggcaaatagttctccgaggggtaaatggcaatgccggatttgtgaagatatgtttgattcccaggaatatgtaaaacagcactgcatgtctttggcaagccacaagtttcatagatacagctgtgctcactgcagaaagccttttcataagatagaaacattgtaccgacattgccaagatgagcatgacaatgagataaagattaaatacttctgtgggctttgtgatcttatctttaatgtggaagaagcatttctgagtcattatgaggagcaccacagcatagattatgtatttgtgtcagaaaaaactgaaacttcaattaaaaccgaagatgattttccagtaatagagaccagtaaccagttaacttgtggttgccgtgagagttacatctgtaaagtcaacagaaaagaagattatagcagatgtctccaaatcatgctggataaaggaaaactgtggtttcgctgcagtttatgttcggcaacagcacagaatttaaccgacatgaacactcatatccatcaagtgcacaaagaaaagagtgatgaggaggagcagcagtatgtaatcaagtgtggcacctgcaccaaagcatttcatgatcctgagagtgcacagcagcatttccatagaaaacattgcttcttacagaaacccagtgtggctcattttggatctgaaaaatcaaacctgtacaagtttactgctagtgcctcacatacagagagaaaactgaaacaggcaataaactattcaaaaagtttagacatggagaaaggagttgagaatgacctaagctatcagaatatagaggaagaaattgttgagcttccagatttggattacctgcgaaccatgactcatatagtctttgtagattttgataactggtcaaacttttttggtcatctaccagggcatctaaaccaaggaacatttatttggggctttcaaggaggaaacaccaattggaagcctccgctcaactgtaagatttataactacctgaacaggattggatgcttcttccttcatcctcgctgtagtaaaagaaaagatgctgctgattttgccatatgtatgcatgctggccgtctagatgaacaactacccaagcaaattcctttcaccatcctctcaggagatcaaggttttctggagctagagaatcaatttaagaagactcagaggccagctcatatactaaaccctcaccacttagagggagatatgatgtgtgccttgttaaatagcatatctgataccaccaaagaatgtgacagtgatgataacatgggtgccaaaaatacttcaataggagaagaatttatatccacagaagatgtggaattagaagaagctattagaagaagtcttgaggaaatgtaattaaagatattaccacacaacatcaagtggccttgaagagactgagataacgaattcttgagtttgttttctaaaggagaccagaaatccactattacaaatgtatttgaaaacatgtttttgctttcatatgttcaaaatctgatctttgttttgtatttttgtgctaatgtgcaaacatgtacagaagaaatagaatacatgttcatgcaaatataaattatgtattctaatataggtgtaacagtttcccagttaactttgaatttatatatttagatttaaaggattaaaaaaaaggaaagctcttgacagttgtttcccaaatagcattagttctttaattttatttgtactgtacaaatgatgctagtttatttttttagcagtgaaaatgaatataaaaaaggtgacataggtcaagttttccataaattctacttctcatgtggcactattatataatacctttgagatctttgtttatgtttattagaagagggtaatggaaactgatcatggaaacatttaaaattttatcagcaatgttctttgtgggtgccatgcatatgtaaattattgctttaattagagcagcacattgctaaaataaaaaatacaccttaatttttaagaaataatttaaatgaaacaatttccattccttttacctgcttagacttttatgtgacttgtatggtctcctggttaaagggaatggtgtcagaatatttgcataaaattatttttcataacagtccttttttatatattggtgtaaacataatattcttcaagaaataatgttgaaagcctactcaggaataatcttccttaactctttaaatttttatttcatgtgaagtgttttcagtttagttattcactgaattgtcagtttccttcatttggtattacatatttaattcttaaatattgaggccccattgtgagtaataaaaaatacgacataagtagaagactaagaagggcttgtcatattatctttgtgtatatgcttcatgttatttaaccagaaatgtcttatctctaaaaatttttagtagtaattatttaccaaacttaaaaacatttctataaatataaagcttttctttatatttaagacaaaatataaaggctagaatttggttccttctctgtaacactaaatattttagtgtgaaattgaatttttttattactatagtcttttcaatctataatttgtgtttttaatttcttgatatgtcacttctgttcctccctgcttgcattttttaaaaactagacattgtggcttgagaatttatcaatcatctttccgaaatgaccacattgtgcttttagtttgtatgtttaagtggtcaagcaaggctctaggaggtagtcactgagctggaccttaaacacatctgcaggagctcacaaaatgggagcaaaagaggcattccagaaagaagagtagttaagcagatgtgggggcagggcaagaggagacagcaccttgttgccagagattctacacaaaggtgtgatggacactgatgctctattaagaagcttttgtggtgtgtgtggtagagaataattaaggcttctgataagacaggaaagggatatttcatcatgactgttaagaaaaggtaactgggttgtttaatgttttaattgataattgtcactgatcgtatttctacttgttaaataattaaaaatcatcttaaaattca

SEQ ID NO: 360673 - DNA, 5394 bp, Homo sapiens
gcatatcttgagtagaacttaacatatcttgaatgggatatttttttcttttattcttatgagtggtctcacacaggaccaaacagcaggccagcatagcaccacgtgatctgagcttgtttttactctctcctttttcataaacagagtcccagattaatgccagtagttgattttgggtctttggggtagtgaagcttgtggatttgacttctctgattccttttgctgaccttgagtggattgtatctttcactgttaattataataatttaaaaattgagttctacttactggacatgaatctctgcacttgaaagttaacatattaaaagcatattttttttcttccttggttttcttgttcatgtggataacccagagaatgcctgaatctaaggtgccatcctctgagaatcatcgcccagaaatgtgctctagctgcaatgttcctcttcccattggagatagcagctccttctctgggagttgttccagcagtccagaaaggatagtttctcaaacttcctctgttgagaacccattggagaaccagaaaaatgatcaaaataattcagatactaagatctctgagacagagacccttaaatcatcacagaattttcagactctgccttcatctccacttctggtcccccaagaatctttggcctcttctgaggtcaaagagaatttacgtatagattcttcttcagcttcacagcatggacgggatgccatcctctatctccagacacaagtagctgaaatgtcccgagtgatacgtgatctgcagtccaggagctgttttagatttcatcattctaggccaagtgagaactcctcagttccttgggacatctccacctctaaagaggaaaatttatccacagttgaagaagaaactgattacaaatcaccatcagctgatgacaaagggcagccatctgaccccagccaatctagtttcacaggtcttttgaagagaatggaacaaagaggtgttataaaaagggtgacattacaatctgaagcggagtcatgtgaagggaaacctgattgtgtgacttctaaaaaacgtttggttcctccattgcatcctcttctgagaattgccaccactgaggtttttaaagaccctgctgattgccatccttcttccttcatgggacacagggtatatcctgtggccaaggacacctctcctttccaaccaaacccaccagctgaaggccccattgtagaagcattagaacacagcaaaagaggaaacacaacatcccctctagattctacctcaaaagaaatggaggtcatgggttgtaggttttaccacgctgcctccattgcagcccgagctgctagctacatggcctatatgactcaatatcagcgtaaactctgggaagacatggaagatctggttcatgacccagaatttgatcgtggaaaagcaagatgcataatatctgatggtatggatgcaggcctttggcaactttgtactactagggacataatggactctgtagtcagagttatggccatggccatagactatagacggcaggcctggcttcgacttacatctctcactaagaaaacccaggagaagatctcccacttgccctttgatggtacttccctttttggacaagatgtgaaagctgttgttgcagaagacaacaatataaaagaaaatgactataaagatcacaaatactataatcagcatcgatacttttatagtcatgatcagaaagcacattatcacaatagaggatactccaaaggggattggtacaaacctcgaaaccacccctatagatatagaaagaagggagactctccagaacgccatgggtacaagaattaataacctgtttaatgttcagcagagtagtcattcaagatcctaactattttacttgttcctccttgtacaaataggatctacaggtaggagatcatctcaaaaactggatgcatgtctggaatgatcacagctgacatttgaattctagacttttgaaatgaagtatataataaagaaactcatgacttggccaagtgagcagtggagactttcttgaaagggttggacaaatgtttatcctttatttctggtccaaaaataagtgtggaggaggaccactcaggaatctgaatcctcttgtgattaaagaaaaatataaagatgtgttcctcaggaaaatcttatttgtaaactgaggactagcagattttgaatctagaaataatactagatgtctgtttactaagaccagaggtaaatccttaacttttaggttatcagtgcttccttgttcaggcttcagtttgacagatcttcacaaaatgacacatctgttaaaatgtctttatgtcaagatggtcaactcaccaagagtccgtactactatcaagctctgtgagacttcagaatcagccatgaagctttgtgtcaactggaattcaaatcaaattttgccaaatccagtttgcttccccttggaatggctagatgtcgcaggtctattatggacaccaactggaaaaagacttctacctgtaacatctctgtagaaattgcacagtaactatcttcatcaagactttgatggccaccataccatcactactcataaagctacatgtgagagaattgtttgttgttatcaatcctaatagtctttgacctatcaagctctcgtatcaagctgtaagactgagtcatggtagtctctcactgtaagctgggcctttcaccaagatggccttcttaaacaacctaccttctaaacatttaattcttttgagcttgatagtgcatcacactctaaatacaaaaaagatacgcacatcagtgccctggaaataaaggatgttacacgatccaggcatgcaaatctgaactcctaagaccaagaattccaaacatgcctgacaatcttgtccccttattgtaataaagagggataccatcagtctagattttattgagaatccttaagatttaaagcatagctgtggatgtggtgaagagaacaagccacacagctctgtttctggatatctaagtgatgatatccattaatgatttgaaaggctgaaatcaagatttaagtgatacgctcttggttaattggttacttaatttagtcagattcttagtgtaagagacagcttatctttttgctcccaattggtcccattaatagtttttcaccatactggaactggcagcagatacctcaattatatgtcccacagtatcttctctttagactcaaggtagtggatgtatggtatatcagcccttagatccatgtcttcacagcatgacatcaggaatggagaatatgtcaaatttgaggggtctgaatacatcacctagtattatttgcttggcagccaaaaacagttgtttttattgacagacttaattctgtaacttctgcgttttttcatctgcttgatcaaggcattttggatgtactgctaatggaatatggcactgttttacggtttatgtggcttctgttcttgccacagttgttgcacagtggtaattgatgttttctctggtgccacactttttaataatctattggaagctcattcctcctcccccatcataaccatattcagcacccatttttaaatctacttttcttccttatttgtgctacagaggttgatggcgtaaattttcctacttggaagaaattactttatcagttaatttcagggtactgtattgatcttgtttgtcctatttgtagattaaacttgaactagtcttaataaaggggatattgttttgcaaatttagcccagtcatatcaagagttaatatttatcttatttttctgtattttactcaaaattttatttccacttctgtagaaataggtccatgccagtgttctctacaaagtgtctttcaaactaaactctagaagaatatcgattacctgaacagaaacaaaggcctaagaaatcatacatttttgtagcttatgtgtattgcaccaatcaagcaatcccatgtgctcttgatattggcactgtagttttatcttagaggacttgccactggagaactcagtggtgagagaccttggaaatgttttatgtggctgcacataagtgtttctgactagctaaggctacttcagacttttcactttccatttgtccccttttccttccctgaattagatgctatgtcataaacttggtggtttttgaaatactcttatttcaaaccttaaactaaaccgaaataagttatgcctgagaatgcgtttgtctgaaacgattttggcacttccctttaatatgcttccccttccctttgccttttaaattgtggttaaaaaaaaagaaaaaaaaaggcacataaagctgagcaccttaaccattttttaagcgtatggtagtgttgactatatttgcattgttgcgcagctcctccattcttaaatatttgtaagatgatgttgctgttctcttttcctcctgtgatatttatgttgcccagtaataagtaaaagtatcctttcttagttactctaactgatatgcccaagtgtctccagatactctgttttcctggaagtgtaaaggtattgggaaattatcaaattggtgaccaagtagttctgaaaggatttgaccgtttaatagggatggggacagaatgcagatcaggaagagtttttagtaatagattagtttcttgattgcaaaagaaatatctttaatgtgttaattttttattattttaaaatctctggcatacttgaatgataatgttataaaacttaaagtgaggatttggtctagggagattaccccaatagaatcagaaactcttagtcagataataaatcctcatattatgcctgccatgttcagaacctgcaacaaaattccctactaggccaacctctaacgtttaaatacctctaggttttctaggaggccttggaatagttgcaagtttaatgatctggtattctcaaaaaggatgtatctaatgatcttgattcttcaaaatgttatttcttgattagatatacaatgtatatagagacaatatggtttcttgtagttactgtgtatagagaagtactgtttccatttttatatgaagtgcctttttaattctacacttttctttaaaacttaaactttgatgtcttgcatatattgctggtggtatttatgtgaattttgtacagtgatttaatcttgtagtttatcatttgtacaattgcactatctaaatgtactcccttctgaatgttaatttgttttctttatagcactgttgattcatttcagaaggttgtagagtatacctccctcccccttatttaactaact

SEQ ID NO: 360674 - DNA, 1020 bp, Homo sapiens
agcccgggagtgagagaaagcggctccgggggcatagcgggccagtaagggccgctcctcctttgaagaggttttgcgtctctttccgccggtggcgtcggcgctcacgcaggggcgggtcccggtagcgccaggcggtgcagggcgggaaggggattcgtggcgacggcggcggcagggacagcaggagcagtggtgctgtcagcgcggccgtcggagacatgggagacccggggtcggagataatagaatctgtccctccagctggccctgaggcatctgagtcaacaacggatgaaaatgaagacgacattcagtttgtcagtgaaggaccattacgacctgttcttgaatacattgatctggtcagcagtgatgatgaagagcctagcacctcttatactgatgtgccctatacaacaggattcttttgttccagaaccacatgaccacagaaaatttgttttctcttagaaaaaaggatatgtagagatccttttaggaatggaaagtgggggaagggtttataggggatatattacttcagtcatcatccctttaaccttgtctgtgccccacatatttggagttatttatcttacctgtgatgtactggttgtaggtttgacccttggaccaatacttcccttgctctgagaattgaactagttgagccctttgtaacagtcttgcctttcatttgtccttgctttagcccaaacttctgttaatgagctgttttcatcttggattagaaaactcttagttattgttcagagtggccacaaacttcttgctctgtgatataggggattgagacttggacttggaatcagaatacctgggtttgagtcccagctttactctttacaaattctgtgactttggataaattaagtaaccttttagcctccgttttttaatcaaataatacctacctcacagggttgttgtgaggatgaaatgaggtaacaaattataacttcttataactacaaaccataaagtaggactatacaa

SEQ ID NO: 360675 - DNA, 5232 bp, Homo sapiens
agcccgggagtgagagaaagcggctccgggggcatagcgggccagtaagggccgctcctcctttgaagaggttttgcgtctctttccgccggtggcgtcggcgctcacgcaggggcgggtcccggtagcgccaggcggtgcagggcgggaaggggattcgtggcgacggcggcggcagggacagcaggagcagtggtgctgtcagcgcggccgtcggagacatgggagacccggggtcggagctggccctgaggcatctgagtcaacaacggatgaaaatgaagacgacattcagtttgtcagtgaaggaccattacgacctgttcttgaatacattgatctggtcagcagtgatgatgaagagcctagcacctcttatactgatgagaatattaaacgtaaagaccatattgattatcagaaggataaagttgctttaactctggctcgtctagcccgccatgttgaagtggagaaacagcagaaagaagagaagaatagagcattcagagaaaaaattgattttcagcatgctcatgggttacaagaattggaatttattcgaggacattctgatacagaagcagcaagactgtgtgtggaccagtggctaaaaatgccaggactcaaaacaggcacaattaattgtggaacaaaaagttcattccgaagaggaggccacacgtgggtgtctgggaaaccaattttatgtcctataatgcactgtaacaaggagtttgacaatgggcaccttctcttaggacatttgaaaaggttcgatcactctccatgtgatccaacaattacactacatggacctttcttcagctcctttgcttgtgtagtatgttataaaaaatttgttactcaacaacaatatagagatcacctttttgataaggaagccacagatgatggacataacaacaaccttcttcctcagattattcagtgttttgcatgtccaaattgcttccttctttttagcagaaaggaggagtgttcaaagcatatgtctggaaagaatcatttccatcagagtttcaaactgggtgataacaaaggaattgcacatccaatatctttcccatcttttgcaaagaaacttttgatctctctgtgcaaagatgttccctttcaagttaagtgtgtggcctgccacaagacactgcgttcccacatggagctcactgcccatttcagagttcattgtcgaaatgctggacctgtagctgtagctagagaagagtgcattacccaggttgcagagaaattcatattaagaggttattgtccagattgcaatcaagtctttgtggatgaaaccagcacccaaaatcataagcagaattcaggacacaaagtccgagtcattaactcagtggaagaatcagtcttactctattgccacagcagcgaagggaacaaggatccttcttctgacttgcatttattgttggatcaatcaaaattttcatcacttaaaagaaccatgtctattaaagaatctagctcactggagtgcattgccattccaaaaaagaagatgaatttaaaagataaaagccatgaaggtgttgcttgtgtccagaaagaaaaatcagtagttaaaacctggttctgtgaatgcaatcagcgattcccaagtgaagatgcagtagaaaagcatgttttctcagcaaacacaatgggttataaatgtgtggtctgtggaaaggtatgtgatgattcaggggtcattcgtttacacatgagccggattcacggaggggcacatttaaataactttcttttctggtgtcggacatgcaaaaaggagttaacaaggaaagatactatcatggcacatgtgactgaatttcataatggacacagatatttttatgagatggatgaggtagaaggtgaaactttgccatcatcctctacaacattggataatttgactgctaacaagccttcatcagctattactgttattgatcattccccggcaaatagttctccgaggggtaaatggcaatgccggatttgtgaagatatgtttgattcccaggaatatgtaaaacagcactgcatgtctttggcaagccacaagtttcatagatacagctgtgctcactgcagaaagccttttcataagatagaaacattgtaccgacattgccaagatgagcatgacaatgagataaagattaaatacttctgtgggctttgtgatcttatctttaatgtggaagaagcatttctgagtcattatgaggagcaccacagcatagattatgtatttgtgtcagaaaaaactgaaacttcaattaaaaccgaagatgattttccagtaatagagaccagtaaccagttaacttgtggttgccgtgagagttacatctgtaaagtcaacagaaaagaagattatagcagatgtctccaaatcatgctggataaaggaaaactgtggtttcgctgcagtttatgttcggcaacagcacagaatttaaccgacatgaacactcatatccatcaagtgcacaaagaaaagagtgatgaggaggagcagcagtatgtaatcaagtgtggcacctgcaccaaagcatttcatgatcctgagagtgcacagcagcatttccatagaaaacattgcttcttacagaaacccagtgtggctcattttggatctgaaaaatcaaacctgtacaagtttactgctagtgcctcacatacagagagaaaactgaaacaggcaataaactattcaaaaagtttagacatggagaaaggagttgagaatgacctaagctatcagaatatagaggaagaaattgttgagcttccagatttggattacctgcgaaccatgactcatatagtctttgtagattttgataactggtcaaacttttttggtcatctaccagggcatctaaaccaaggaacatttatttggggctttcaaggaggaaacaccaattggaagcctccgctcaactgtaagatttataactacctgaacaggattggatgcttcttccttcatcctcgctgtagtaaaagaaaagatgctgctgattttgccatatgtatgcatgctggccgtctagatgaacaactacccaagcaaattcctttcaccatcctctcaggagatcaaggttttctggagctagagaatcaatttaagaagactcagaggccagctcatatactaaaccctcaccacttagagggagatatgatgtgtgccttgttaaatagcatatctgataccaccaaagaatgtgacagtgatgataacatgggtgccaaaaatacttcaataggagaagaatttatatccacagaagatgtggaattagaagaagctattagaagaagtcttgaggaaatgtaattaaagatattaccacacaacatcaagtggccttgaagagactgagataacgaattcttgagtttgttttctaaaggagaccagaaatccactattacaaatgtatttgaaaacatgtttttgctttcatatgttcaaaatctgatctttgttttgtatttttgtgctaatgtgcaaacatgtacagaagaaatagaatacatgttcatgcaaatataaattatgtattctaatataggtgtaacagtttcccagttaactttgaatttatatatttagatttaaaggattaaaaaaaaggaaagctcttgacagttgtttcccaaatagcattagttctttaattttatttgtactgtacaaatgatgctagtttatttttttagcagtgaaaatgaatataaaaaaggtgacataggtcaagttttccataaattctacttctcatgtggcactattatataatacctttgagatctttgtttatgtttattagaagagggtaatggaaactgatcatggaaacatttaaaattttatcagcaatgttctttgtgggtgccatgcatatgtaaattattgctttaattagagcagcacattgctaaaataaaaaatacaccttaatttttaagaaataatttaaatgaaacaatttccattccttttacctgcttagacttttatgtgacttgtatggtctcctggttaaagggaatggtgtcagaatatttgcataaaattatttttcataacagtccttttttatatattggtgtaaacataatattcttcaagaaataatgttgaaagcctactcaggaataatcttccttaactctttaaatttttatttcatgtgaagtgttttcagtttagttattcactgaattgtcagtttccttcatttggtattacatatttaattcttaaatattgaggccccattgtgagtaataaaaaatacgacataagtagaagactaagaagggcttgtcatattatctttgtgtatatgcttcatgttatttaaccagaaatgtcttatctctaaaaatttttagtagtaattatttaccaaacttaaaaacatttctataaatataaagcttttctttatatttaagacaaaatataaaggctagaatttggttccttctctgtaacactaaatattttagtgtgaaattgaatttttttattactatagtcttttcaatctataatttgtgtttttaatttcttgatatgtcacttctgttcctccctgcttgcattttttaaaaactagacattgtggcttgagaatttatcaatcatctttccgaaatgaccacattgtgcttttagtttgtatgtttaagtggtcaagcaaggctctaggaggtagtcactgagctggaccttaaacacatctgcaggagctcacaaaatgggagcaaaagaggcattccagaaagaagagtagttaagcagatgtgggggcagggcaagaggagacagcaccttgttgccagagattctacacaaaggtgtgatggacactgatgctctattaagaagcttttgtggtgtgtgtggtagagaataattaaggcttctgataagacaggaaagggatatttcatcatgactgttaagaaaaggtaactgggttgtttaatgttttaattgataattgtcactgatcgtatttctacttgttaaataattaaaaatcatcttaaaattcatactttgactttaatttagacacaaggagatgtaatcgctgtgtaacatcagagaaagctatatggattatcgtcagaagtaaatgtttctaacattgacaaaaaaaaaaa

SEQ ID NO: 360676 - DNA, 4246 bp, Homo sapiens
gatctagaggatcccttaaaagtgcactcttctatatctaccatttccatcagagtttcaaactgggtgataacaaaggaattgcacatccaatatctttcccatcttttgcaaagaaacttttgatctctctgtgcaaagatgttccctttcaagttaagtgtgtggcctgccacaagacactgcgttcccacatggagctcactgcccatttcagagttcattgtcgaaatgctggacctgtagctgtagctagagaagagtgcattacccaggttgcagagaaattcatattaagaggttattgtccagattgcaatcaagtctttgtggatgaaaccagcacccaaaatcataagcagaattcaggacacaaagtccgagtcattaactcagtggaagaatcagtcttactctattgccacagcagcgaagggaacaaggatccttcttctgacttgcatttattgttggatcaatcaaaattttcatcacttaaaagaaccatgtctattaaagaatctagctcactggagtgcattgccattccaaaaaagaagatgaatttaaaagataaaagccatgaaggtgttgcttgtgtccagaaagaaaaatcagtagttaaaacctggttctgtgaatgcaatcagcgattcccaagtgaagatgcagtagaaaagcatgttttctcagcaaacacaatgggttataaatgtgtggtctgtggaaaggtatgtgatgattcaggggtcattcgtttacacatgagccggattcacggaggggcacatttaaataactttcttttctggtgtcggacatgcaaaaaggagttaacaaggaaagatactatcatggcacatgtgactgaatttcataatggacacagatatttttatgagatggatgaggtagaaggtgaaactttgccatcatcctctacaacattggataatttgactgctaacaagccttcatcagctattactgttattgatcattccccggcaaatagttctccgaggggtaaatggcaatgccggatttgtgaagatatgtttgattcccaggaatatgtaaaacagcactgcatgtctttggcaagccacaagtttcatagatacagctgtgctcactgcagaaagccttttcataagatagaaacattgtaccgacattgccaagatgagcatgacaatgagataaagattaaatacttctgtgggctttgtgatcttatctttaatgtggaagaagcatttctgagtcattatgaggagcaccacagcatagattatgtatttgtgtcagaaaaaactgaaacttcaattaaaaccgaagatgattttccagtaatagagaccagtaaccagttaacttgtggttgccgtgagagttacatctgtaaagtcaacagaaaagaagattatagcagatgtctccaaatcatgctggataaaggaaaactgtggtttcgctgcagtttatgttcggcaacagcacagaatttaaccgacatgaacactcatatccatcaagtgcacaaagaaaagagtgatgaggaggagcagcagtatgtaatcaagtgtggcacctgcaccaaagcatttcatgatcctgagagtgcacagcagcatttccatagaaaacattgcttcttacagaaacccagtgtggctcattttggatctgaaaaatcaaacctgtacaagtttactgctagtgcctcacatacagagagaaaactgaaacaggcaataaactattcaaaaagtttagacatggagaaaggagttgagaatgacctaagctatcagaatatagaggaagaaattgttgagcttccagatttggattacctgcgaaccatgactcatatagtctttgtagattttgataactggtcaaacttttttggtcatctaccagggcatctaaaccaaggaacatttatttggggctttcaaggaggaaacaccaattggaagcctccgctcaactgtaagatttataactacctgaacaggattggatgcttcttccttcatcctcgctgtagtaaaagaaaagatgctgctgattttgccatatgtatgcatgctggccgtctagatgaacaactacccaagcaaattcctttcaccatcctctcaggagatcaaggttttctggagctagagaatcaatttaagaagactcagaggccagctcatatactaaaccctcaccacttagagggagatatgatgtgtgccttgttaaatagcatatctgataccaccaaagaatgtgacagtgatgataacatgggtgccaaaaatacttcaataggagaagaatttatatccacagaagatgtggaattagaagaagctattagaagaagtcttgaggaaatgtaattaaagatattaccacacaacatcaagtggccttgaagagactgagataacgaattcttgagtttgttttctaaaggagaccagaaatccactattacaaatgtatttgaaaacatgtttttgctttcatatgttcaaaatctgatctttgttttgtatttttgtgctaatgtgcaaacatgtacagaagaaatagaatacatgttcatgcaaatataaattatgtattctaatataggtgtaacagtttcccagttaactttgaatttatatatttagatttaaaggattaaaaaaaaggaaagctcttgacagttgtttcccaaatagcattagttctttaattttatttgtactgtacaaatgatgctagtttatttttttagcagtgaaaatgaatataaaaaaggtgacataggtcaagttttccataaattctacttctcatgtggcactattatataatacctttgagatctttgtttatgtttattagaagagggtaatggaaactgatcatggaaacatttaaaattttatcagcaatgttctttgtgggtgccatgcatatgtaaattattgctttaattagagcagcacattgctaaaataaaaaatacaccttaatttttaagaaataatttaaatgaaacaatttccattccttttacctgcttagacttttatgtgacttgtatggtctcctggttaaagggaatggtgtcagaatatttgcataaaattatttttcataacagtccttttttatatattggtgtaaacataatattcttcaagaaataatgttgaaagcctactcaggaataatcttccttaactctttaaatttttatttcatgtgaagtgttttcagtttagttattcactgaattgtcagtttccttcatttggtattacatatttaattcttaaatattgaggccccattgtgagtaataaaaaatacgacataagtagaagactaagaagggcttgtcatattatctttgtgtatatgcttcatgttatttaaccagaaatgtcttatctctaaaaatttttagtagtaattatttaccaaacttaaaaacatttctataaatataaagcttttctttatatttaagacaaaatataaaggctagaatttggttccttctctgtaacactaaatattttagtgtgaaattgaatttttttattactatagtcttttcaatctataatttgtgtttttaatttcttgatatgtcacttctgttcctccctgcttgcattttttaaaaactagacattgtggcttgagaatttatcaatcatctttccgaaatgaccacattgtgcttttagtttgtatgtttaagtggtcaagcaaggctctaggaggtagtcactgagctggaccttaaacacatctgcaggagctcacaaaatgggagcaaaagaggcattccagaaagaagagtagttaagcagatgtgggggcagggcaagaggagacagcaccttgttgccagagattctacacaaaggtgtgatggacactgatgctctattaagaagcttttgtggtgtgtgtggtagagaataattaaggcttctgataagacaggaaagggatatttcatcatgactgttaagaaaaggtaactgggttgtttaatgttttaattgataattgtcactgatcgtatttctacttgttaaataattaaaaatcatcttaaaattcatactttgactttaatttagacacaaggagatgtaatcgctgtgtaacatcagagaaagctatatggattatcgtcagaagtaaatgtttctaacattgacaaaaaaaaaaa

SEQ ID NO: 360677 - DNA, 5243 bp, Homo sapiens
agcccgggagtgagagaaagcggctccgggggcatagcgggccagtaagggccgctcctcctttgaagaggttttgcgtctctttccgccggtggcgtcggcgctcacgcaggggcgggtcccggtagcgccaggcggtgcagggcgggaaggggattcgtggcgacggcggcggcagggacagcaggagcagtggtgctgtcagcgcggccgtcggagacatgggagacccggggtcggagataatagaatctgtccctccagctggccctgaggcatctgagtcaacaacggatgaaaatgaagacgacattcagtttgtcagtgaaggaccattacgacctgttcttgaatacattgatctggtcagcagtgatgatgaagagcctagcacctcttatactgatgagaatattaaacgtaaagaccatattgattatcagaaggataaagttgctttaactctggctcgtctagcccgccatgttgaagtggagaaacagcagaaagaagagaagaatagagcattcagagaaaaaattgattttcagcatgctcatgggttacaagaattggaatttattcgaggacattctgatacagaagcagcaagactgtgtgtggaccagtggctaaaaatgccaggactcaaaacaggcacaattaattgtggaacaaaaagttcattccgaagaggaggccacacgtgggtgtctgggaaaccaattttatgtcctataatgcactgtaacaaggagtttgacaatgggcaccttctcttaggacatttgaaaaggttcgatcactctccatgtgatccaacaattacactacatggacctttcttcagctcctttgcttgtgtagtatgttataaaaaatttgttactcaacaacaatatagagatcacctttttgataaggaagccacagatgatggacataacaacaaccttcttcctcagattattcagtgttttgcatgtccaaattgcttccttctttttagcagaaaggaggagtgttcaaagcatatgtctggaaagaatcatttccatcagagtttcaaactgggtgataacaaaggaattgcacatccaatatctttcccatcttttgcaaagaaacttttgatctctctgtgcaaagatgttccctttcaagttaagtgtgtggcctgccacaagacactgcgttcccacatggagctcactgcccatttcagagttcattgtcgaaatgctggacctgtagctgtagctagagaagagtgcattacccaggttgcagagaaattcatattaagaggttattgtccagattgcaatcaagtctttgtggatgaaaccagcacccaaaatcataagcagaattcaggacacaaagtccgagtcattaactcagtggaagaatcagtcttactctattgccacagcagcgaagggaacaaggatccttcttctgacttgcatttattgttggatcaatcaaaattttcatcacttaaaagaaccatgtctattaaagaatctagctcactggagtgcattgccattccaaaaaagaagatgaatttaaaagataaaagccatgaaggtgttgcttgtgtccagaaagaaaaatcagtagttaaaacctggttctgtgaatgcaatcagcgattcccaagtgaagatgcagtagaaaagcatgttttctcagcaaacacaatgggttataaatgtgtggtctgtggaaaggtatgtgatgattcaggggtcattcgtttacacatgagccggattcacggaggggcacatttaaataactttcttttctggtgtcggacatgcaaaaaggagttaacaaggaaagatactatcatggcacatgtgactgaatttcataatggacacagatatttttatgagatggatgaggtagaaggtgaaactttgccatcatcctctacaacattggataatttgactgctaacaagccttcatcagctattactgttattgatcattccccggcaaatagttctccgaggggtaaatggcaatgccggatttgtgaagatatgtttgattcccaggaatatgtaaaacagcactgcatgtctttggcaagccacaagtttcatagatacagctgtgctcactgcagaaagccttttcataagatagaaacattgtaccgacattgccaagatgagcatgacaatgagataaagattaaatacttctgtgggctttgtgatcttatctttaatgtggaagaagcatttctgagtcattatgaggagcaccacagcatagattatgtatttgtgtcagaaaaaactgaaacttcaattaaaaccgaagatgattttccagtaatagagaccagtaaccagttaacttgtggttgccgtgagagttacatctgtaaagtcaacagaaaagaagattatagcagatgtctccaaatcatgctggataaaggaaaactgtggtttcgctgcagtttatgttcggcaacagcacagaatttaaccgacatgaacactcatatccatcaagtgcacaaagaaaagagtgatgaggaggagcagcagtatgtaatcaagtgtggcacctgcaccaaagcatttcatgatcctgagagtgcacagcagcatttccatagaaaacattgcttcttacagaaacccagtgtggctcattttggatctgaaaaatcaaacctgtacaagtttactgctagtgcctcacatacagagagaaaactgaaacaggcaataaactattcaaaaagtttagacatggagaaaggagttgagaatgacctaagctatcagaatatagaggaagaaattgttgagcttccagatttggattacctgcgaaccatgactcatatagtctttgtagattttgataactggtcaaacttttttggtcatctaccagggcatctaaaccaaggaacatttatttggggctttcaaggaggaaacaccaattggaagcctccgctcaactgtaagatttataactacctgaacaggattggatgcttcttccttcatcctcgctgtagtaaaagaaaagatgctgctgattttgccatatgtatgcatgctggccgtctagatgaacaactacccaagcaaattcctttcaccatcctctcaggagatcaaggttttctggagctagagaatcaatttaagaagactcagaggccagctcatatactaaaccctcaccacttagagggagatatgatgtgtgccttgttaaatagcatatctgataccaccaaagaatgtgacagtgatgataacatgggtgccaaaaatacttcaataggagaagaatttatatccacagaagatgtggaattagaagaagctattagaagaagtcttgaggaaatgtaattaaagatattaccacacaacatcaagtggccttgaagagactgagataacgaattcttgagtttgttttctaaaggagaccagaaatccactattacaaatgtatttgaaaacatgtttttgctttcatatgttcaaaatctgatctttgttttgtatttttgtgctaatgtgcaaacatgtacagaagaaatagaatacatgttcatgcaaatataaattatgtattctaatataggtgtaacagtttcccagttaactttgaatttatatatttagatttaaaggattaaaaaaaaggaaagctcttgacagttgtttcccaaatagcattagttctttaattttatttgtactgtacaaatgatgctagtttatttttttagcagtgaaaatgaatataaaaaaggtgacataggtcaagttttccataaattctacttctcatgtggcactattatataatacctttgagatctttgtttatgtttattagaagagggtaatggaaactgatcatggaaacatttaaaattttatcagcaatgttctttgtgggtgccatgcatatgtaaattattgctttaattagagcagcacattgctaaaataaaaaatacaccttaatttttaagaaataatttaaatgaaacaatttccattccttttacctgcttagacttttatgtgacttgtatggtctcctggttaaagggaatggtgtcagaatatttgcataaaattatttttcataacagtccttttttatatattggtgtaaacataatattcttcaagaaataatgttgaaagcctactcaggaataatcttccttaactctttaaatttttatttcatgtgaagtgttttcagtttagttattcactgaattgtcagtttccttcatttggtattacatatttaattcttaaatattgaggccccattgtgagtaataaaaaatacgacataagtagaagactaagaagggcttgtcatattatctttgtgtatatgcttcatgttatttaaccagaaatgtcttatctctaaaaatttttagtagtaattatttaccaaacttaaaaacatttctataaatataaagcttttctttatatttaagacaaaatataaaggctagaatttggttccttctctgtaacactaaatattttagtgtgaaattgaatttttttattactatagtcttttcaatctataatttgtgtttttaatttcttgatatgtcacttctgttcctccctgcttgcattttttaaaaactagacattgtggcttgagaatttatcaatcatctttccgaaatgaccacattgtgcttttagtttgtatgtttaagtggtcaagcaaggctctaggaggtagtcactgagctggaccttaaacacatctgcaggagctcacaaaatgggagcaaaagaggcattccagaaagaagagtagttaagcagatgtgggggcagggcaagaggagacagcaccttgttgccagagattctacacaaaggtgtgatggacactgatgctctattaagaagcttttgtggtgtgtgtggtagagaataattaaggcttctgataagacaggaaagggatatttcatcatgactgttaagaaaaggtaactgggttgtttaatgttttaattgataattgtcaatacgaatggggagaagaagaagcaaaaaagaaagaaaaaacacttattagaagccctagtcattttttggctttctgttttgttgctgtccattgaagactttgaacatgccgccttaataaaagattagaaggttctaacattgaca

SEQ ID NO: 360678 - DNA, 3764 bp, Homo sapiens
agcccgggagtgagagaaagcggctccgggggcatagcgggccagtaagggccgctcctcctttgaagaggttttgcgtctctttccgccggtggcgtcggcgctcacgcaggggcgggtcccggtagcgccaggcggtgcagggcgggaaggggattcgtggcgacggcggcggcagggacagcaggagcagtggtgctgtcagcgcggccgtcggagacatgggagacccggggtcggagataatagaatctgtccctccagctggccctgaggcatctgagtcaacaacggatgaaaatgaagacgacattcagtttgtcagtgaaggaccattacgacctgttcttgaatacattgatctggtcagcagtgatgatgaagagcctagcacctcttatactgatgagaatattaaacgtaaagaccatattgattatcagaaggataaagttgctttaactctggctcgtctagcccgccatgttgaagtggagaaacagcagaaagaagagaagaatagagcattcagagaaaaaattgattttcagcatgctcatgggttacaagaattggaatttattcgaggacattctgatacagaagcagcaagactgtgtgtggaccagtggctaaaaatgccaggactcaaaacaggcacaattaattgtggaacaaaaagttcattccgaagaggaggccacacgtgggtgtctgggaaaccaattttatgtcctataatgcactgtaacaaggagtttgacaatgggcaccttctcttaggacatttgaaaaggttcgatcactctccatgtgatccaacaattacactacatggacctttcttcagctcctttgcttgtgtagtatgttataaaaaatttgttactcaacaacaatatagagatcacctttttgataaggaagccacagatgatggacataacaacaaccttcttcctcagattattcagtgttttgcatgtccaaattgcttccttctttttagcagaaaggaggagtgttcaaagcatatgtctggaaagaatcatttccatcagagtttcaaactgggtgataacaaaggaattgcacatccaatatctttcccatcttttgcaaagaaacttttgatctctctgtgcaaagatgttccctttcaagttaagtgtgtggcctgccacaagacactgcgttcccacatggagctcactgcccatttcagagttcattgtcgaaatgctggacctgtagctgtagctagagaagagtgcattacccaggttgcagagaaattcatattaagaggttattgtccagattgcaatcaagtctttgtggatgaaaccagcacccaaaatcataagcagaattcaggacacaaagtccgagtcattaactcagtggaagaatcagtcttactctattgccacagcagcgaagggaacaaggatccttcttctgacttgcatttattgttggatcaatcaaaattttcatcacttaaaagaaccatgtctattaaagaatctagctcactggagtgcattgccattccaaaaaagaagatgaatttaaaagataaaagccatgaaggtgttgcttgtgtccagaaagaaaaatcagtagttaaaacctggttctgtgaatgcaatcagcgattcccaagtgaagatgcagtagaaaagcatgttttctcagcaaacacaatgggttataaatgtgtggtctgtggaaaggtatgtgatgattcaggggtcattcgtttacacatgagccggattcacggaggggcacatttaaataactttcttttctggtgtcggacatgcaaaaaggagttaacaaggaaagatactatcatggcacatgtgactgaatttcataatggacacagatatttttatgagatggatgaggtagaaggtgaaactttgccatcatcctctacaacattggataatttgactgctaacaagccttcatcagctattactgttattgatcattccccggcaaatagttctccgaggggtaaatggcaatgccggatttgtgaagatatgtttgattcccaggaatatgtaaaacagcactgcatgtctttggcaagccacaagtttcatagatacagctgtgctcactgcagaaagccttttcataagatagaaacattgtaccgacattgccaagatgagcatgacaatgagataaagattaaatacttctgtgggctttgtgatcttatctttaatgtggaagaagcatttctgagtcattatgaggagcaccacagcatagattatgtatttgtgtcagaaaaaactgaaacttcaattaaaaccgaagatgattttccagtaatagagaccagtaaccagttaacttgtggttgccgtgagagttacatctgtaaagtcaacagaaaagaagattatagcagatgtctccaaatcatgctggataaaggaaaactgtggtttcgctgcagtttatgttcggcaacagcacagaatttaaccgacatgaacactcatatccatcaagtgcacaaagaaaagagtgatgaggaggagcagcagtatgtaatcaagtgtggcacctgcaccaaagcatttcatgatcctgagagtgcacagcagcatttccatagaaaacattgcttcttacagaaacccagtgtggctcattttggatctgaaaaatcaaacctgtacaagtttactgctagtgcctcacatacagagagaaaactgaaacaggcaataaactattcaaaaagtttagacatggagaaaggagttgagaatgacctaagctatcagaatatagaggaagaaattgttgagcttccagatttggattacctgcgaaccatgactcatatagtctttgtagattttgataactggtcaaacttttttggtcatctaccagggcatctaaaccaaggaacatttatttggggctttcaaggtacggttaataagaaaaacaaaagaaaactttttcccacctcttagaatatagttcagtttaaaaggctcctcttaaaccttcctggatagaacataggaacataattggaatattgttcttttgtattatagttactctgctagaatcgttttctttacatgcctctgtggtaaatgttagctctatctggtgactcaaagtttatggatcttttggccgggcgcggtggctcacgtctgtaatcccagaactttggaaggctgaggcggacggatcacgaggtcagaagatcgagaccatcctggctaacatggtgaaaccccgtctctactaaaaagaaaaaaaaaatacaaaaaattagctgggcgtggtggcgggcccctgtagtcccagctccttgggaggctgaggcaggagaatggtgtgaacccaggaggcgaagcttgcagtgagctgagatcgcaccactgctctccagcctgggcaacagagtgagactctgtcttaaaaaaaaaaaaaaaaaaaaaaaaaagtttatggatcttttgatacagattgaaaaagcctttattcaacacctaaaatgtgtcaggtgctttggctttgtactaacatggttactgattattatggttttatcccttttaaaatacaaagaagcagatgttttgtttttgtttttgttttttttccctcaaagttttaaaactaataaatagcagaattatttggcctctcagctataggactaatgttattttcaacatgccataactgcctcttcg

SEQ ID NO: 360679 - DNA, 3750 bp, Homo sapiens
agcccgggagtgagagaaagcggctccgggggcatagcgggccagtaagggccgctcctcctttgaagaggttttgcgtctctttccgccggtggcgtcggcgctcacgcaggggcgggtcccggtagcgccaggcggtgcagggcgggaaggggattcgtggcgacggcggcggcagggacagcaggagcagtggtgctgtcagcgcggccgtcggagacatgggagacccggggtcggagataatagaatctgtccctccagctggccctgaggcatctgagtcaacaacggatgaaaatgaagacgacattcagtttgtcagtgaaggaccattacgacctgttcttgaatacattgatctggtcagcagtgatgatgaagagcctagcacctcttatactgatgagaatattaaacgtaaagaccatattgattatcagaaggataaagttgctttaactctggctcgtctagcccgccatgttgaagtggagaaacagcagaaagaagagaagaatagagcattcagagaaaaaattgattttcagcatgctcatgggttacaagaattggaatttattcgaggacattctgatacagaagcagcaagactgtgtgtggaccagtggctaaaaatgccaggactcaaaacaggcacaattaattgtggaacaaaaagttcattccgaagaggaggccacacgtgggtgtctgggaaaccaattttatgtcctataatgcactgtaacaaggagtttgacaatgggcaccttctcttaggacatttgaaaaggttcgatcactctccatgtgatccaacaattacactacatggacctttcttcagctcctttgcttgtgtagtatgttataaaaaatttgttactcaacaacaatatagagatcacctttttgataaggaagccacagatgatggacataacaacaaccttcttcctcagattattcagtgttttgcatgtccaaattgcttccttctttttagcagaaaggaggagtgttcaaagcatatgtctggaaagaatcatttccatcagagtttcaaactgggtgataacaaaggaattgcacatccaatatctttcccatcttttgcaaagaaacttttgatctctctgtgcaaagatgttccctttcaagttaagtgtgtggcctgccacaagacactgcgttcccacatggagctcactgcccatttcagagttcattgtcgaaatgctggacctgtagctgtagctagagaagagtgcattacccaggttgcagagaaattcatattaagaggttattgtccagattgcaatcaagtctttgtggatgaaaccagcacccaaaatcataagcagaattcaggacacaaagtccgagtcattaactcagtggaagaatcagtcttactctattgccacagcagcgaagggaacaaggatccttcttctgacttgcatttattgttggatcaatcaaaattttcatcacttaaaagaaccatgtctattaaagaatctagctcactggagtgcattgccattccaaaaaagaagatgaatttaaaagataaaagccatgaaggtgttgcttgtgtccagaaagaaaaatcagtagttaaaacctggttctgtgaatgcaatcagcgattcccaagtgaagatgcagtagaaaagcatgttttctcagcaaacacaatgggttataaatgtgtggtctgtggaaaggtatgtgatgattcaggggtcattcgtttacacatgagccggattcacggaggggcacatttaaataactttcttttctggtgtcggacatgcaaaaaggagttaacaaggaaagatactatcatggcacatgtgactgaatttcataatggacacagatatttttatgagatggatgaggtagaaggtgaaactttgccatcatcctctacaacattggataatttgactgctaacaagccttcatcagctattactgttattgatcattccccggcaaatagttctccgaggggtaaatggcaatgccggatttgtgaagatatgtttgattcccaggaatatgtaaaacagcactgcatgtctttggcaagccacaagtttcatagatacagctgtgctcactgcagaaagccttttcataagatagaaacattgtaccgacattgccaagatgagcatgacaatgagataaagattaaatacttctgtgggctttgtgatcttatctttaatgtggaagaagcatttctgagtcattatgaggagcaccacagcatagattatgtatttgtgtcagaaaaaactgaaacttcaattaaaaccgaagatgattttccagtaatagagaccagtaaccagttaacttgtggttgccgtgagagttacatctgtaaagtcaacagaaaagaagattatagcagatgtctccaaatcatgctggataaaggaaaactgtggtttcgctgcagtttatgttcggcaacagcacagaatttaaccgacatgaacactcatatccatcaagtgcacaaagaaaagagtgatgaggaggagcagcagtatgtaatcaagtgtggcacctgcaccaaagcatttcatgatcctgagagtgcacagcagcatttccatagaaaacattgcttcttacagaaacccagtgtggctcattttggatctgaaaaatcaaacctgtacaagtttactgctagtgcctcacatacagagagaaaactgaaacaggcaataaactattcaaaaagtttagacatggagaaaggagttgagaatgacctaagctatcagaatatagaggaagaaattgttgagcttccagatttggattacctgcgaaccatgactcatatagtctttgtagattttgataactggtcaaacttttttggtcatctaccagggcatctaaaccaaggaacatttatttggggctttcaaggaggaaacaccaattggaagcctccgctcaactgtaagatttataactacctgaacaggattggatgcttcttccttcatcctcgctgtagtaaaagaaaagatgctgctgattttgccatatgtatgcatgctggccgtctagatgaacaactacccaagcaaattcctttcaccatcctctcaggagatcaaggttttctggagctagagaatcaatttaagaagactcagaggccagctcatatactaaaccctcaccacttagagggagatatgatgtgtgccttgttaaatagcatatctgataccaccaaaggtacgcagctgcagtcacagtgcaaaccacccaagaggaggagacttcactgctgagagaaaccaataaactgctgtccgctagtgaactgttgcctgcttgctaaaccatcatgttctcttacttctatcttacttatcttttttaaaaaaatctcactttcattctttagtgttttagaaggaggatgaattcataataattttctggagctttttttgatctagtagataaaatctatattgatgtatataaaacatatattcatgtgttacagtatgttactacaattttaaaagctcagaattcagatcttcactttgtttctgaaattccaagttgaccttcagttttttagaaagcagtgcgcttagaggtgaaaaccagaaagcaataacaaaggtgatcatttaagaggttgacagtgacaaaataaaacgctgataggcttttagg

SEQ ID NO: 360680 - DNA, 3858 bp, Homo sapiens
agcgtggtgttacactccagtcatggcggcccgacaggccgtgggcagcggggctcaggagacatgcggtctggatcggattttggaggcattgaagctgctgctgagcccgggaggctcgggctcaagttcactacaggtcacaaaacatgatgtcttgttggctactttaaaatctaacctgtctgctttggaggacaagtttctgaaggatcctcagtggaagaatctgaaactcctaagagatgaaattgctgataaggcagaatggccacaaaactctgtggatgtcacttggagttttacctctcaaaccttgttgttgcttttgtgcttgaaggaaaccatgatccgccttgcagctaatttcaatccaggtaaacccaaccctaggactccggaagttgctcctgccctgagccccgatgcacttagtatctcacaacagaagactgtccagttcgttttgcagtttgtagttaccttgggtatctgcccctatctcatgcctggtgttggagtccctttgagatatagaactgaatttggtgccgtcgttcaagacgtggtgtgttttgatgctgcccccgatgcaactcgaagactgtacaccagctgcaaggcccttctgaatgttgctcagcacacatctctggggagcttgatcttctgccaccactttggggatatcgcagcaggtctgtgccaactgggattctgcccaaccaaaagaaaactgctaacacctgcagaagaggttctaactgaagaggagagaaccctatccaggggggccttgagagacatgctggatcaagtctatcagcccttagcagtccgggaactgcttatcctccagggaggaccaccccaggtcctgcacagatgtgaagacacagatgaggtgtcgggccccagcttggcttcggcgtctatgtggacagctgctctctgaaaggttaatgagacctaatggtgttcaggcagtagtccggggcattttggaaggagcaggtgcgggagcagctggtggaagtgatgctgaggtgacggctgctgactggaagaagtgtgacctgatcgcaaagattttggcctcttgtccccagcagtctctttcaccagagaattactacagggacatctgcccccaggttctggatttatttcactttcaagataaattgacagcacgacaatttcagagagttgccaccactacctttataactttgtcaagagaacgcccacatttggcagcaaagtatttgctccagccagtgttagctcctcttcatcgatgtttgaatacagcagagctttcagagagtgacatggtaccaggaactattttggtgacagaagaagaacttagtagatgcattgaggatgtgtttaaggtgtacgtggttgggaatgaacctttaacagttttgatggattccctgcttccagtcctgggagtgctttttcttctctactgttttactaagcagagtgtgtctcacataaggtcactttgccaagaaatcttattatggattctggggaagctggaaaggaagaaggcaattgccagcctgaaaggatttgcagggttggacaaagctgtgccctctctccattctctgtgtcagtttagagttgccactcaaggtggcattatgattaccatcaaagaggccattagtgatgaagatgaagatgaagccctgtaccagaaggtatcctctgagcagggccgggtggagcatctcggggacttgctgtcccactgccaggaatgcggtttggcaggagacttcttcatcttctgtttgaaagagttgactcatgtggcctcggaaaatgaaacagagttaaaaactgagcccttctccagcaagagcctcttggaattagagcaacatcagactcttcttgtggaaggccaagagcggaagctgcttgtcctgcagctgatggctgttctgtgcgagagaatgtctgagcagatattcacaaacgtcactcaggtggtggactttgtagcagcaacattgcagagagcctgtgcaagcctggcccatcaggcagagagcaccgtggaatcacagacgctgagcatgtccatggggctggtggctgtcatgctaggaggagctgttcagttgaagtcaagtgattttgctgttctgaagcagttgttgcctctgttggagaaggtatccaacacataccctgatccggtcatccaagaactcgctgttgatctccgcatcaccatctctacccatggagcctttgccactgaggccgtcagcatggctgcccaaagtacactgaacagaaaagatctggaagggaaaatagaagagcagcaacaaaccagtcatgaaagacccactgatgtagctcatagccaccttgaacaacagcagagccatgagacagccccccagacaggcctgcagtcaaatgctccaatcattcctcaaggagtcaatgagcccagcactactacaagtcagaaatctggaagcgtaaccacagaacagctccaagaggttcttttgtcagcttatgaccctcaaattccaacacgggctgctgccctgcgtactctttcccactggatagagcagagagaagcaaaagcccttgagatgcaagagaagcttctcaagatattcttggaaaacttggaacatgaagacacttttgtatatctatctgcaattcagggggttgccctgctgtcagacgtctatcctgagaaaatcttgccggacttgttggctcaatatgacagcagcaaagacaagcacacaccagagaccagaatgaaagtcggggaagtccttatgcgaatcgtcagggcattaggagacatggtctcaaagtaccgagaacctttgatccataccttcctgaggggagtgagagatcctgatggtgctcacagggccagcagcttggccaaccttggggagctgtgccagaggctggactttctgctgggctccgtggtccatgaggtaacagcttgcctgattgctgtggccaaaacagatggtgaagttcaagtacgcagagctgccatacatgtggttgtgctgctgcttcggggactcagccagaaagctactgaggtgctgagcgccgtcctcaaggatctctaccacctgctgaagcacgtagtgtgtctggagcccgatgacgtggccaagctccatgcccagttggccctagaagagctggatgacatcatgaaaaacttcctgttccctccacagaagctggagaagaagatcatggtcctgccgtagacctggctccaaggacgtggaggaggcaggcagggccaggcacccagagccgtgcccaggtcttccagcaggtggccctgctgcctcttgagtgctggcagcatggctgaccctcggggtggttttatggtgcaggtcacttgggtcttcagggtcccttccgagggcatgtgttcagcactcccgcgttcagcctgaggggtgtacagttaagagaagacagttacagatctcattaatctacatttttcactgtcctctagcattgaaagaaggatgtctacctggtgaaagtatattttaacatgactgatggaatttcactaattgcccactctcttggaacttgaggagaagcggttggccacccatatgtcacctagctctatattctttcaggctgagattcttcttcaggaaaatgaggagcagaactggccacccttggctgctcaagaggcatttcagagtaggagatgcagttggaggtggggaggggaaggaaatagttatcaaataatgcaaaatggaataaagttatcttggatgg

SEQ ID NO: 360681 - DNA, 2264 bp, Homo sapiens
actcactatgctgactctccaaacaataggcagcccttgctgggagagctttagagatggttttcagcatctctgcgttcatcccatcacagggtgactggtttatttgccttttgatcgtaaacagtaatgaatcctttctttttgttttcaaccccaggggttgccctgctgtcagacgtctatcctgagaaaatcttgccggacttgttggctcaatatgacagcagcaaagacaagcacacaccagagaccagaatgaaagtcggggaagtccttatgcgaatcgtcagggcattaggagacatggtctcaaagtaccgagaacctttgatccataccttcctgaggggagtgagagatcctgatggtgctcacagggccagcagcttggccaaccttggggagctgtgccagaggctggactttctgctgggctccgtggtccatgaggtaacagcttgcctgattgctgtggccaaaacagatggtgaagttcaagtacgcagagctgccatacatgtggttgtgctgctgcttcggggactcagccagaaagctactgaggtgctgagcgccgtcctcaaggatctctaccacctgctgaagcacgtagtgtgtctggagcccgatgacgtggccaagctccatgcccagttggccctagaagagctggatgacatcatgaaaaacttcctgttccctccacagaagctggagaagaagatcatggtcctgccgtagacctggctccaaggacgtggaggaggcaggcagggccaggcacccagagccgtgcccaggtcttccagcaggtggccctgctgcctcttgagtgctggcagcatggctgaccctcggggtggttttatggtgcaggtcacttgggtcttcagggtcccttccgagggcatgtgttcagcactcccgcgttcagcctgaggggtgtacagttaagagaagacagttacagatctcattaatctacatttttcactgtcctctagcattgaaagaaggatgtctacctggtgaaagtatattttaacatgactgatggaatttcactaattgcccactctcttggaacttgaggagaagcggttggccacccatatgtcacctagctctatattctttcaggctgagattcttcttcaggaaaatgaggagcagaactggccacccttggctgctcaagaggcatttcagagtaggagatgcagttggaggtggggaggggaaggaaatagttatcaaataatgcaaaatggaataaagttatcttggatggaaagaacagggctaaatctggtcctctggtgtcgagatggaaaactgtggagttgaagaggctctgatgcccagaaaggacaatcaagctggttgactcttccagagaagaagggtaagccctgtatttatcctcccaggccattcttcttcactcctgctgctgtttgcagagagttgccctgattatcaggagaaaagaaccacgagcatccagagagtttacatcctgccttctgtcctctgctccttcagaaagatgaatgcctagacaatgggttcacactgaatgcaggctggaaagaatgcatgctggtggcctaatgccagggctgttgaaacaatttcagatatagcactgtggtctccactttatttctttatatgttttggccgctgcattttgattgcagctaaaagagataacagaaaggagatactggctggctgcttcatattagccctctctgttgtcaacaccttgatgaggccaacccagagatgcttgatcagtcctcagctttgcagggctaggtacagaattttatcacaggattttatcacgctctctggggtgactagatccacaggaaccaaaacgcagtttccaaaagctcgagtgactgaaggatctatacacaaacatggctatttgctagttaacaacaggatatttctctctggccagatcacagacatggttctgagtcagatcttccttggtggcatccctttaaagaggccatcttatgaacaggatcacaagtgagcttagtgagcagagagttagaacaaatctagctaggtgtgtttaaggaatatttccattcagctagtgtagctggattaatttctattctccaaatcaaggatgtctagaaaatgggcattgtggctttcaaatctaagaagaatctcctttgggccagctggatgtacaataaaaatgcttgtttcttggccttccttta

SEQ ID NO: 360682 - DNA, 4828 bp, Homo sapiens
agcgtggtgttacactccagtcatggcggcccgacaggccgtgggcagcggggctcaggagacatgcggtctggatcggattttggaggcattgaagctgctgctgagcccgggaggctcgggctcaagttcactacaggtcacaaaacatgatgtcttgttggctactttaaaatctaacctgtctgctttggaggacaagtttctgaaggatcctcagtggaagaatctgaaactcctaagagatgaaattgctgataaggcagaatggccacaaaactctgtggatgtcacttggagttttacctctcaaaccttgttgttgcttttgtgcttgaaggaaaccatgatccgccttgcagctaatttcaatccaggtaaacccaaccctaggactccggaagttgctcctgccctgagccccgatgcacttagtatctcacaacagaagactgtccagttcgttttgcagtttgtagttaccttgggtatctgcccctatctcatgcctggtgttggagtccctttgagatatagaactgaatttggtgccgtcgttcaagacgtggtgtgttttgatgctgcccccgatgcaactcgaagactgtacaccagctgcaaggcccttctgaatgttgctcagcacacatctctggggagcttgatcttctgccaccactttggggatatcgcagcaggtctgtgccaactgggattctgcccaaccaaaagaaaactgctaacacctgcagaagaggttctaactgaagaggagagaaccctatccaggggggccttgagagacatgctggatcaagtctatcagcccttagcagtccgggaactgcttatcctccagggaggaccaccccaggtcctgcacagatgtgaagacacagatgaggtgtcgggccccagcttggcttcggcgtctatgtggacagctgctctctgaaaggttaatgagacctaatggtgttcaggcagtagtccggggcattttggaaggagcaggtgcgggagcagctggtggaagtgatgctgaggtgacggctgctgactggaagaagtgtgacctgatcgcaaagattttggcctcttgtccccagcagtctctttcaccagagaattactacagggacatctgcccccaggttctggatttatttcactttcaagataaattgacagcacgacaatttcagagagttgccaccactacctttataactttgtcaagagaacgcccacatttggcagcaaagtatttgctccagccagtgttagctcctcttcatcgatgtttgaatacagcagagctttcagagagtgacatggtaccaggaactattttggtgacagaagaagaacttagtagatgcattgaggatgtgtttaaggtgtacgtggttgggaatgaacctttaacagttttgatggattccctgcttccagtcctgggagtgctttttcttctctactgttttactaagcagagtgtgtctcacataaggtcactttgccaagaaatcttattatggattctggggaagctggaaaggaagaaggcaattgccagcctgaaaggatttgcagggttggacaaagctgtgccctctctccattctctgtgtcagtttagagttgccactcaaggtggcattatgattaccatcaaagaggccattagtgatgaagatgaagatgaagccctgtaccagaaggtatcctctgagcagggccgggtggagcatctcggggacttgctgtcccactgccaggaatgcggtttggcaggagacttcttcatcttctgtttgaaagagttgactcatgtggcctcggaaaatgaaacagagttaaaaactgagcccttctccagcaagagcctcttggaattagagcaacatcagactcttcttgtggaaggccaagagcggaagctgcttgtcctgcagctgatggctgttctgtgcgagagaatgtctgagcagatattcacaaacgtcactcaggtggtggactttgtagcagcaacattgcagagagcctgtgcaagcctggcccatcaggcagagagcaccgtggaatcacagacgctgagcatgtccatggggctggtggctgtcatgctaggaggagctgttcagttgaagtcaagtgattttgctgttctgaagcagttgttgcctctgttggagaaggtatccaacacataccctgatccggtcatccaagaactcgctgttgatctccgcatcaccatctctacccatggagcctttgccactgaggccgtcagcatggctgcccaaagtacactgaacagaaaagatctggaagggaaaatagaagagcagcaacaaaccagtcatgaaagacccactgatgtagctcatagccaccttgaacaacagcagagccatgagacagccccccagacaggcctgcagtcaaatgctccaatcattcctcaaggagtcaatgagcccagcactactacaagtcagaaatctggaagcgtaaccacagaacagctccaagaggttcttttgtcagcttatgaccctcaaattccaacacgggctgctgccctgcgtactctttcccactggatagagcagagagaagcaaaagcccttgagatgcaagagaagcttctcaagatattcttggaaaacttggaacatgaagacacttttgtatatctatctgcaattcagggggttgccctgctgtcagacgtctatcctgagaaaatcttgccggacttgttggctcaatatgacagcagcaaagacaagcacacaccagagaccagaatgaaagtcggggaagtccttatgcgaatcgtcagggcattaggagacatggtctcaaagtaccgagaacctttgatccataccttcctgaggggagtgagagatcctgatggtgctcacagggccagcagcttggccaaccttggggagctgtgccagaggctggactttctgctgggctccgtggtccatgaggtaacagcttgcctgattgctgtggccaaaacagatggtgaagttcaagtacgcagagctgccatacatgtggttgtgctgctgcttcggggactcagccagaaagctactgaggtgctgagcgccgtcctcaaggatctctaccacctgctgaagcacgtagtgtgtctggagcccgatgacgtggccaagctccatgcccagttggccctagaagagctggatgacatcatgaaaaacttcctgttccctccacagaagctggagaagaagatcatggtcctgccgtagacctggctccaaggacgtggaggaggcaggcagggccaggcacccagagccgtgcccaggtcttccagcaggtggccctgctgcctcttgagtgctggcagcatggctgaccctcggggtggttttatggtgcaggtcacttgggtcttcagggtcccttccgagggcatgtgttcagcactcccgcgttcagcctgaggggtgtacagttaagagaagacagttacagatctcattaatctacatttttcactgtcctctagcattgaaagaaggatgtctacctggtgaaagtatattttaacatgactgatggaatttcactaattgcccactctcttggaacttgaggagaagcggttggccacccatatgtcacctagctctatattctttcaggctgagattcttcttcaggaaaatgaggagcagaactggccacccttggctgctcaagaggcatttcagagtaggagatgcagttggaggtggggaggggaaggaaatagttatcaaataatgcaaaatggaataaagttatcttggatggaaagaacagggctaaatctggtcctctggtgtcgagatggaaaactgtggagttgaagaggctctgatgcccagaaaggacaatcaagctggttgactcttccagagaagaagggtaagccctgtatttatcctcccaggccattcttcttcactcctgctgctgtttgcagagagttgccctgattatcaggagaaaagaaccacgagcatccagagagtttacatcctgccttctgtcctctgctccttcagaaagatgaatgcctagacaatgggttcacactgaatgcaggctggaaagaatgcatgctggtggcctaatgccagggctgttgaaacaatttcagatatagcactgtggtctccactttatttctttatatgttttggccgctgcattttgattgcagctaaaagagataacagaaaggagatactggctggctgcttcatattagccctctctgttgtcaacaccttgatgaggccaacccagagatgcttgatcagtcctcagctttgcagggctaggtacagaattttatcacaggattttatcacgctctctggggtgactagatccacaggaaccaaaacgcagtttccaaaagctcgagtgactgaaggatctatacacaaacatggctatttgctagttaacaacaggatatttctctctggccagatcacagacatggttctgagtcagatcttccttggtggcatccctttaaagaggccatcttatgaacaggatcacaagtgagcttagtgagcagagagttagaacaaatctagctaggtgtgtttaaggaatatttccattcagctagtgtagctggattaatttctattctccaaatcaaggatgtctagaaaatgggcattgtggctttcaaatctaagaagaatctcctttgggccagctggatgtacaataaaaatgcttgtttcttggccttccttta

SEQ ID NO: 360683 - DNA, 2639 bp, Homo sapiens
agcgtggtgttacactccagtcatggcggcccgacaggccgtgggcagcggggctcaggagacatgcggtctggatcggattttggaggcattgaagctgctgctgagcccgggaggctcgggctcaagttcactacaggtcacaaaacatgatgtcttgttggctactttaaaatctaacctgtctgctttggaggacaagtttctgaaggatcctcagtggaagaatctgaaactcctaagagatgaaattgctgataaggcagaatggccacaaaactctgtggatgtcacttggagttttacctctcaaaccttgttgttgcttttgtgcttgaaggaaaccatgatccgccttgcagctaatttcaatccaggtaaacccaaccctaggactccggaagttgctcctgccctgagccccgatgcacttagtatctcacaacagaagactgtccagttcgttttgcagtttgtagttaccttgggtatctgcccctatctcatgcctggtgttggagtccctttgagatatagaactgaatttggtgccgtcgttcaagacgtggtgtgttttgatgctgcccccgatgcaactcgaagactgtacaccagctgcaaggcccttctgaatgttgctcagcacacatctctggggagcttgatcttctgccaccactttggggatatcgcagcaggtctgtgccaactgggattctgcccaaccaaaagaaaactgctaacacctgcagaagaggttctaactgaagaggagagaaccctatccaggggggccttgagagacatgctggatcaagtctatcagcccttagcagtccgggaactgcttatcctccagggaggaccaccccaggagacgctgagcatgtccatggggctggtggctgtcatgctaggaggagctgttcagttgaagtcaagtgattttgctgttctgaagcagttgttgcctctgttggagaaggtatccaacacataccctgatccggtcatccaagaactcgctgttgatctccgcatcaccatctctacccatggagcctttgccactgaggccgtcagcatggctgcccaaagtacactgaacagaaaagatctggaagggaaaatagaagagcagcaacaaaccagtcatgaaagacccactgatgtagctcatagccaccttgaacaacagcagagccatgagacagccccccagacaggcctgcagtcaaatgctccaatcattcctcaaggagtcaatgagcccagcactactacaagtcagaaatctggaagcgtaaccacagaacagctccaagaggttcttttgtcagcttatgaccctcaaattccaacacgggctgctgccctgcgtactctttcccactggatagagcagagagaagcaaaagcccttgagatgcaagagaagcttctcaagatattcttggaaaacttggaacatgaagacacttttgtatatctatctgcaattcagggggttgccctgctgtcagacgtctatcctgagaaaatcttgccggacttgttggctcaatatgacagcagcaaagacaagcacacaccagagaccagaatgaaagtcggggaagtccttatgcgaatcgtcagggcattaggagacatggtctcaaagtaccgagaacctttgatccataccttcctgaggggagtgagagatcctgatggtgctcacagggccagcagcttggccaaccttggggagctgtgccagaggctggactttctgctgggctccgtggtccatgaggtaacagcttgcctgattgctgtggccaaaacagatggtgaagttcaagtacgcagagctgccatacatgtggttgtgctgctgcttcggggactcagccagaaagctactgaggtgctgagcgccgtcctcaaggatctctaccacctgctgaagcacgtagtgtgtctggagcccgatgacgtggccaagctccatgcccagttggccctagaagagctggatgacatcatgaaaaacttcctgttccctccacagaagctggagaagaagatcatggtcctgccgtagacctggctccaaggacgtggaggaggcaggcagggccaggcacccagagccgtgcccaggtcttccagcaggtggccctgctgcctcttgagtgctggcagcatggctgaccctcggggtggttttatggtgcaggtcacttgggtcttcagggtcccttccgagggcatgtgttcagcactcccgcgttcagcctgaggggtgtacagttaagagaagacagttacagatctcattaatctacatttttcactgtcctctagcattgaaagaaggatgtctacctggtgaaagtatattttaacatgactgatggaatttcactaattgcccactctcttggaacttgaggagaagcggttggccacccatatgtcacctagctctatattctttcaggctgagattcttcttcaggaaaatgaggagcagaactggccacccttggctgctcaagaggcatttcagagtaggagatgcagttggaggtggggaggggaaggaaatagttatcaaataatgcaaaatggaataaagttatcttggatgg

SEQ ID NO: 360684 - DNA, 971 bp, Homo sapiens
agcgtggtgttacactccagtcatggcggcccgacaggccgtgggcagcggggctcaggagacatgcggtctggatcggattttggaggcattgaagctgctgctgagcccgggaggctcgggctcaagttcactacaggtcacaaaacatgatgtcttgttggctactttaaaatctaacctgtctgctttggaggacaagtttctgaaggatcctcagtggaagaatctgaaactcctaagagatgaaattgctgataaggcagaatggccacaaaactctgtggatgtcacttggagttttacctctcaaaccttgttgttgcttttgtgcttgaaggaaaccatgatccgccttgcagctaatttcaatccaggtaaacccaaccctaggactccggaagttgctcctgccctgagccccgatgcacttagtatctcacaacagaagactgtccagttcgttttgcagtttgtagttaccttgggtatctgcccctatctcatgcctggtgttggagtccctttgagatatagaactgaatttggtgccgtcgttcaagacgtggtgtgttttgatgctgcccccgatgcaactcgaagactgtacaccagctgcaaggcccttctgaatgttgctcagcacacatctctggggagcttgatcttctgccaccactttggggatatcgcagcaggtctgtgccaactgggattctgcccaaccaaaagaaaactgctaacacctgcagaagaggttctaactgaagaggagagaaccctatccaggggggccttgagagacatgctggatcaagtctatcagcccttagcagtccgggaactgcttatcctccagggaggaccaccccaggactcaggcctagggactcttgggggtgactcattaatgataatgtgtggtttgctgtcttcttctggaaaattaaataactttagttccctgttta

SEQ ID NO: 360685 - DNA, 1801 bp, Homo sapiens
ttcacccaacacaggagcctcttaaaaattctgtgtgagttcgtttcagccagtcttgcatggggacattgtcttccgtttcagtcctgacgtccaccctgtgcacctgcgtgatcgccagccctgcctggtccctcctctgcgggctctccctctccactccctcctctgggagctctgtggccccaggcccaccttccttgagagacatttgtgtgcctgccagtcatacccctttcccaggaggcgcagcttaggctctgaggctgtcccttcccaccgaactcctccctgcagcctcgcagtcctgccctcctgagagctgcccactctgctcctctccccagcgtccactgtccttgaattgccctttgctgggcattgcgatcccgcattctgtctgagggagctaagggcctcctggaagttcctctgggtcctctggcttctcccatcagggctggtcttgtcctggtctctgttcctgtggaactttttacctgcttctgtgaaaactcacgctgtcctcagcacagcacgcacacacacgcatattcacgcatgcacaggcacacacgtgcacatgcccacgcgtgcacacagccacacacaccctcacgcacacacgcacagcaccatgtgggaggggttctcggctgtgacagtgaagggcagggcctcacctcggctgctccttgtgagttgtgggccccgtgtctgtgcccggccgccctgcggtgctcaccagccttctgaacgaggagctggacaggatccctggaaggggccccggggtctctgagtcgcgctcagcgggtgcttgtgctctctgcccagctgtgctgaagtcccgagggacatgtccgctgcttgcgggtcggttcctgaggaattggaagtgtcacgagatgtggccctcgttgggctggcgctcattggcctcccttgtgcctgtgcaggaggagctgattaactcagtggtcatctcgcagctctcccacatccccgaggataaagaccaccaggtccgaaagctggccacccagttgctggtggacctggcagagggctgccacacacaccacttcaacagcctgctggacatcatcgagaaggtgagagccgttgtacccggggccgggtgctagcgtgccagagctccgtgggcagcaatggcctctgggccctctgtcctcctcttcgagtgaccggatggctgtgtccgtaggtgaggctcccctccctgcagggtgggtgtcccgaggcctgtgcagggcctgccactgctggatttgtgtcctgactgaaagtcctggacatgggtgtcctgtcacactctgggacagctgggctgggcctcctggaccgacgctggagcccagacctggggctggggctttggcctgccgtcctccctgcccagccaacagctttgctctttgattttcagatgcattttggtttctgcacagtcactcgggtataaagggcatctttgcttttgagcaataaagatgaaggccgggcacagtggctcacgcctgtaatcccagcattttgggaggctgaggcaggtggattgcttgagttcaggagttcaagaccagcctggccaacatggtgaaatcctgtctctactaaaaatataaaaattagctgcacgtggtggcgggcacctgcaatcccagctgctcaggaggctgaggcaggagaatcgcttgaacctaggaggtgaaggttgcagtgagccaagattctgccactgcactccagcctggacgacagagcaagactctgtctc

SEQ ID NO: 360686 - DNA, 573 bp, Homo sapiens
cacacacggggctgagggaagagagggagtcaaggatgacacccgatgtctggcctgggtggctgctggaatggatggtcttgtctgcctcagggatcagagtggggctcccggcagagcctgctgggcacccccaccctctgcggggcagggcccggcccgggagtgatgccaccctgcctctcccctctccccacagagcaacagcgagctcgccatcctgtccaatgagcatggctcctacaggtacacggagttcctgacgggcctgggccggctcatcgagctgaaggactgccatctgcgaggaagccgcctactccaaccccagcctacctctggtgcaccctccgtcccatagcaaagcccctgcacagactccagccgagcccacacctggctatgaggtgggccagcggaagcgcctcatctcctcggtggaggacttcaccgagtttgtgtgaggccggggccctccctcctgcactggccttggacggtattgcctgtcagtgaaataaataaagtcctgaccccagtgcacagacatagaggcacagattgcaaaaaaca

SEQ ID NO: 360687 - DNA, 362 bp, Homo sapiens
tcccctccctgtgcagttttttcgtgttcctgcagctctaccattcccccttctttggcgacgagtcaaacaagccaatcctgctgcccaatgagtcacagtcctttgagcggtcggtgcagctcctcgaccagatcccatcatacgacacccacaagatcgccgtcctgtatgttggagaaggccagagcaacagcgagctcgccatcctgtccaatgagcatggctcctacaggtacacggagttcctgacgggcctgggccggctcatcgagctgaaggactgccgtgtgtggtgaggacggccagttcacctactgctggcacgatgacatcatgcaaggtacggcctggcgcctacc

SEQ ID NO: 360688 - DNA, 6034 bp, Homo sapiens
cgttttcttgcttggggcgaaagggggcagcggagcggagcgcccgaaacccagcccctgcggaccgcaatctttgggaaaaaggcgcaaggtgggaacgcagggccgcacgtgggaaccgttcgcggctgccgggtttgcagcccctgcccgcgcagctgggagccgcaggaggcggcccgggactccagcctgcagcccctatcccgcctcctcccacgctccagccacggcgcggcgctacctgctgcagcctctcttctccggagaggcccgggctcctccctacacccccgcggcccagccccgggtcccaggctccggctccgggtcagcatcctcgcgctcaaggcggtcatgccggactcctgcggactacacatcccggcggcccatgcggccccgtcacgtgatgcaaggatcgccggcctttccgccagagggcggcacagaactacaactcccagcaagctcccaaggcggccctccgcgcaatgccgctaccggaagtgcgggtcgcgcttccggcggcgtcccggggccaggggggtgcgcctttctccgcgtcggggcggcccggagcgcggtggcgcggcgcgggaggggttttctggtgcgtcctggtccaccatggccaaaccaacaagcaaagattcaggcttgaaggagaagtttaagattctgttgggactgggaacaccgaggccaaatcccaggtctgcagagggtaaacagacggagtttatcatcaccgcggaaatactgagagaactgagcatggaatgtggcctcaacaatcgcatccggatgatagggcagatttgtgaagtcgcaaaaaccaagaaatttgaagagcacgcagtggaagcactctggaaggcggtcgcggatctgttgcagccggagcggccgctggaggcccggcacgcggtgctggctctgctgaaggccatcgtgcaggggcagggcgagcgtttgggggtcctcagagccctcttctttaaggtcatcaaggattacccttccaacgaagaccttcacgaaaggctggaggttttcaaggccctcacagacaatgggagacacatcacctacttggaggaagagctggctgactttgtcctgcagtggatggatgttggcttgtcctcggaattccttctggtgctggtgaacttggtcaaattcaatagctgttacctcgacgagtacatcgcaaggatggttcagatgatctgtctgctgtgcgtccggaccgcgtcctctgtggacatagaggtctccctgcaggtgctggacgccgtggtctgctacaactgcctgccggctgagagcctcccgctgttcatcgttaccctctgtcgcaccatcaacgtcaaggagctctgcgagccttgctggaagctgatgcggaacctccttggcacccacctgggccacagcgccatctacaacatgtgccacctcatggaggacagagcctacatggaggacgcgcccctgctgagaggagccgtgttttttgtgggcatggctctctggggagcccaccggctctattctctcaggaactcgccgacatctgtgtttccatcattttaccaggccatggcatgtccgaacgaggtggtgtcctatgagatcgtcctgtccatcaccaggctcatcaagaagtataggaaggagctccaggtggtggcgtgggacattctgctgaacatcatcgaacggctccttcaacagctccagaccttggacagcccggagctcaggaccatcgtccatgacctgttgaccacggtggaggagctgtgtgaccagaacgagttccacgggtctcaggagagatactttgaactggtggagagatgtgcggaccagaggcctgagtcctccctcctgaacctgatctcctatagagcgcagtccatccacccggccaaggacggctggattcagaacctgcaggcgctgatggagagattcttcaggagcgagtcccgaggcgccgtgcgcatcaaggtgctggacgtgctgtcctttgtgctgctcatcaacaggcagttctatgaggaggagctgattaactcagtggtcatctcgcagctctcccacatccccgaggataaagaccaccaggtccgaaagctggccacccagttgctggtggacctggcagagggctgccacacacaccacttcaacagcctgctggacatcatcgagaaggtgatggcccgctccctctccccacccccggagctggaagaaagggatgtggccgcatactcggcctccttggaggatgtgaagacagccgtcctggggcttctggtcatccttcagaccaagctgtacaccctgcctgcaagccacgccacgcgtgtgtatgagatgctggtcagccacattcagctccactacaagcacagctacaccctgccaatcgcgagcagcatccggctgcaggcctttgacttcctgttgctgctgcgggccgactcactgcaccgcctgggcctgcccaacaaggatggagtcgtgcggttcagcccctactgcgtctgcgactacatggagccagagagaggctctgagaagaagaccagcggccccctttctcctcccacagggcctcctggcccggcgcctgcaggccccgccgtgcggctggggtccgtgccctactccctgctcttccgcgtcctgctgcagtgcttgaagcaggagtctgactggaaggtgctgaagctggttctgggcaggctgcctgagtccctgcgctataaagtgctcatctttacttccccttgcagtgtggaccagctgtgctctgctctctgctccatgctttcaggcccaaagacactggagcggctccgaggcgccccagaaggcttctccagaactgacttgcacctggccgtggttccagtgctgacagcattaatctcttaccataactacctggacaaaaccaaacagcgcgagatggtctactgcctggagcagggcctcatccaccgctgtgccagccagtgcgtcgtggccttgtccatctgcagcgtggagatgcctgacatcatcatcaaggcgctgcctgttctggtggtgaagctcacgcacatctcagccacagccagcatggccgtcccactgctggagttcctgtccactctggccaggctgccgcacctctacaggaactttgccgcggagcagtatgccagtgtgttcgccatctccctgccgtacaccaacccctccaagtttaatcagtacatcgtgtgtctggcccatcacgtcatagccatgtggttcatcaggtgccgcctgcccttccggaaggattttgtccctttcatcactaagggcctgcggtccaatgtcctcttgtcttttgatgacacccccgagaaggacagcttcagggcccggagtactagtctcaacgagagacccaagagcaggatacagacgtccctcaccagtgccagcttggggtctgcagatgagaactccgtggcccaggctgacgatagcctgaaaaacctccacctggagctcacggaaacctgtctggacatgatggctcgatacgtcttctccaacttcacggctgtcccgaagaggtctcctgtgggcgagttcctcctagcgggtggcaggaccaaaacctggctggttgggaacaagcttgtcactgtgacgacaagcgtgggaaccgggacccggtcgttactaggcctggactcgggggagctgcagtccggcccggagtcgagctccagccccggggtgcatgtgagacagaccaaggaggcgccggccaagctggagtcccaggctgggcagcaggtgtcccgtggggcccgggatcgggtccgttccatgtcggggggccatggtcttcgagttggcgccctggacgtgccggcctcccagttcctgggcagtgccacttctccaggaccacggactgcaccagccgcgaaacctgagaaggcctcagctggcacccgggttcctgtgcaggagaagacgaacctggcggcctatgtgcccctgctgacccagggctgggcggagatcctggtccggaggcccacagggaacaccagctggctgatgagcctggagaacccgctcagccctttctcctcggacatcaacaacatgcccctgcaggagctgtctaacgccctcatggcggctgagcgcttcaaggagcaccgggacacagccctgtacaagtcactgtcggtgccggcagccagcacggccaaaccccctcctctgcctcgctccaacacagtggcctctttctcctccctgtaccagtccagctgccaaggacagctgcacaggagcgtttcctgggcagactccgccgtggtcatggaggagggaagtccgggcgaggttcctgtgctggtggagcccccagggttggaggacgttgaggcagcgctaggcatggacaggcgcacggatgcctacagcaggtcgtcctcagtctccagccaggaggagaagtcgctccacgcggaggagctggttggcaggggcatccccatcgagcgagtcgtctcctcggagggtggccggccctctgtggacctctccttccagccctcgcagcccctgagcaagtccagctcctctcccgagctgcagactctgcaggacatcctcggggaccctggggacaaggccgacgtgggccggctgagccctgaggttaaggcccggtcacagtcagggaccctggacggggaaagtgctgcctggtcggcctcgggcgaagacagtcggggccagcccgagggtcccttgccttccagctccccccgctcgcccagtggcctccggccccgaggttacaccatctccgactcggccccatcacgcaggggcaagagagtagagagggacgccttaaagagcagagccacagcctccaatgcagagaaagtgccaggcatcaaccccagtttcgtgttcctgcagctctaccattcccccttctttggcgacgagtcaaacaagccaatcctgctgcccaatgagtcacagtcctttgagcggtcggtgcagctcctcgaccagatcccatcatacgacacccacaagatcgccgtcctgtatgttggagaaggccagagcaacagcgagctcgccatcctgtccaatgagcatggctcctacaggtacacggagttcctgacgggcctgggccggctcatcgagctgaaggactgccagccggacaaggtgtacctgggaggcctggacgtgtgtggtgaggacggccagttcacctactgctggcacgatgacatcatgcaagccgtcttccacatcgccaccctgatgcccaccaaggacgtggacaagcaccgctgcgacaagaagcgccacctgggcaacgactttgtgtccattgtctacaatgactccggtgaggacttcaagcttggcaccatcaagggccagttcaactttgtccacgtgatcgtcaccccgctggactacgagtgcaacctggtgtccctgcagtgcaggaaagacatggagggccttgtggacaccagcgtggccaagatcgtgtctgaccgcaacctgcccttcgtggcccgccagatggccctgcacgcaaatatggcctcacaggtgcatcatagccgctccaaccccaccgatatctacccctccaagtggattgcccggctccgccacatcaagcggctccgccagcggatctgcgaggaagccgcctactccaaccccagcctacctctggtgcaccctccgtcccatagcaaagcccctgcacagactccagccgagcccacacctggctatgaggtgggccagcggaagcgcctcatctcctcggtggaggacttcaccgagtttgtgtgaggccggggccctccctcctgcactggccttggacggtattgcctgtcagtgaaataaataaagtcctgaccccagtgcacagacatagaggcacagattgcaaaaaaca

SEQ ID NO: 360689 - DNA, 6163 bp, Homo sapiens
cgttttcttgcttggggcgaaagggggcagcggagcggagcgcccgaaacccagcccctgcggaccgcaatctttgggaaaaaggcgcaaggtgggaacgcagggccgcacgtgggaaccgttcgcggctgccgggtttgcagcccctgcccgcgcagctgggagccgcaggaggcggcccgggactccagcctgcagcccctatcccgcctcctcccacgctccagccacggcgcggcgctacctgctgcagcctctcttctccggagaggcccgggctcctccctacacccccgcggcccagccccgggtcccaggctccggctccgggtcagcatcctcgcgctcaaggcggtcatgccggactcctgcggactacacatcccggcggcccatgcggccccgtcacgtgatgcaaggatcgccggcctttccgccagagggcggcacagaactacaactcccagcaagctcccaaggcggccctccgcgcaatgccgctaccggaagtgcgggtcgcgcttccggcggcgtcccggggccaggggggtgcgcctttctccgcgtcggggcggcccggagcgcggtggcgcggcgcgggaggggttttctggtgcgtcctggtccaccatggccaaaccaacaagcaaagattcaggcttgaaggagaagtttaagattctgttgggactgggaacaccgaggccaaatcccaggtctgcagagggtaaacagacggagtttatcatcaccgcggaaatactgagagaactgagcatggaatgtggcctcaacaatcgcatccggatgatagggcagatttgtgaagtcgcaaaaaccaagaaatttgaagagcacgcagtggaagcactctggaaggcggtcgcggatctgttgcagccggagcggccgctggaggcccggcacgcggtgctggctctgctgaaggccatcgtgcaggggcagggcgagcgtttgggggtcctcagagccctcttctttaaggtcatcaaggattacccttccaacgaagaccttcacgaaaggctggaggttttcaaggccctcacagacaatgggagacacatcacctacttggaggaagagctggctgactttgtcctgcagtggatggatgttggcttgtcctcggaattccttctggtgctggtgaacttggtcaaattcaatagctgttacctcgacgagtacatcgcaaggatggttcagatgatctgtctgctgtgcgtccggaccgcgtcctctgtggacatagaggtctccctgcaggtgctggacgccgtggtctgctacaactgcctgccggctgagagcctcccgctgttcatcgttaccctctgtcgcaccatcaacgtcaaggagctctgcgagccttgctggaagctgatgcggaacctccttggcacccacctgggccacagcgccatctacaacatgtgccacctcatggaggacagagcctacatggaggacgcgcccctgctgagaggagccgtgttttttgtgggcatggctctctggggagcccaccggctctattctctcaggaactcgccgacatctgtgtttccatcattttaccaggccatggcatgtccgaacgaggtggtgtcctatgagatcgtcctgtccatcaccaggctcatcaagaagtataggaaggagctccaggtggtggcgtgggacattctgctgaacatcatcgaacggctccttcaacagctccagaccttggacagcccggagctcaggaccatcgtccatgacctgttgaccacggtggaggagctgtgtgaccagaacgagttccacgggtctcaggagagatactttgaactggtggagagatgtgcggaccagaggcctgagtcctccctcctgaacctgatctcctatagagcgcagtccatccacccggccaaggacggctggattcagaacctgcaggcgctgatggagagattcttcaggagcgagtcccgaggcgccgtgcgcatcaaggtgctggacgtgctgtcctttgtgctgctcatcaacaggcagttctatgaggaggagctgattaactcagtggtcatctcgcagctctcccacatccccgaggataaagaccaccaggtccgaaagctggccacccagttgctggtggacctggcagagggctgccacacacaccacttcaacagcctgctggacatcatcgagaaggtgatggcccgctccctctccccacccccggagctggaagaaagggatgtggccgcatactcggcctccttggaggatgtgaagacagccgtcctggggcttctggtcatccttcagaccaagctgtacaccctgcctgcaagccacgccacgcgtgtgtatgagatgctggtcagccacattcagctccactacaagcacagctacaccctgccaatcgcgagcagcatccggctgcaggcctttgacttcctgttgctgctgcgggccgactcactgcaccgcctgggcctgcccaacaaggatggagtcgtgcggttcagcccctactgcgtctgcgactacatggagccagagagaggctctgagaagaagaccagcggccccctttctcctcccacagggcctcctggcccggcgcctgcaggccccgccgtgcggctggggtccgtgccctactccctgctcttccgcgtcctgctgcagtgcttgaagcaggagtctgactggaaggtgctgaagctggttctgggcaggctgcctgagtccctgcgctataaagtgctcatctttacttccccttgcagtgtggaccagctgtgctctgctctctgctccatgctttcaggcccaaagacactggagcggctccgaggcgccccagaaggcttctccagaactgacttgcacctggccgtggttccagtgctgacagcattaatctcttaccataactacctggacaaaaccaaacagcgcgagatggtctactgcctggagcagggcctcatccaccgctgtgccagccagtgcgtcgtggccttgtccatctgcagcgtggagatgcctgacatcatcatcaaggcgctgcctgttctggtggtgaagctcacgcacatctcagccacagccagcatggccgtcccactgctggagttcctgtccactctggccaggctgccgcacctctacaggaactttgccgcggagcagtatgccagtgtgttcgccatctccctgccgtacaccaacccctccaagtttaatcagtacatcgtgtgtctggcccatcacgtcatagccatgtggttcatcaggtgccgcctgcccttccggaaggattttgtccctttcatcactaagggcctgcggtccaatgtcctcttgtcttttgatgacacccccgagaaggacagcttcagggcccggagtactagtctcaacgagagacccaagagtctgaggatagccagaccccccaaacaaggcttgaataactctccacccgtgaaagaattcaaggagagctctgcagccgaggccttccggtgccgcagcatcagtgtgtctgaacatgtggtccgcagcaggatacagacgtccctcaccagtgccagcttggggtctgcagatgagaactccgtggcccaggctgacgatagcctgaaaaacctccacctggagctcacggaaacctgtctggacatgatggctcgatacgtcttctccaacttcacggctgtcccgaagaggtctcctgtgggcgagttcctcctagcgggtggcaggaccaaaacctggctggttgggaacaagcttgtcactgtgacgacaagcgtgggaaccgggacccggtcgttactaggcctggactcgggggagctgcagtccggcccggagtcgagctccagccccggggtgcatgtgagacagaccaaggaggcgccggccaagctggagtcccaggctgggcagcaggtgtcccgtggggcccgggatcgggtccgttccatgtcggggggccatggtcttcgagttggcgccctggacgtgccggcctcccagttcctgggcagtgccacttctccaggaccacggactgcaccagccgcgaaacctgagaaggcctcagctggcacccgggttcctgtgcaggagaagacgaacctggcggcctatgtgcccctgctgacccagggctgggcggagatcctggtccggaggcccacagggaacaccagctggctgatgagcctggagaacccgctcagccctttctcctcggacatcaacaacatgcccctgcaggagctgtctaacgccctcatggcggctgagcgcttcaaggagcaccgggacacagccctgtacaagtcactgtcggtgccggcagccagcacggccaaaccccctcctctgcctcgctccaacacagtggcctctttctcctccctgtaccagtccagctgccaaggacagctgcacaggagcgtttcctgggcagactccgccgtggtcatggaggagggaagtccgggcgaggttcctgtgctggtggagcccccagggttggaggacgttgaggcagcgctaggcatggacaggcgcacggatgcctacagcaggtcgtcctcagtctccagccaggaggagaagtcgctccacgcggaggagctggttggcaggggcatccccatcgagcgagtcgtctcctcggagggtggccggccctctgtggacctctccttccagccctcgcagcccctgagcaagtccagctcctctcccgagctgcagactctgcaggacatcctcggggaccctggggacaaggccgacgtgggccggctgagccctgaggttaaggcccggtcacagtcagggaccctggacggggaaagtgctgcctggtcggcctcgggcgaagacagtcggggccagcccgagggtcccttgccttccagctccccccgctcgcccagtggcctccggccccgaggttacaccatctccgactcggccccatcacgcaggggcaagagagtagagagggacgccttaaagagcagagccacagcctccaatgcagagaaagtgccaggcatcaaccccagtttcgtgttcctgcagctctaccattcccccttctttggcgacgagtcaaacaagccaatcctgctgcccaatgagtcacagtcctttgagcggtcggtgcagctcctcgaccagatcccatcatacgacacccacaagatcgccgtcctgtatgttggagaaggccagagcaacagcgagctcgccatcctgtccaatgagcatggctcctacaggtacacggagttcctgacgggcctgggccggctcatcgagctgaaggactgccagccggacaaggtgtacctgggaggcctggacgtgtgtggtgaggacggccagttcacctactgctggcacgatgacatcatgcaagccgtcttccacatcgccaccctgatgcccaccaaggacgtggacaagcaccgctgcgacaagaagcgccacctgggcaacgactttgtgtccattgtctacaatgactccggtgaggacttcaagcttggcaccatcaagggccagttcaactttgtccacgtgatcgtcaccccgctggactacgagtgcaacctggtgtccctgcagtgcaggaaagacatggagggccttgtggacaccagcgtggccaagatcgtgtctgaccgcaacctgcccttcgtggcccgccagatggccctgcacgcaaatatggcctcacaggtgcatcatagccgctccaaccccaccgatatctacccctccaagtggattgcccggctccgccacatcaagcggctccgccagcggatctgcgaggaagccgcctactccaaccccagcctacctctggtgcaccctccgtcccatagcaaagcccctgcacagactccagccgagcccacacctggctatgaggtgggccagcggaagcgcctcatctcctcggtggaggacttcaccgagtttgtgtgaggccggggccctccctcctgcactggccttggacggtattgcctgtcagtgaaataaataaagtcctgaccccagtgcacagacatagaggcacagattgcaaaaaaca

SEQ ID NO: 360690 - DNA, 5965 bp, Homo sapiens
cgttttcttgcttggggcgaaagggggcagcggagcggagcgcccgaaacccagcccctgcggaccgcaatctttgggaaaaaggcgcaaggtgggaacgcagggccgcacgtgggaaccgttcgcggctgccgggtttgcagcccctgcccgcgcagctgggagccgcaggaggcggcccgggactccagcctgcagcccctatcccgcctcctcccacgctccagccacggcgcggcgctacctgctgcagcctctcttctccggagaggcccgggctcctccctacacccccgcggcccagccccgggtcccaggctccggctccgggtcagcatcctcgcgctcaaggcggtcatgccggactcctgcggactacacatcccggcggcccatgcggccccgtcacgtgatgcaaggatcgccggcctttccgccagagggcggcacagaactacaactcccagcaagctcccaaggcggccctccgcgcaatgccgctaccggaagtgcgggtcgcgcttccggcggcgtcccggggccaggggggtgcgcctttctccgcgtcggggcggcccggagcgcggtggcgcggcgcgggaggggttttctggtgcgtcctggtccaccatggccaaaccaacaagcaaagattcaggcttgaaggagaagtttaagattctgttgggactgggaacaccgaggccaaatcccaggtctgcagagggtaaacagacggagtttatcatcaccgcggaaatactgagagaactgagcatggaatgtggcctcaacaatcgcatccggatgatagggcagatttgtgaagtcgcaaaaaccaagaaatttgaagagcacgcagtggaagcactctggaaggcggtcgcggatctgttgcagccggagcggccgctggaggcccggcacgcggtgctggctctgctgaaggccatcgtgcaggggcagggcgagcgtttgggggtcctcagagccctcttctttaaggtcatcaaggattacccttccaacgaagaccttcacgaaaggctggaggttttcaaggccctcacagacaatgggagacacatcacctacttggaggaagagctggctgactttgtcctgcagtggatggatgttggcttgtcctcggaattccttctggtgctggtgaacttggtcaaattcaatagctgttacctcgacgagtacatcgcaaggatggttcagatgatctgtctgctgtgcgtccggaccgcgtcctctgtggacatagaggtctccctgcaggtgctggacgccgtggtctgctacaactgcctgccggctgagagcctcccgctgttcatcgttaccctctgtcgcaccatcaacgtcaaggagctctgcgagccttgctggaagctgatgcggaacctccttggcacccacctgggccacagcgccatctacaacatgtgccacctcatggaggacagagcctacatggaggacgcgcccctgctgagaggagccgtgttttttgtgggcatggctctctggggagcccaccggctctattctctcaggaactcgccgacatctgtgtttccatcattttaccaggccatggcatgtccgaacgaggtggtgtcctatgagatcgtcctgtccatcaccaggctcatcaagaagtataggaaggagctccaggtggtggcgtgggacattctgctgaacatcatcgaacggctccttcaacagctccagaccttggacagcccggagctcaggaccatcgtccatgacctgttgaccacggtggaggagctgtgtgaccagaacgagttccacgggtctcaggagagatactttgaactggtggagagatgtgcggaccagaggcctgagtcctccctcctgaacctgatctcctatagagcgcagtccatccacccggccaaggacggctggattcagaacctgcaggcgctgatggagagattcttcaggagcgagtcccgaggcgccgtgcgcatcaaggtgctggacgtgctgtcctttgtgctgctcatcaacaggcagttctatgaggaggagctgattaactcagtggtcatctcgcagctctcccacatccccgaggataaagaccaccaggtccgaaagctggccacccagttgctggtggacctggcagagggctgccacacacaccacttcaacagcctgctggacatcatcgagaaggtgatggcccgctccctctccccacccccggagctggaagaaagggatgtggccgcatactcggcctccttggaggatgtgaagacagccgtcctggggcttctggtcatccttcagaccaagctgtacaccctgcctgcaagccacgccacgcgtgtgtatgagatgctggtcagccacattcagctccactacaagcacagctacaccctgccaatcgcgagcagcatccggctgcaggcctttgacttcctgttgctgctgcgggccgactcactgcaccgcctgggcctgcccaacaaggatggagtcgtgcggttcagcccctactgcgtctgcgactacatggagccagagagaggctctgagaagaagaccagcggccccctttctcctcccacagggcctcctggcccggcgcctgcaggccccgccgtgcggctggggtccgtgccctactccctgctcttccgcgtcctgctgcagtgcttgaagcaggagtctgactggaaggtgctgaagctggttctgggcaggctgcctgagtccctgcgctataaagtgctcatctttacttccccttgcagtgtggaccagctgtgctctgctctctgctccatgctttcaggcccaaagacactggagcggctccgaggcgccccagaaggcttctccagaactgacttgcacctggccgtggttccagtgctgacagcattaatctcttaccataactacctggacaaaaccaaacagcgcgagatggtctactgcctggagcagggcctcatccaccgctgtgccagccagtgcgtcgtggccttgtccatctgcagcgtggagatgcctgacatcatcatcaaggcgctgcctgttctggtggtgaagctcacgcacatctcagccacagccagcatggccgtcccactgctggagttcctgtccactctggccaggctgccgcacctctacaggaactttgccgcggagcagtatgccagtgtgttcgccatctccctgccgtacaccaacccctccaagtttaatcagtacatcgtgtgtctggcccatcacgtcatagccatgtggttcatcaggtgccgcctgcccttccggaaggattttgtccctttcatcactaagggcctgcggtccaatgtcctcttgtcttttgatgacacccccgagaaggacagcttcagggcccggagtactagtctcaacgagagacccaagagcaggatacagacgtccctcaccagtgccagcttggggtctgcagatgagaactccgtggcccaggctgacgatagcctgaaaaacctccacctggagctcacggaaacctgtctggacatgatggctcgatacgtcttctccaacttcacggctgtcccgaagaggtctcctgtgggcgagttcctcctagcgggtggcaggaccaaaacctggctggttgggaacaagcttgtcactgtgacgacaagcgtgggaaccgggacccggtcgttactaggcctggactcgggggagctgcagtccggcccggagtcgagctccagccccggggtgcatgtgagacagaccaaggaggcgccggccaagctggagtcccaggctgggcagcaggtgtcccgtggggcccgggatcgggtccgttccatgtcggggggccatggtcttcgagttggcgccctggacgtgccggcctcccagttcctgggcagtgccacttctccaggaccacggactgcaccagccgcgaaacctgagaaggcctcagctggcacccgggttcctgtgcaggagaagacgaacctggcggcctatgtgcccctgctgacccagggctgggcggagatcctggtccggaggcccacagggaacaccagctggctgatgagcctggagaacccgctcagccctttctcctcggacatcaacaacatgcccctgcaggagctgtctaacgccctcatggcggctgagcgcttcaaggagcaccgggacacagccctgtacaagtcactgtcggtgccggcagccagcacggccaaaccccctcctctgcctcgctccaacacagactccgccgtggtcatggaggagggaagtccgggcgaggttcctgtgctggtggagcccccagggttggaggacgttgaggcagcgctaggcatggacaggcgcacggatgcctacagcaggtcgtcctcagtctccagccaggaggagaagtcgctccacgcggaggagctggttggcaggggcatccccatcgagcgagtcgtctcctcggagggtggccggccctctgtggacctctccttccagccctcgcagcccctgagcaagtccagctcctctcccgagctgcagactctgcaggacatcctcggggaccctggggacaaggccgacgtgggccggctgagccctgaggttaaggcccggtcacagtcagggaccctggacggggaaagtgctgcctggtcggcctcgggcgaagacagtcggggccagcccgagggtcccttgccttccagctccccccgctcgcccagtggcctccggccccgaggttacaccatctccgactcggccccatcacgcaggggcaagagagtagagagggacgccttaaagagcagagccacagcctccaatgcagagaaagtgccaggcatcaaccccagtttcgtgttcctgcagctctaccattcccccttctttggcgacgagtcaaacaagccaatcctgctgcccaatgagtcacagtcctttgagcggtcggtgcagctcctcgaccagatcccatcatacgacacccacaagatcgccgtcctgtatgttggagaaggccagagcaacagcgagctcgccatcctgtccaatgagcatggctcctacaggtacacggagttcctgacgggcctgggccggctcatcgagctgaaggactgccagccggacaaggtgtacctgggaggcctggacgtgtgtggtgaggacggccagttcacctactgctggcacgatgacatcatgcaagccgtcttccacatcgccaccctgatgcccaccaaggacgtggacaagcaccgctgcgacaagaagcgccacctgggcaacgactttgtgtccattgtctacaatgactccggtgaggacttcaagcttggcaccatcaagggccagttcaactttgtccacgtgatcgtcaccccgctggactacgagtgcaacctggtgtccctgcagtgcaggaaagacatggagggccttgtggacaccagcgtggccaagatcgtgtctgaccgcaacctgcccttcgtggcccgccagatggccctgcacgcaaatatggcctcacaggtgcatcatagccgctccaaccccaccgatatctacccctccaagtggattgcccggctccgccacatcaagcggctccgccagcggatctgcgaggaagccgcctactccaaccccagcctacctctggtgcaccctccgtcccatagcaaagcccctgcacagactccagccgagcccacacctggctatgaggtgggccagcggaagcgcctcatctcctcggtggaggacttcaccgagtttgtgtgaggccggggccctccctcctgcactggccttggacggtattgcctgtcagtgaaataaataaagtcctgaccccagtgcacagacatagaggcacagattgcaaaaaaca

SEQ ID NO: 360691 - DNA, 4788 bp, Homo sapiens
ggctcggccatccaggcagtgctgccgggactgagctcggtgctccctgcaggatgatctgtctgctgtgcgtccggaccgcgtcctctgtggacatagaggtctccctgcaggtgctggacgccgtggtctgctacaactgcctgccggctgagagcctcccgctgttcatcgttaccctctgtcgcaccatcaacgtcaaggagctctgcgagccttgctggaagctgatgcggaacctccttggcacccacctgggccacagcgccatctacaacatgtgccacctcatggaggacagagcctacatggaggacgcgcccctgctgagaggagccgtgttttttgtgggcatggctctctggggagcccaccggctctattctctcaggaactcgccgacatctgtgtttccatcattttaccaggccatggcatgtccgaacgaggtggtgtcctatgagatcgtcctgtccatcaccaggctcatcaagaagtataggaaggagctccaggtggtggcgtgggacattctgctgaacatcatcgaacggctccttcaacagctccagaccttggacagcccggagctcaggaccatcgtccatgacctgttgaccacggtggaggagctgtgtgaccagaacgagttccacgggtctcaggagagatactttgaactggtggagagatgtgcggaccagaggcctgagtcctccctcctgaacctgatctcctatagagcgcagtccatccacccggccaaggacggctggattcagaacctgcaggcgctgatggagagattcttcaggagcgagtcccgaggcgccgtgcgcatcaaggtgctggacgtgctgtcctttgtgctgctcatcaacaggcagttctatgaggaggagctgattaactcagtggtcatctcgcagctctcccacatccccgaggataaagaccaccaggtccgaaagctggccacccagttgctggtggacctggcagagggctgccacacacaccacttcaacagcctgctggacatcatcgagaaggtgatggcccgctccctctccccacccccggagctggaagaaagggatgtggccgcatactcggcctccttggaggatgtgaagacagccgtcctggggcttctggtcatccttcagaccaagctgtacaccctgcctgcaagccacgccacgcgtgtgtatgagatgctggtcagccacattcagctccactacaagcacagctacaccctgccaatcgcgagcagcatccggctgcaggcctttgacttcctgttgctgctgcgggccgactcactgcaccgcctgggcctgcccaacaaggatggagtcgtgcggttcagcccctactgcgtctgcgactacatggagccagagagaggctctgagaagaagaccagcggccccctttctcctcccacagggcctcctggcccggcgcctgcaggccccgccgtgcggctggggtccgtgccctactccctgctcttccgcgtcctgctgcagtgcttgaagcaggagtctgactggaaggtgctgaagctggttctgggcaggctgcctgagtccctgcgctataaagtgctcatctttacttccccttgcagtgtggaccagctgtgctctgctctctgctccatgctttcaggcccaaagacactggagcggctccgaggcgccccagaaggcttctccagaactgacttgcacctggccgtggttccagtgctgacagcattaatctcttaccataactacctggacaaaaccaaacagcgcgagatggtctactgcctggagcagggcctcatccaccgctgtgccagccagtgcgtcgtggccttgtccatctgcagcgtggagatgcctgacatcatcatcaaggcgctgcctgttctggtggtgaagctcacgcacatctcagccacagccagcatggccgtcccactgctggagttcctgtccactctggccaggctgccgcacctctacaggaactttgccgcggagcagtatgccagtgtgttcgccatctccctgccgtacaccaacccctccaagtttaatcagtacatcgtgtgtctggcccatcacgtcatagccatgtggttcatcaggtgccgcctgcccttccggaaggattttgtccctttcatcactaagggcctgcggtccaatgtcctcttgtcttttgatgacacccccgagaaggacagcttcagggcccggagtactagtctcaacgagagacccaagagcaggatacagacgtccctcaccagtgccagcttggggtctgcagatgagaactccgtggcccaggctgacgatagcctgaaaaacctccacctggagctcacggaaacctgtctggacatgatggctcgatacgtcttctccaacttcacggctgtcccgaagaggtctcctgtgggcgagttcctcctagcgggtggcaggaccaaaacctggctggttgggaacaagcttgtcactgtgacgacaagcgtgggaaccgggacccggtcgttactaggcctggactcgggggagctgcagtccggcccggagtcgagctccagccccggggtgcatgtgagacagaccaaggaggcgccggccaagctggagtcccaggctgggcagcaggtgtcccgtggggcccgggatcgggtccgttccatgtcggggggccatggtcttcgagttggcgccctggacgtgccggcctcccagttcctgggcagtgccacttctccaggaccacggactgcaccagccgcgaaacctgagaaggcctcagctggcacccgggttcctgtgcaggagaagacgaacctggcggcctatgtgcccctgctgacccagggctgggcggagatcctggtccggaggcccacagggaacaccagctggctgatgagcctggagaacccgctcagccctttctcctcggacatcaacaacatgcccctgcaggagctgtctaacgccctcatggcggctgagcgcttcaaggagcaccgggacacagccctgtacaagtcactgtcggtgccggcagccagcacggccaaaccccctcctctgcctcgctccaacacagactccgccgtggtcatggaggagggaagtccgggcgaggttcctgtgctggtggagcccccagggttggaggacgttgaggcagcgctaggcatggacaggcgcacggatgcctacagcaggtcgtcctcagtctccagccaggaggagaagtcgctccacgcggaggagctggttggcaggggcatccccatcgagcgagtcgtctcctcggagggtggccggccctctgtggacctctccttccagccctcgcagcccctgagcaagtccagctcctctcccgagctgcagactctgcaggacatcctcggggaccctggggacaaggccgacgtgggccggctgagccctgaggttaaggcccggtcacagtcagggaccctggacggggaaagtgctgcctggtcggcctcgggcgaagacagtcggggccagcccgagggtcccttgccttccagctccccccgctcgcccagtggcctccggccccgaggttacaccatctccgactcggccccatcacgcaggggcaagagagtagagagggacgccttaaagagcagagccacagcctccaatgcagagaaagtgccaggcatcaaccccagtttcgtgttcctgcagctctaccattcccccttctttggcgacgagtcaaacaagccaatcctgctgcccaatgagtcacagtcctttgagcggtcggtgcagctcctcgaccagatcccatcatacgacacccacaagatcgccgtcctgtatgttggagaaggccagagcaacagcgagctcgccatcctgtccaatgagcatggctcctacaggtacacggagttcctgacgggcctgggccggctcatcgagctgaaggactgccagccggacaaggtgtacctgggaggcctggacgtgtgtggtgaggacggccagttcacctactgctggcacgatgacatcatgcaagccgtcttccacatcgccaccctgatgcccaccaaggacgtggacaagcaccgctgcgacaagaagcgccacctgggcaacgactttgtgtccattgtctacaatgactccggtgaggacttcaagcttggcaccatcaagggccagttcaactttgtccacgtgatcgtcaccccgctggactacgagtgcaacctggtgtccctgcagtgcaggaaagacatggagggccttgtggacaccagcgtggccaagatcgtgtctgaccgcaacctgcccttcgtggcccgccagatggccctgcacgcaaatatggcctcacaggtgcatcatagccgctccaaccccaccgatatctacccctccaagtggattgcccggctccgccacatcaagcggctccgccagcggatctgcgaggaagccgcctactccaaccccagcctacctctggtgcaccctccgtcccatagcaaagcccctgcacagactccagccgagcccacacctggctatgaggtgggccagcggaagcgcctcatctcctcggtggaggacttcaccgagtttgtgtgaggccggggccctccctcctgcactggccttggacggtattgcctgtcagtgaaataaataaagtcctgaccccagtgcacagacatagaggcacagattgcaaaaaaca

SEQ ID NO: 360692 - DNA, 4498 bp, Homo sapiens
ggaacagcagctgccatcacagccactgtggccccttgagaggatctggggggtgtcctgggccacgtgggtcagggtggcccctggagaggatctgggggtgtctcaacccatgaggcccggagcggcctcagagggctgggggcgtctgtccccatgcggcccagagcggcctgagagggctgagggcgtctccatgcggtgggtgtgtagcgaggcctctggtgccaagtccatgtggggagtggaagtcagcctgtgtcatcgtgcctggtactgcagaccttggacagcccggagctcaggaccatcgtccatgacctgttgaccacggtggaggagctgtgtgaccagaacgagttccacgggtctcaggagagatactttgaactggtggagagatgtgcggaccagaggcctgagtcctccctcctgaacctgatctcctatagagcgcagtccatccacccggccaaggacggctggattcagaacctgcaggcgctgatggagagattcttcaggagcgagtcccgaggcgccgtgcgcatcaaggtgctggacgtgctgtcctttgtgctgctcatcaacaggcagttctatgaggaggagctgattaactcagtggtcatctcgcagctctcccacatccccgaggataaagaccaccaggtccgaaagctggccacccagttgctggtggacctggcagagggctgccacacacaccacttcaacagcctgctggacatcatcgagaaggtgatggcccgctccctctccccacccccggagctggaagaaagggatgtggccgcatactcggcctccttggaggatgtgaagacagccgtcctggggcttctggtcatccttcagaccaagctgtacaccctgcctgcaagccacgccacgcgtgtgtatgagatgctggtcagccacattcagctccactacaagcacagctacaccctgccaatcgcgagcagcatccggctgcaggcctttgacttcctgttgctgctgcgggccgactcactgcaccgcctgggcctgcccaacaaggatggagtcgtgcggttcagcccctactgcgtctgcgactacatggagccagagagaggctctgagaagaagaccagcggccccctttctcctcccacagggcctcctggcccggcgcctgcaggccccgccgtgcggctggggtccgtgccctactccctgctcttccgcgtcctgctgcagtgcttgaagcaggagtctgactggaaggtgctgaagctggttctgggcaggctgcctgagtccctgcgctataaagtgctcatctttacttccccttgcagtgtggaccagctgtgctctgctctctgctccatgctttcaggcccaaagacactggagcggctccgaggcgccccagaaggcttctccagaactgacttgcacctggccgtggttccagtgctgacagcattaatctcttaccataactacctggacaaaaccaaacagcgcgagatggtctactgcctggagcagggcctcatccaccgctgtgccagccagtgcgtcgtggccttgtccatctgcagcgtggagatgcctgacatcatcatcaaggcgctgcctgttctggtggtgaagctcacgcacatctcagccacagccagcatggccgtcccactgctggagttcctgtccactctggccaggctgccgcacctctacaggaactttgccgcggagcagtatgccagtgtgttcgccatctccctgccgtacaccaacccctccaagtttaatcagtacatcgtgtgtctggcccatcacgtcatagccatgtggttcatcaggtgccgcctgcccttccggaaggattttgtccctttcatcactaagggcctgcggtccaatgtcctcttgtcttttgatgacacccccgagaaggacagcttcagggcccggagtactagtctcaacgagagacccaagagcaggatacagacgtccctcaccagtgccagcttggggtctgcagatgagaactccgtggcccaggctgacgatagcctgaaaaacctccacctggagctcacggaaacctgtctggacatgatggctcgatacgtcttctccaacttcacggctgtcccgaagaggtctcctgtgggcgagttcctcctagcgggtggcaggaccaaaacctggctggttgggaacaagcttgtcactgtgacgacaagcgtgggaaccgggacccggtcgttactaggcctggactcgggggagctgcagtccggcccggagtcgagctccagccccggggtgcatgtgagacagaccaaggaggcgccggccaagctggagtcccaggctgggcagcaggtgtcccgtggggcccgggatcgggtccgttccatgtcggggggccatggtcttcgagttggcgccctggacgtgccggcctcccagttcctgggcagtgccacttctccaggaccacggactgcaccagccgcgaaacctgagaaggcctcagctggcacccgggttcctgtgcaggagaagacgaacctggcggcctatgtgcccctgctgacccagggctgggcggagatcctggtccggaggcccacagggaacaccagctggctgatgagcctggagaacccgctcagccctttctcctcggacatcaacaacatgcccctgcaggagctgtctaacgccctcatggcggctgagcgcttcaaggagcaccgggacacagccctgtacaagtcactgtcggtgccggcagccagcacggccaaaccccctcctctgcctcgctccaacacagactccgccgtggtcatggaggagggaagtccgggcgaggttcctgtgctggtggagcccccagggttggaggacgttgaggcagcgctaggcatggacaggcgcacggatgcctacagcaggtcgtcctcagtctccagccaggaggagaagtcgctccacgcggaggagctggttggcaggggcatccccatcgagcgagtcgtctcctcggagggtggccggccctctgtggacctctccttccagccctcgcagcccctgagcaagtccagctcctctcccgagctgcagactctgcaggacatcctcggggaccctggggacaaggccgacgtgggccggctgagccctgaggttaaggcccggtcacagtcagggaccctggacggggaaagtgctgcctggtcggcctcgggcgaagacagtcggggccagcccgagggtcccttgccttccagctccccccgctcgcccagtggcctccggccccgaggttacaccatctccgactcggccccatcacgcaggggcaagagagtagagagggacgccttaaagagcagagccacagcctccaatgcagagaaagtgccaggcatcaaccccagtttcgtgttcctgcagctctaccattcccccttctttggcgacgagtcaaacaagccaatcctgctgcccaatgagtcacagtcctttgagcggtcggtgcagctcctcgaccagatcccatcatacgacacccacaagatcgccgtcctgtatgttggagaaggccagagcaacagcgagctcgccatcctgtccaatgagcatggctcctacaggtacacggagttcctgacgggcctgggccggctcatcgagctgaaggactgccagccggacaaggtgtacctgggaggcctggacgtgtgtggtgaggacggccagttcacctactgctggcacgatgacatcatgcaagccgtcttccacatcgccaccctgatgcccaccaaggacgtggacaagcaccgctgcgacaagaagcgccacctgggcaacgactttgtgtccattgtctacaatgactccggtgaggacttcaagcttggcaccatcaagggccagttcaactttgtccacgtgatcgtcaccccgctggactacgagtgcaacctggtgtccctgcagtgcaggaaagacatggagggccttgtggacaccagcgtggccaagatcgtgtctgaccgcaacctgcccttcgtggcccgccagatggccctgcacgcaaatatggcctcacaggtgcatcatagccgctccaaccccaccgatatctacccctccaagtggattgcccggctccgccacatcaagcggctccgccagcggatctgcgaggaagccgcctactccaaccccagcctacctctggtgcaccctccgtcccatagcaaagcccctgcacagactccagccgagcccacacctggctatgaggtgggccagcggaagcgcctcatctcctcggtggaggacttcaccgagtttgtgtgaggccggggccctccctcctgcactggccttggacggtattgcctgtcagtgaaataaataaagtcctgaccccagtgcacagacatagaggcacagattgcaaaaaaca

SEQ ID NO: 360693 - DNA, 4851 bp, Homo sapiens
ttcacccaacacaggagcctcttaaaaattctgtgtgagttcgtttcagccagtcttgcatggggacattgtcttccgtttcagtcctgacgtccaccctgtgcacctgcgtgatcgccagccctgcctggtccctcctctgcgggctctccctctccactccctcctctgggagctctgtggccccaggcccaccttccttgagagacatttgtgtgcctgccagtcatacccctttcccaggaggcgcagcttaggctctgaggctgtcccttcccaccgaactcctccctgcagcctcgcagtcctgccctcctgagagctgcccactctgctcctctccccagcgtccactgtccttgaattgccctttgctgggcattgcgatcccgcattctgtctgagggagctaagggcctcctggaagttcctctgggtcctctggcttctcccatcagggctggtcttgtcctggtctctgttcctgtggaactttttacctgcttctgtgaaaactcacgctgtcctcagcacagcacgcacacacacgcatattcacgcatgcacaggcacacacgtgcacatgcccacgcgtgcacacagccacacacaccctcacgcacacacgcacagcaccatgtgggaggggttctcggctgtgacagtgaagggcagggcctcacctcggctgctccttgtgagttgtgggccccgtgtctgtgcccggccgccctgcggtgctcaccagccttctgaacgaggagctggacaggatccctggaaggggccccggggtctctgagtcgcgctcagcgggtgcttgtgctctctgcccagctgtgctgaagtcccgagggacatgtccgctgcttgcgggtcggttcctgaggaattggaagtgtcacgagatgtggccctcgttgggctggcgctcattggcctcccttgtgcctgtgcaggaggagctgattaactcagtggtcatctcgcagctctcccacatccccgaggataaagaccaccaggtccgaaagctggccacccagttgctggtggacctggcagagggctgccacacacaccacttcaacagcctgctggacatcatcgagaaggtgatggcccgctccctctccccacccccggagctggaagaaagggatgtggccgcatactcggcctccttggaggatgtgaagacagccgtcctggggcttctggtcatccttcagaccaagctgtacaccctgcctgcaagccacgccacgcgtgtgtatgagatgctggtcagccacattcagctccactacaagcacagctacaccctgccaatcgcgagcagcatccggctgcaggcctttgacttcctgttgctgctgcgggccgactcactgcaccgcctgggcctgcccaacaaggatggagtcgtgcggttcagcccctactgcgtctgcgactacatggagccagagagaggctctgagaagaagaccagcggccccctttctcctcccacagggcctcctggcccggcgcctgcaggccccgccgtgcggctggggtccgtgccctactccctgctcttccgcgtcctgctgcagtgcttgaagcaggagtctgactggaaggtgctgaagctggttctgggcaggctgcctgagtccctgcgctataaagtgctcatctttacttccccttgcagtgtggaccagctgtgctctgctctctgctccatgctttcaggcccaaagacactggagcggctccgaggcgccccagaaggcttctccagaactgacttgcacctggccgtggttccagtgctgacagcattaatctcttaccataactacctggacaaaaccaaacagcgcgagatggtctactgcctggagcagggcctcatccaccgctgtgccagccagtgcgtcgtggccttgtccatctgcagcgtggagatgcctgacatcatcatcaaggcgctgcctgttctggtggtgaagctcacgcacatctcagccacagccagcatggccgtcccactgctggagttcctgtccactctggccaggctgccgcacctctacaggaactttgccgcggagcagtatgccagtgtgttcgccatctccctgccgtacaccaacccctccaagtttaatcagtacatcgtgtgtctggcccatcacgtcatagccatgtggttcatcaggtgccgcctgcccttccggaaggattttgtccctttcatcactaagggcctgcggtccaatgtcctcttgtcttttgatgacacccccgagaaggacagcttcagggcccggagtactagtctcaacgagagacccaagagcaggatacagacgtccctcaccagtgccagcttggggtctgcagatgagaactccgtggcccaggctgacgatagcctgaaaaacctccacctggagctcacggaaacctgtctggacatgatggctcgatacgtcttctccaacttcacggctgtcccgaagaggtctcctgtgggcgagttcctcctagcgggtggcaggaccaaaacctggctggttgggaacaagcttgtcactgtgacgacaagcgtgggaaccgggacccggtcgttactaggcctggactcgggggagctgcagtccggcccggagtcgagctccagccccggggtgcatgtgagacagaccaaggaggcgccggccaagctggagtcccaggctgggcagcaggtgtcccgtggggcccgggatcgggtccgttccatgtcggggggccatggtcttcgagttggcgccctggacgtgccggcctcccagttcctgggcagtgccacttctccaggaccacggactgcaccagccgcgaaacctgagaaggcctcagctggcacccgggttcctgtgcaggagaagacgaacctggcggcctatgtgcccctgctgacccagggctgggcggagatcctggtccggaggcccacagggaacaccagctggctgatgagcctggagaacccgctcagccctttctcctcggacatcaacaacatgcccctgcaggagctgtctaacgccctcatggcggctgagcgcttcaaggagcaccgggacacagccctgtacaagtcactgtcggtgccggcagccagcacggccaaaccccctcctctgcctcgctccaacacagactccgccgtggtcatggaggagggaagtccgggcgaggttcctgtgctggtggagcccccagggttggaggacgttgaggcagcgctaggcatggacaggcgcacggatgcctacagcaggtcgtcctcagtctccagccaggaggagaagtcgctccacgcggaggagctggttggcaggggcatccccatcgagcgagtcgtctcctcggagggtggccggccctctgtggacctctccttccagccctcgcagcccctgagcaagtccagctcctctcccgagctgcagactctgcaggacatcctcggggaccctggggacaaggccgacgtgggccggctgagccctgaggttaaggcccggtcacagtcagggaccctggacggggaaagtgctgcctggtcggcctcgggcgaagacagtcggggccagcccgagggtcccttgccttccagctccccccgctcgcccagtggcctccggccccgaggttacaccatctccgactcggccccatcacgcaggggcaagagagtagagagggacgccttaaagagcagagccacagcctccaatgcagagaaagtgccaggcatcaaccccagtttcgtgttcctgcagctctaccattcccccttctttggcgacgagtcaaacaagccaatcctgctgcccaatgagtcacagtcctttgagcggtcggtgcagctcctcgaccagatcccatcatacgacacccacaagatcgccgtcctgtatgttggagaaggccagagcaacagcgagctcgccatcctgtccaatgagcatggctcctacaggtacacggagttcctgacgggcctgggccggctcatcgagctgaaggactgccagccggacaaggtgtacctgggaggcctggacgtgtgtggtgaggacggccagttcacctactgctggcacgatgacatcatgcaagccgtcttccacatcgccaccctgatgcccaccaaggacgtggacaagcaccgctgcgacaagaagcgccacctgggcaacgactttgtgtccattgtctacaatgactccggtgaggacttcaagcttggcaccatcaagggccagttcaactttgtccacgtgatcgtcaccccgctggactacgagtgcaacctggtgtccctgcagtgcaggaaagacatggagggccttgtggacaccagcgtggccaagatcgtgtctgaccgcaacctgcccttcgtggcccgccagatggccctgcacgcaaatatggcctcacaggtgcatcatagccgctccaaccccaccgatatctacccctccaagtggattgcccggctccgccacatcaagcggctccgccagcggatctgcgaggaagccgcctactccaaccccagcctacctctggtgcaccctccgtcccatagcaaagcccctgcacagactccagccgagcccacacctggctatgaggtgggccagcggaagcgcctcatctcctcggtggaggacttcaccgagtttgtgtgaggccggggccctccctcctgcactggccttggacggtattgcctgtcagtgaaataaataaagtcctgaccccagtgcacagacatagaggcacagattgcaaaaaaca

SEQ ID NO: 360694 - DNA, 3369 bp, Homo sapiens
gaatgtggatgtctcccatctgtgcttttcctaagtggggctcccgtgccgttcacctcacattcctggtgtgttacttggcaggcactcccaccactccgaaagggaggcccttcctgggagggaggcaagaaggctccccagcccctttgccccctttcctgggcctgcgttcccagggcctccccagcccctctggctaccccgtgacctggccgctggggagaggtttcatgcctggatttggtcatcagctttcaggcccaaagacactggagcggctccgaggcgccccagaaggcttctccagaactgacttgcacctggccgtggttccagtgctgacagcattaatctcttaccataactacctggacaaaaccaaacagcgcgagatggtctactgcctggagcagggcctcatccaccgctgtgccagccagtgcgtcgtggccttgtccatctgcagcgtggagatgcctgacatcatcatcaaggcgctgcctgttctggtggtgaagctcacgcacatctcagccacagccagcatggccgtcccactgctggagttcctgtccactctggccaggctgccgcacctctacaggaactttgccgcggagcagtatgccagtgtgttcgccatctccctgccgtacaccaacccctccaagtttaatcagtacatcgtgtgtctggcccatcacgtcatagccatgtggttcatcaggtgccgcctgcccttccggaaggattttgtccctttcatcactaagggcctgcggtccaatgtcctcttgtcttttgatgacacccccgagaaggacagcttcagggcccggagtactagtctcaacgagagacccaagagcaggatacagacgtccctcaccagtgccagcttggggtctgcagatgagaactccgtggcccaggctgacgatagcctgaaaaacctccacctggagctcacggaaacctgtctggacatgatggctcgatacgtcttctccaacttcacggctgtcccgaagaggtctcctgtgggcgagttcctcctagcgggtggcaggaccaaaacctggctggttgggaacaagcttgtcactgtgacgacaagcgtgggaaccgggacccggtcgttactaggcctggactcgggggagctgcagtccggcccggagtcgagctccagccccggggtgcatgtgagacagaccaaggaggcgccggccaagctggagtcccaggctgggcagcaggtgtcccgtggggcccgggatcgggtccgttccatgtcggggggccatggtcttcgagttggcgccctggacgtgccggcctcccagttcctgggcagtgccacttctccaggaccacggactgcaccagccgcgaaacctgagaaggcctcagctggcacccgggttcctgtgcaggagaagacgaacctggcggcctatgtgcccctgctgacccagggctgggcggagatcctggtccggaggcccacagggaacaccagctggctgatgagcctggagaacccgctcagccctttctcctcggacatcaacaacatgcccctgcaggagctgtctaacgccctcatggcggctgagcgcttcaaggagcaccgggacacagccctgtacaagtcactgtcggtgccggcagccagcacggccaaaccccctcctctgcctcgctccaacacagactccgccgtggtcatggaggagggaagtccgggcgaggttcctgtgctggtggagcccccagggttggaggacgttgaggcagcgctaggcatggacaggcgcacggatgcctacagcaggtcgtcctcagtctccagccaggaggagaagtcgctccacgcggaggagctggttggcaggggcatccccatcgagcgagtcgtctcctcggagggtggccggccctctgtggacctctccttccagccctcgcagcccctgagcaagtccagctcctctcccgagctgcagactctgcaggacatcctcggggaccctggggacaaggccgacgtgggccggctgagccctgaggttaaggcccggtcacagtcagggaccctggacggggaaagtgctgcctggtcggcctcgggcgaagacagtcggggccagcccgagggtcccttgccttccagctccccccgctcgcccagtggcctccggccccgaggttacaccatctccgactcggccccatcacgcaggggcaagagagtagagagggacgccttaaagagcagagccacagcctccaatgcagagaaagtgccaggcatcaaccccagtttcgtgttcctgcagctctaccattcccccttctttggcgacgagtcaaacaagccaatcctgctgcccaatgagtcacagtcctttgagcggtcggtgcagctcctcgaccagatcccatcatacgacacccacaagatcgccgtcctgtatgttggagaaggccagagcaacagcgagctcgccatcctgtccaatgagcatggctcctacaggtacacggagttcctgacgggcctgggccggctcatcgagctgaaggactgccagccggacaaggtgtacctgggaggcctggacgtgtgtggtgaggacggccagttcacctactgctggcacgatgacatcatgcaagccgtcttccacatcgccaccctgatgcccaccaaggacgtggacaagcaccgctgcgacaagaagcgccacctgggcaacgactttgtgtccattgtctacaatgactccggtgaggacttcaagcttggcaccatcaagggccagttcaactttgtccacgtgatcgtcaccccgctggactacgagtgcaacctggtgtccctgcagtgcaggaaagacatggagggccttgtggacaccagcgtggccaagatcgtgtctgaccgcaacctgcccttcgtggcccgccagatggccctgcacgcaaatatggcctcacaggtgcatcatagccgctccaaccccaccgatatctacccctccaagtggattgcccggctccgccacatcaagcggctccgccagcggatctgcgaggaagccgcctactccaaccccagcctacctctggtgcaccctccgtcccatagcaaagcccctgcacagactccagccgagcccacacctggctatgaggtgggccagcggaagcgcctcatctcctcggtggaggacttcaccgagtttgtgtgaggccggggccctccctcctgcactggccttggacggtattgcctgtcagtgaaataaataaagtcctgaccccagtgcacagacatagaggcacagattgcaaaaaaca

SEQ ID NO: 360695 - DNA, 2507 bp, Homo sapiens
ccccaaaggttttaaacccccccctccgcgggttggtagcgaggctgggtggccggagaactccgtggcccaggctgacgatagcctgaaaaacctccacctggagctcacggaaacctgtctggacatgatggctcgatacgtcttctccaacttcacggctgtcccgaagaggtctcctgtgggcgagttcctcctagcgggtggcaggaccaaaacctggctggttgggaacaagcttgtcactgtgacgacaagcgtgggaaccgggacccggtcgttactaggcctggactcgggggagctgcagtccggcccggagtcgagctccagccccggggtgcatgtgagacagaccaaggaggcgccggccaagctggagtcccaggctgggcagcaggtgtcccgtggggcccgggatcgggtccgttccatgtcggggggccatggtcttcgagttggcgccctggacgtgccggcctcccagttcctgggcagtgccacttctccaggaccacggactgcaccagccgcgaaacctgagaaggcctcagctggcacccgggttcctgtgcaggagaagacgaacctggcggcctatgtgcccctgctgacccagggctgggcggagatcctggtccggaggcccacagggaacaccagctggctgatgagcctggagaacccgctcagccctttctcctcggacatcaacaacatgcccctgcaggagctgtctaacgccctcatggcggctgagcgcttcaaggagcaccgggacacagccctgtacaagtcactgtcggtgccggcagccagcacggccaaaccccctcctctgcctcgctccaacacagactccgccgtggtcatggaggagggaagtccgggcgaggttcctgtgctggtggagcccccagggttggaggacgttgaggcagcgctaggcatggacaggcgcacggatgcctacagcaggtcgtcctcagtctccagccaggaggagaagtcgctccacgcggaggagctggttggcaggggcatccccatcgagcgagtcgtctcctcggagggtggccggccctctgtggacctctccttccagccctcgcagcccctgagcaagtccagctcctctcccgagctgcagactctgcaggacatcctcggggaccctggggacaaggccgacgtgggccggctgagccctgaggttaaggcccggtcacagtcagggaccctggacggggaaagtgctgcctggtcggcctcgggcgaagacagtcggggccagcccgagggtcccttgccttccagctccccccgctcgcccagtggcctccggccccgaggttacaccatctccgactcggccccatcacgcaggggcaagagagtagagagggacgccttaaagagcagagccacagcctccaatgcagagaaagtgccaggcatcaaccccagtttcgtgttcctgcagctctaccattcccccttctttggcgacgagtcaaacaagccaatcctgctgcccaatgagtcacagtcctttgagcggtcggtgcagctcctcgaccagatcccatcatacgacacccacaagatcgccgtcctgtatgttggagaaggccagagcaacagcgagctcgccatcctgtccaatgagcatggctcctacaggtacacggagttcctgacgggcctgggccggctcatcgagctgaaggactgccagccggacaaggtgtacctgggaggcctggacgtgtgtggtgaggacggccagttcacctactgctggcacgatgacatcatgcaagccgtcttccacatcgccaccctgatgcccaccaaggacgtggacaagcaccgctgcgacaagaagcgccacctgggcaacgactttgtgtccattgtctacaatgactccggtgaggacttcaagcttggcaccatcaagggccagttcaactttgtccacgtgatcgtcaccccgctggactacgagtgcaacctggtgtccctgcagtgcaggaaagacatggagggccttgtggacaccagcgtggccaagatcgtgtctgaccgcaacctgcccttcgtggcccgccagatggccctgcacgcaaatatggcctcacaggtgcatcatagccgctccaaccccaccgatatctacccctccaagtggattgcccggctccgccacatcaagcggctccgccagcggatctgcgaggaagccgcctactccaaccccagcctacctctggtgcaccctccgtcccatagcaaagcccctgcacagactccagccgagcccacacctggctatgaggtgggccagcggaagcgcctcatctcctcggtggaggacttcaccgagtttgtgtgaggccggggccctccctcctgcactggccttggacggtattgcctgtcagtgaaataaataaagtcctgaccccagtgcacagacatagaggcacagattgcaaaaaaca

SEQ ID NO: 360696 - DNA, 5845 bp, Homo sapiens
cgttttcttgcttggggcgaaagggggcagcggagcggagcgcccgaaacccagcccctgcggaccgcaatctttgggaaaaaggcgcaaggtgggaacgcagggccgcacgtgggaaccgttcgcggctgccgggtttgcagcccctgcccgcgcagctgggagccgcaggaggcggcccgggactccagcctgcagcccctatcccgcctcctcccacgctccagccacggcgcggcgctacctgctgcagcctctcttctccggagaggcccgggctcctccctacacccccgcggcccagccccgggtcccaggctccggctccgggtcagcatcctcgcgctcaaggcggtcatgccggactcctgcggactacacatcccggcggcccatgcggccccgtcacgtgatgcaaggatcgccggcctttccgccagagggcggcacagaactacaactcccagcaagctcccaaggcggccctccgcgcaatgccgctaccggaagtgcgggtcgcgcttccggcggcgtcccggggccaggggggtgcgcctttctccgcgtcggggcggcccggagcgcggtggcgcggcgcgggaggggttttctggtgcgtcctggtccaccatggccaaaccaacaagcaaagattcaggcttgaaggagaagtttaagattctgttgggactgggaacaccgaggccaaatcccaggtctgcagagggtaaacagacggagtttatcatcaccgcggaaatactgagagaactgagcatggaatgtggcctcaacaatcgcatccggatgatagggcagatttgtgaagtcgcaaaaaccaagaaatttgaagagcacgcagtggaagcactctggaaggcggtcgcggatctgttgcagccggagcggccgctggaggcccggcacgcggtgctggctctgctgaaggccatcgtgcaggggcagggcgagcgtttgggggtcctcagagccctcttctttaaggtcatcaaggattacccttccaacgaagaccttcacgaaaggctggaggttttcaaggccctcacagacaatgggagacacatcacctacttggaggaagagctggctgactttgtcctgcagtggatggatgttggcttgtcctcggaattccttctggtgctggtgaacttggtcaaattcaatagctgttacctcgacgagtacatcgcaaggatggttcagatgatctgtctgctgtgcgtccggaccgcgtcctctgtggacatagaggtctccctgcaggtgctggacgccgtggtctgctacaactgcctgccggctgagagcctcccgctgttcatcgttaccctctgtcgcaccatcaacgtcaaggagctctgcgagccttgctggaagctgatgcggaacctccttggcacccacctgggccacagcgccatctacaacatgtgccacctcatggaggacagagcctacatggaggacgcgcccctgctgagaggagccgtgttttttgtgggcatggctctctggggagcccaccggctctattctctcaggaactcgccgacatctgtgtttccatcattttaccaggccatggcatgtccgaacgaggtggtgtcctatgagatcgtcctgtccatcaccaggctcatcaagaagtataggaaggagctccaggtggtggcgtgggacattctgctgaacatcatcgaacggctccttcaacagctccagaccttggacagcccggagctcaggaccatcgtccatgacctgttgaccacggtggaggagctgtgtgaccagaacgagttccacgggtctcaggagagatactttgaactggtggagagatgtgcggaccagaggcctgagtcctccctcctgaacctgatctcctatagagcgcagtccatccacccggccaaggacggctggattcagaacctgcaggcgctgatggagagattcttcaggagcgagtcccgaggcgccgtgcgcatcaaggtgctggacgtgctgtcctttgtgctgctcatcaacaggcagttctatgaggaggagctgattaactcagtggtcatctcgcagctctcccacatccccgaggataaagaccaccaggtccgaaagctggccacccagttgctggtggacctggcagagggctgccacacacaccacttcaacagcctgctggacatcatcgagaaggtgatggcccgctccctctccccacccccggagctggaagaaagggatgtggccgcatactcggcctccttggaggatgtgaagacagccgtcctggggcttctggtcatccttcagaccaagctgtacaccctgcctgcaagccacgccacgcgtgtgtatgagatgctggtcagccacattcagctccactacaagcacagctacaccctgccaatcgcgagcagcatccggctgcaggcctttgacttcctgttgctgctgcgggccgactcactgcaccgcctgggcctgcccaacaaggatggagtcgtgcggttcagcccctactgcgtctgcgactacatggagccagagagaggctctgagaagaagaccagcggccccctttctcctcccacagggcctcctggcccggcgcctgcaggccccgccgtgcggctggggtccgtgccctactccctgctcttccgcgtcctgctgcagtgcttgaagcaggagtctgactggaaggtgctgaagctggttctgggcaggctgcctgagtccctgcgctataaagtgctcatctttacttccccttgcagtgtggaccagctgtgctctgctctctgctccatgctttcaggcccaaagacactggagcggctccgaggcgccccagaaggcttctccagaactgacttgcacctggccgtggttccagtgctgacagcattaatctcttaccataactacctggacaaaaccaaacagcgcgagatggtctactgcctggagcagggcctcatccaccgctgtgccagccagtgcgtcgtggccttgtccatctgcagcgtggagatgcctgacatcatcatcaaggcgctgcctgttctggtggtgaagctcacgcacatctcagccacagccagcatggccgtcccactgctggagttcctgtccactctggccaggctgccgcacctctacaggaactttgccgcggagcagtatgccagtgtgttcgccatctccctgccgtacaccaacccctccaagtttaatcagtacatcgtgtgtctggcccatcacgtcatagccatgtggttcatcaggtgccgcctgcccttccggaaggattttgtccctttcatcactaagggcctgcggtccaatgtcctcttgtcttttgatgacacccccgagaaggacagcttcagggcccggagtactagtctcaacgagagacccaagagcaggatacagacgtccctcaccagtgccagcttggggtctgcagatgagaactccgtggcccaggctgacgatagcctgaaaaacctccacctggagctcacggaaacctgtctggacatgatggctcgatacgtcttctccaacttcacggctgtcccgaagaggtctcctgtgggcgagttcctcctagcgggtggcaggaccaaaacctggctggttgggaacaagcttgtcactgtgacgacaagcgtgggaaccgggacccggtcgttactaggcctggactcgggggagctgcagtccggcccggagtcgagctccagccccggggtgcatgtgagacagaccaaggaggcgccggccaagctggagtcccaggctgggcagcaggtgtcccgtggggcccgggatcgggtccgttccatgtcggggggccatggtcttcgagttggcgccctggacgtgccggcctcccagttcctgggcagtgccacttctccaggaccacggactgcaccagccgcgaaacctgagaaggcctcagctggcacccgggttcctgtgcaggagaagacgaacctggcggcctatgtgcccctgctgacccagggctgggcggagatcctggtccggaggcccacagggaacaccagctggctgatgagcctggagaacccgctcagccctttctcctcggacatcaacaacatgcccctgcaggagctgtctaacgccctcatggcggctgagcgcttcaaggagcaccgggacacagccctgtacaagtcactgtcggtgccggcagccagcacggccaaaccccctcctctgcctcgctccaacacagactccgccgtggtcatggaggagggaagtccgggcgaggttcctgtgctggtggagcccccagggttggaggacgttgaggcagcgctaggcatggacaggcgcacggatgcctacagcaggtcgtcctcagtctccagccaggaggagaagtcgctccacgcggaggagctggttggcaggggcatccccatcgagcgagtcgtctcctcggagggtggccggccctctgtggacctctccttccagccctcgcagcccctgagcaagtccagctcctctcccgagctgcagactctgcaggacatcctcggggaccctggggacaaggccgacgtgggccggctgagccctgaggttaaggcccggtcacagtcagggaccctggacggggaaagtgctgcctggtcggcctcgggcgaagacagtcggggccagcccgagggtcccttgccttccagctccccccgctcgcccagtggcctccggccccgaggttacaccatctccgactcggccccatcacgcaggggcaagagagtagagagggacgccttaaagagcagagccacagcctccaatgcagagaaagtgccaggcatcaaccccagtttcgtgttcctgcagctctaccattcccccttctttggcgacgagtcaaacaagccaatcctgctgcccaatgagtcacagtcctttgagcggtcggtgcagctcctcgaccagatcccatcatacgacacccacaagatcgccgtcctgtatgttggagaaggccagagcaacagcgagctcgccatcctgtccaatgagcatggctcctacaggtacacggagttcctgacgggcctgggccggctcatcgagctgaaggactgccagccggacaaggtgtacctgggaggcctggacgtgtgtggtgaggacggccagttcacctactgctggcacgatgacatcatgcaagccgtcttccacatcgccaccctgatgcccaccaaggacgtggacaagcaccgctgcgacaagaagcgccacctgggcaacgactttgtgtccattgtctacaatgactccggtgaggacttcaagcttggcaccatcaagggccagttcaactttgtccacgtgatcgtcaccccgctggactacgagtgcaacctggtgtccctgcagtgcaggaaagacatggagggccttgtggacaccagcgtggccaagatcgtgtctgaccgcaacctgcccttcgtggcccgccagatggccctgcacgcaaatatggcctcacaggtgcatcatagccgctccaaccccaccgatatctacccctccaagtggattgcccggctccgccacatcaagcggctccgccagcggatctgcgaggaagccgcctactccaaccccagcctacctctggtgcaccctccgtccccctcctgcactggccttggacggtattgcctgtcagtgaaataaataaagtcctgaccccagtgcacagacatagaggcacagattgcaaaaaaca

SEQ ID NO: 360697 - DNA, 1394 bp, Homo sapiens
tagaggactcccgtcctccccgttggcggagcgctgatgtggcggagccgggcaatccacttgagaggggtagatatcggtgggccggctgagccctgaggttaaggcccggtcacagtcagggaccctggacggggaaagtgctgcctggtcggcctcgggcgaagacagtcggggccagcccgagggtcccttgccttccagctccccccgctcgcccagtggcctccggccccgaggttacaccatctccgactcggccccatcacgcaggggcaagagagtagagagggacgccttaaagagcagagccacagcctccaatgcagagaaagtgccaggcatcaaccccagtttcgtgttcctgcagctctaccattcccccttctttggcgacgagtcaaacaagccaatcctgctgcccaatgagtcacagtcctttgagcggtcggtgcagctcctcgaccagatcccatcatacgacacccacaagatcgccgtcctgtatgttggagaaggccagagcaacagcgagctcgccatcctgtccaatgagcatggctcctacaggtacacggagttcctgacgggcctgggccggctcatcgagctgaaggactgccagccggacaaggtgtacctgggaggcctggacgtgtgtggtgaggacggccagttcacctactgctggcacgatgacatcatgcaagccgtcttccacatcgccaccctgatgcccaccaaggacgtggacaagcaccgctgcgacaagaagcgccacctgggcaacgactttgtgtccattgtctacaatgactccggtgaggacttcaagcttggcaccatcaagggccagttcaactttgtccacgtgatcgtcaccccgctggactacgagtgcaacctggtgtccctgcagtgcaggaaagacatggagggccttgtggacaccagcgtggccaagatcgtgtctgaccgcaacctgcccttcgtggcccgccagatggccctgcacgcaaatatggcctcacaggtgcatcatagccgctccaaccccaccgatatctacccctccaagtggattgcccggctccgccacatcaagcggctccgccagcggatctgcgaggaagccgcctactccaaccccagcctacctctggtgcaccctccgtcccatagcaaagcccctgcacagactccagccgagcccacacctggctatgaggtgggccagcggaagcgcctcatctcctcggtggaggacttcaccgagtttgtgtgaggccggggccctccctcctgcactggccttggacggtattgcctgtcagtgaaataaataaagtcctgaccccagtgcacagacatagaggcacagattgcaaaaaaca

SEQ ID NO: 360698 - DNA, 1641 bp, Homo sapiens
caggaaatgctgctttgggacctcccaccctctctccttagcgtccccagctgtgggtctggcttggagttggagggtgagcctctgctcttgggagcagtctgtttgcaaacagggacttcccccacgtcacggagtctccgcagctctcctcggttacgagggctggtttcaggctcccgctcttttagagctgaggcccgtcgggcggagagcgtcttgcccctgcctacctggaggcacaggggtggctgctggtggacactagggtgggcagagccgattgcctgcccaacccccgggcactcatgcaggagaggcctgtgtcggggtcacgtgcaggccttcccagcgtcctccctgcccgctcggtggatggcagcagtaagcagagccctggggaggctcgcagggctgctgtccctctggtcaggagaaggctggttctcggaggccacgtcagggccagggcctggcccagccccaacatccagcagccccgtctgtgtcctcccagactccgccgtggtcatggaggagggaagtccgggcgaggttcctgtgctggtggagcccccagggttggaggacgttgaggcagtttcgtgttcctgcagctctaccattcccccttctttggcgacgagtcaaacaagccaatcctgctgcccaatgagtcacagtcctttgagcggtcggtgcagctcctcgaccagatcccatcatacgacacccacaagatcgccgtcctgtatgttggagaaggccagagcaacagcgagctcgccatcctgtccaatgagcatggctcctacaggtacacggagttcctgacgggcctgggccggctcatcgagctgaaggactgccagccggacaaggtgtacctgggaggcctggacgtgtgtggtgaggacggccagttcacctactgctggcacgatgacatcatgcaagccgtcttccacatcgccaccctgatgcccaccaaggacgtggacaagcaccgctgcgacaagaagcgccacctgggcaacgactttgtgtccattgtctacaatgactccggtgaggacttcaagcttggcaccatcaagggccagttcaactttgtccacgtgatcgtcaccccgctggactacgagtgcaacctggtgtccctgcagtgcaggaaagacatggagggccttgtggacaccagcgtggccaagatcgtgtctgaccgcaacctgcccttcgtggcccgccagatggccctgcacgcaaatatggcctcacaggtgcatcatagccgctccaaccccaccgatatctacccctccaagtggattgcccggctccgccacatcaagcggctccgccagcggatctgcgaggaagccgcctactccaaccccagcctacctctggtgcaccctccgtcccatagcaaagcccctgcacagactccagccgagcccacacctggctatgaggtgggccagcggaagcgcctcatctcctcggtggaggacttcaccgagtttgtgtgaggccggggccctccctcctgcactggccttggacggtattgcctgtcagtgaaataaataaagtcctgaccccagtgcacagacatagaggcacagattgcaaaaaaca

SEQ ID NO: 360699 - DNA, 1070 bp, Homo sapiens
cacacacggggctgagggaagagagggagtcaaggatgacacccgatgtctggcctgggtggctgctggaatggatggtcttgtctgcctcagggatcagagtggggctcccggcagagcctgctgggcacccccaccctctgcggggcagggcccggcccgggagtgatgccaccctgcctctcccctctccccacagagcaacagcgagctcgccatcctgtccaatgagcatggctcctacaggtacacggagttcctgacgggcctgggccggctcatcgagctgaaggactgccagccggacaaggtgtacctgggaggcctggacgtgtgtggtgaggacggccagttcacctactgctggcacgatgacatcatgcaagccgtcttccacatcgccaccctgatgcccaccaaggacgtggacaagcaccgctgcgacaagaagcgccacctgggcaacgactttgtgtccattgtctacaatgactccggtgaggacttcaagcttggcaccatcaagggccagttcaactttgtccacgtgatcgtcaccccgctggactacgagtgcaacctggtgtccctgcagtgcaggaaagacatggagggccttgtggacaccagcgtggccaagatcgtgtctgaccgcaacctgcccttcgtggcccgccagatggccctgcacgcaaatatggcctcacaggtgcatcatagccgctccaaccccaccgatatctacccctccaagtggattgcccggctccgccacatcaagcggctccgccagcggatctgcgaggaagccgcctactccaaccccagcctacctctggtgcaccctccgtcccatagcaaagcccctgcacagactccagccgagcccacacctggctatgaggtgggccagcggaagcgcctcatctcctcggtggaggacttcaccgagtttgtgtgaggccggggccctccctcctgcactggccttggacggtattgcctgtcagtgaaataaataaagtcctgaccccagtgcacagacatagaggcacagattgcaaaaaaca

SEQ ID NO: 360700 - DNA, 3527 bp, Homo sapiens
cgttttcttgcttggggcgaaagggggcagcggagcggagcgcccgaaacccagcccctgcggaccgcaatctttgggaaaaaggcgcaaggtgggaacgcagggccgcacgtgggaaccgttcgcggctgccgggtttgcagcccctgcccgcgcagctgggagccgcaggaggcggcccgggactccagcctgcagcccctatcccgcctcctcccacgctccagccacggcgcggcgctacctgctgcagcctctcttctccggagaggcccgggctcctccctacacccccgcggcccagccccgggtcccaggctccggctccgggtcagcatcctcgcgctcaaggcggtcatgccggactcctgcggactacacatcccggcggcccatgcggccccgtcacgtgatgcaaggatcgccggcctttccgccagagggcggcacagaactacaactcccagcaagctcccaaggcggccctccgcgcaatgccgctaccggaagtgcgggtcgcgcttccggcggcgtcccggggccaggggggtgcgcctttctccgcgtcggggcggcccggagcgcggtggcgcggcgcgggaggggttttctggtgcgtcctggtccaccatggccaaaccaacaagcaaagattcaggcttgaaggagaagtttaagattctgttgggactgggaacaccgaggccaaatcccaggtctgcagagggtaaacagacggagtttatcatcaccgcggaaatactgagagaactgagcatggaatgtggcctcaacaatcgcatccggatgatagggcagatttgtgaagtcgcaaaaaccaagaaatttgaagagcacgcagtggaagcactctggaaggcggtcgcggatctgttgcagccggagcggccgctggaggcccggcacgcggtgctggctctgctgaaggccatcgtgcaggggcagggcgagcgtttgggggtcctcagagccctcttctttaaggtcatcaaggattacccttccaacgaagaccttcacgaaaggctggaggttttcaaggccctcacagacaatgggagacacatcacctacttggaggaagagctggctgactttgtcctgcagtggatggatgttggcttgtcctcggaattccttctggtgctggtgaacttggtcaaattcaatagctgttacctcgacgagtacatcgcaaggatggttcagatgatctgtctgctgtgcgtccggaccgcgtcctctgtggacatagaggtctccctgcaggtgctggacgccgtggtctgctacaactgcctgccggctgagagcctcccgctgttcatcgttaccctctgtcgcaccatcaacgtcaaggagctctgcgagccttgctggaagctgatgcggaacctccttggcacccacctgggccacagcgccatctacaacatgtgccacctcatggaggacagagcctacatggaggacgcgcccctgctgagaggagccgtgttttttgtgggcatggctctctggggagcccaccggctctattctctcaggaactcgccgacatctgtgtttccatcattttaccaggccatggcatgtccgaacgaggtggtgtcctatgagatcgtcctgtccatcaccaggctcatcaagaagtataggaaggagctccaggtggtggcgtgggacattctgctgaacatcatcgaacggctccttcaacagctccagaccttggacagcccggagctcaggaccatcgtccatgacctgttgaccacggtggaggagctgtgtgaccagaacgagttccacgggtctcaggagagatactttgaactggtggagagatgtgcggaccagaggcctgagtcctccctcctgaacctgatctcctatagagcgcagtccatccacccggccaaggacggctggattcagaacctgcaggcgctgatggagagattcttcaggagcgagtcccgaggcgccgtgcgcatcaaggtgctggacgtgctgtcctttgtgctgctcatcaacaggcagttctatgaggaggagctgattaactcagtggtcatctcgcagctctcccacatccccgaggataaagaccaccaggtccgaaagctggccacccagttgctggtggacctggcagagggctgccacacacaccacttcaacagcctgctggacatcatcgagaaggtgatggcccgctccctctccccacccccggagctggaagaaagggatgtggccgcatactcggcctccttggaggatgtgaagacagccgtcctggggcttctggtcatccttcagaccaagctgtacaccctgcctgcaagccacgccacgcgtgtgtatgagatgctggtcagccacattcagctccactacaagcacagctacaccctgccaatcgcgagcagcatccggctgcaggcctttgacttcctgttgctgctgcgggccgactcactgcaccgcctgggcctgcccaacaaggatggagtcgtgcggttcagcccctactgcgtctgcgactacatggagccagagagaggctctgagaagaagaccagcggccccctttctcctcccacagggcctcctggcccggcgcctgcaggccccgccgtgcggctggggtccgtgccctactccctgctcttccgcgtcctgctgcagtgcttgaagcaggagtctgactggaaggtgctgaagctggttctgggcaggctgcctgagtccctgcgctataaagtgctcatctttacttccccttgcagtgtggaccagctgtgctctgctctctgctccatgctttcaggcccaaagacactggagcggctccgaggcgccccagaaggcttctccagaactgacttgcacctggccgtggttccagtgctgacagcattaatctcttaccataactacctggacaaaaccaaacagcgcgagatggtctactgcctggagcagggcctcatccaccgctgtgccagccagtgcgtcgtggccttgtccatctgcagcgtggagatgcctgacatcatcatcaaggcgctgcctgttctggtggtgaagctcacgcacatctcagccacagccagcatggccgtcccactgctggagttcctgtccactctggccaggctgccgcacctctacaggaactttgccgcggagcagtatgccagtgtgttcgccatctccctgccgtacaccaacccctccaagtttaatcagtacatcgtgtgtctggcccatcacgtcatagcatagcaaagcccctgcacagactccagccgagcccacacctggctatgaggtgggccagcggaagcgcctcatctcctcggtggaggacttcaccgagtttgtgtgaggccggggccctccctcctgcactggccttggacggtattgcctgtcagtgaaataaataaagtcctgaccccagtgcacagacatagaggcacagattgcaaaaaaca

SEQ ID NO: 360701 - DNA, 1692 bp, Homo sapiens
cgttttcttgcttggggcgaaagggggcagcggagcggagcgcccgaaacccagcccctgcggaccgcaatctttgggaaaaaggcgcaaggtgggaacgcagggccgcacgtgggaaccgttcgcggctgccgggtttgcagcccctgcccgcgcagctgggagccgcaggaggcggcccgggactccagcctgcagcccctatcccgcctcctcccacgctccagccacggcgcggcgctacctgctgcagcctctcttctccggagaggcccgggctcctccctacacccccgcggcccagccccgggtcccaggctccggctccgggtcagcatcctcgcgctcaaggcggtcatgccggactcctgcggactacacatcccggcggcccatgcggccccgtcacgtgatgcaaggatcgccggcctttccgccagagggcggcacagaactacaactcccagcaagctcccaaggcggccctccgcgcaatgccgctaccggaagtgcgggtcgcgcttccggcggcgtcccggggccaggggggtgcgcctttctccgcgtcggggcggcccggagcgcggtggcgcggcgcgggaggggttttctggtgcgtcctggtccaccatggccaaaccaacaagcaaagattcaggcttgaaggagaagtttaagattctgttgggactgggaacaccgaggccaaatcccaggtctgcagagggtaaacagacggagtttatcatcaccgcggaaatactgagagaactgagcatggaatgtggcctcaacaatcgcatccggatgatagggcagatttgtgaagtcgcaaaaaccaagaaatttgaagagcacgcagtggaagcactctggaaggcggtcgcggatctgttgcagccggagcggccgctggaggcccggcacgcggtgctggctctgctgaaggccatcgtgcaggggcaggtaaggcccagggcgacgctgggatgggtgacgtcaggctgcccactgactgtcctgtccctgctgggccgtgtttggactcctgcctcgggcgagcgtttgggggtcctcagagccctcttctttaaggtcatcaaggattacccttccaacgaagaccttcacgaaaggctggaggttttcaaggccctcacagacaatgggagacacatcacctacttggaggaagagctggctgactttgtcctgcagtggatggatgttggcttgtcctcggaattccttctggtgctggtgaacttggtcaaattcaatagctgttacctcgacgagtacatcgcaaggatggttcagtaagaaaagaattgagatcctgttctgataatggtcctaagttcagctccgcagtgaataaagttgaaaccaccaaaaaaatagaggttgggctgggcacaatggctcacgcctgtaatctcagcactttgggaggccgaggcaggcggatcacgaggtcaggagttcgagaccagcctggccaacatggtgaaaccctgtctctactaaaaatacaaaaattagccgggcatggtggtgggagcctgtaatcccagctactcaggaggctgaggcaggagaattgcttgaaaccggaaggcagaggttgcagtgagcggagatcgtgccactgcactccagcctgggtgaaagagcaaaactccatctcaa

SEQ ID NO: 360702 - DNA, 1522 bp, Homo sapiens
cgttttcttgcttggggcgaaagggggcagcggagcggagcgcccgaaacccagcccctgcggaccgcaatctttgggaaaaaggcgcaaggtgggaacgcagggccgcacgtgggaaccgttcgcggctgccgggtttgcagcccctgcccgcgcagctgggagccgcaggaggcggcccgggactccagcctgcagcccctatcccgcctcctcccacgctccagccacggcgcggcgctacctgctgcagcctctcttctccggagaggcccgggctcctccctacacccccgcggcccagccccgggtcccaggctccggctccgggtcagcatcctcgcgctcaaggcggtcatgccggactcctgcggactacacatcccggcggcccatgcggccccgtcacgtgatgcaaggatcgccggcctttccgccagagggcggcacagaactacaactcccagcaagctcccaaggcggccctccgcgcaatgccgctaccggaagtgcgggtcgcgcttccggcggcgtcccggggccaggggggtgcgcctttctccgcgtcggggcggcccggagcgcggtggcgcggcgcgggaggggttttctggtgcgtcctggtccaccatggccaaaccaacaagcaaagattcaggcttgaaggagaagtttaagattctgttgggactgggaacaccgaggccaaatcccaggtctgcagagggtaaacagacggagtttatcatcaccgcggaaatactgagagaactgagcatggaatgtggcctcaacaatcgcatccggatgatagggcagatttgtgaagtcgcaaaaaccaagaaatttgaagagcacgcagtggaagcactctggaaggcggtcgcggatctgttgcagccggagcggccgctggaggcccggcacgcggtgctggctctgctgaaggccatcgtgcaggggcaggtaaggcccagggcgacgctgggatgggtgacgtcaggctgcccactgactgtcctgtccctgctgggccgtgtttggactcctgcctcggtgagttgctgggcacagggtctaggggctgatgggctctggagctggatggcctgtggggtctcctggtgtcatgaggtctgtgtgaccgtaggcactgcctcctcgcctgtaaacagatggtcactgcaccttcctcttatgggatgttctggggatcatatgaggcagttctcgcagagtgctgagatcgtacctggcagctggtgtggggctacggtgttgttttgcccttgcaccctttcggggccactcccctgctcactgcattccatctgtgctggtcttggctgaccctgaacacccaggcctcttggtgttcctgcctcccctggtcggccacttctactccttcatgtcccagctgctcagaagggccgtccactctcacaggctctcctgggtttcccccactcaggccttgtcctcagtctctgagcacaaggctgtctgccctgcaccgagt

SEQ ID NO: 360703 - DNA, 594 bp, Homo sapiens
tctgggggtgtctcaacccatgaggcccggagcggcctcagagggctgggggcgtctgtccccatgcggcccagagcggcctgagagggctgagggcgtctccatgcggtgggtgtgtagcgaggcctctggtgccaagtccatgtggggagtggaagtcagcctgtgtcatcgtgcctggtactgcagaccttggacagcccggagctcaggaccatcgtccatgacctgttgaccacggtggaggagctgtgtgaccagaacgagttccacgggtctcaggagagatactttgaactggtggagagatgtgcggaccagaggcctgtgagaccccctcctgggtggggcctttgggctttggctggtggggaggggccgggtgctgggtgaagtgcagctttctgagcctcagaagccaagggccaggtgggcgcctgctttccaggtttctgcactcggcagggaaggctggcaggcacagcacgtgtttggtaacaagctcggggctagcccacccatcagtttcctcccacctgtgtggagcaagcttccatccggctctgtagagtcctgtggctcccaggcggccgc

SEQ ID NO: 360704 - DNA, 699 bp, Homo sapiens
gaatgtggatgtctcccatctgtgcttttcctaagtggggctcccgtgccgttcacctcacattcctggtgtgttacttggcaggcactcccaccactccgaaagggaggcccttcctgggagggaggcaagaaggctccccagcccctttgccccctttcctgggcctgcgttcccagggcctccccagcccctctggctaccccgtgacctggccgctggggagaggtttcatgcctggatttggtcatcagctttcaggcccaaagacactggagcggctccgaggcgccccagaaggcttctccagaactgacttgcacctggccgtggttccagtgctgacagcattaatctcttaccataactacctggacaaaaccaaacagcgcgagatggtctactgcctggagcagggcctcatccaccgctgtgccagccagtgcgtcgtggccttgtccatctgcagcgtggagatgcctgacatcatcatcaaggcgctgcctgttctggtggtgaagctcacgcacatctcagccacagccagcatggccgtcccactgctggagttcctgtccagtgagtccccgccctgcctgcgcatgcacccgagaggttcgggctgtgtaacctgtgcgggcttctctggtgccctctctcaggactccttggggaacctgggtgtctcgccttctgctg

SEQ ID NO: 360705 - DNA, 6055 bp, Homo sapiens
cgttttcttgcttggggcgaaagggggcagcggagcggagcgcccgaaacccagcccctgcggaccgcaatctttgggaaaaaggcgcaaggtgggaacgcagggccgcacgtgggaaccgttcgcggctgccgggtttgcagcccctgcccgcgcagctgggagccgcaggaggcggcccgggactccagcctgcagcccctatcccgcctcctcccacgctccagccacggcgcggcgctacctgctgcagcctctcttctccggagaggcccgggctcctccctacacccccgcggcccagccccgggtcccaggctccggctccgggtcagcatcctcgcgctcaaggcggtcatgccggactcctgcggactacacatcccggcggcccatgcggccccgtcacgtgatgcaaggatcgccggcctttccgccagagggcggcacagaactacaactcccagcaagctcccaaggcggccctccgcgcaatgccgctaccggaagtgcgggtcgcgcttccggcggcgtcccggggccaggggggtgcgcctttctccgcgtcggggcggcccggagcgcggtggcgcggcgcgggaggggttttctggtgcgtcctggtccaccatggccaaaccaacaagcaaagattcaggcttgaaggagaagtttaagattctgttgggactgggaacaccgaggccaaatcccaggtctgcagagggtaaacagacggagtttatcatcaccgcggaaatactgagagaactgagcatggaatgtggcctcaacaatcgcatccggatgatagggcagatttgtgaagtcgcaaaaaccaagaaatttgaagagcacgcagtggaagcactctggaaggcggtcgcggatctgttgcagccggagcggccgctggaggcccggcacgcggtgctggctctgctgaaggccatcgtgcaggggcaggtaaggcccagggcgacgctgggatgggtgacgtcaggctgcccactgactgtcctgtccctgctgggccgtgtttggactcctgcctcgggcgagcgtttgggggtcctcagagccctcttctttaaggtcatcaaggattacccttccaacgaagaccttcacgaaaggctggaggttttcaaggccctcacagacaatgggagacacatcacctacttggaggaagagctggctgactttgtcctgcagtggatggatgttggcttgtcctcggaattccttctggtgctggtgaacttggtcaaattcaatagctgttacctcgacgagtacatcgcaaggatggttcagatgatctgtctgctgtgcgtccggaccgcgtcctctgtggacatagaggtctccctgcaggtgctggacgccgtggtctgctacaactgcctgccggctgagagcctcccgctgttcatcgttaccctctgtcgcaccatcaacgtcaaggagctctgcgagccttgctggaagctgatgcggaacctccttggcacccacctgggccacagcgccatctacaacatgtgccacctcatggaggacagagcctacatggaggacgcgcccctgctgagaggagccgtgttttttgtgggcatggctctctggggagcccaccggctctattctctcaggaactcgccgacatctgtgtttccatcattttaccaggccatggcatgtccgaacgaggtggtgtcctatgagatcgtcctgtccatcaccaggctcatcaagaagtataggaaggagctccaggtggtggcgtgggacattctgctgaacatcatcgaacggctccttcaacagctccagaccttggacagcccggagctcaggaccatcgtccatgacctgttgaccacggtggaggagctgtgtgaccagaacgagttccacgggtctcaggagagatactttgaactggtggagagatgtgcggaccagaggcctgagtcctccctcctgaacctgatctcctatagagcgcagtccatccacccggccaaggacggctggattcagaacctgcaggcgctgatggagagattcttcaggagcgagtcccgaggcgccgtgcgcatcaaggtgctggacgtgctgtcctttgtgctgctcatcaacaggcagttctatgaggaggagctgattaactcagtggtcatctcgcagctctcccacatccccgaggataaagaccaccaggtccgaaagctggccacccagttgctggtggacctggcagagggctgccacacacaccacttcaacagcctgctggacatcatcgagaaggtgatggcccgctccctctccccacccccggagctggaagaaagggatgtggccgcatactcggcctccttggaggatgtgaagacagccgtcctggggcttctggtcatccttcagaccaagctgtacaccctgcctgcaagccacgccacgcgtgtgtatgagatgctggtcagccacattcagctccactacaagcacagctacaccctgccaatcgcgagcagcatccggctgcaggcctttgacttcctgttgctgctgcgggccgactcactgcaccgcctgggcctgcccaacaaggatggagtcgtgcggttcagcccctactgcgtctgcgactacatggagccagagagaggctctgagaagaagaccagcggccccctttctcctcccacagggcctcctggcccggcgcctgcaggccccgccgtgcggctggggtccgtgccctactccctgctcttccgcgtcctgctgcagtgcttgaagcaggagtctgactggaaggtgctgaagctggttctgggcaggctgcctgagtccctgcgctataaagtgctcatctttacttccccttgcagtgtggaccagctgtgctctgctctctgctccatgctttcaggcccaaagacactggagcggctccgaggcgccccagaaggcttctccagaactgacttgcacctggccgtggttccagtgctgacagcattaatctcttaccataactacctggacaaaaccaaacagcgcgagatggtctactgcctggagcagggcctcatccaccgctgtgccagccagtgcgtcgtggccttgtccatctgcagcgtggagatgcctgacatcatcatcaaggcgctgcctgttctggtggtgaagctcacgcacatctcagccacagccagcatggccgtcccactgctggagttcctgtccactctggccaggctgccgcacctctacaggaactttgccgcggagcagtatgccagtgtgttcgccatctccctgccgtacaccaacccctccaagtttaatcagtacatcgtgtgtctggcccatcacgtcatagccatgtggttcatcaggtgccgcctgcccttccggaaggattttgtccctttcatcactaagggcctgcggtccaatgtcctcttgtcttttgatgacacccccgagaaggacagcttcagggcccggagtactagtctcaacgagagacccaagagcaggatacagacgtccctcaccagtgccagcttggggtctgcagatgagaactccgtggcccaggctgacgatagcctgaaaaacctccacctggagctcacggaaacctgtctggacatgatggctcgatacgtcttctccaacttcacggctgtcccgaagaggtctcctgtgggcgagttcctcctagcgggtggcaggaccaaaacctggctggttgggaacaagcttgtcactgtgacgacaagcgtgggaaccgggacccggtcgttactaggcctggactcgggggagctgcagtccggcccggagtcgagctccagccccggggtgcatgtgagacagaccaaggaggcgccggccaagctggagtcccaggctgggcagcaggtgtcccgtggggcccgggatcgggtccgttccatgtcggggggccatggtcttcgagttggcgccctggacgtgccggcctcccagttcctgggcagtgccacttctccaggaccacggactgcaccagccgcgaaacctgagaaggcctcagctggcacccgggttcctgtgcaggagaagacgaacctggcggcctatgtgcccctgctgacccagggctgggcggagatcctggtccggaggcccacagggaacaccagctggctgatgagcctggagaacccgctcagccctttctcctcggacatcaacaacatgcccctgcaggagctgtctaacgccctcatggcggctgagcgcttcaaggagcaccgggacacagccctgtacaagtcactgtcggtgccggcagccagcacggccaaaccccctcctctgcctcgctccaacacagactccgccgtggtcatggaggagggaagtccgggcgaggttcctgtgctggtggagcccccagggttggaggacgttgaggcagcgctaggcatggacaggcgcacggatgcctacagcaggtcgtcctcagtctccagccaggaggagaagtcgctccacgcggaggagctggttggcaggggcatccccatcgagcgagtcgtctcctcggagggtggccggccctctgtggacctctccttccagccctcgcagcccctgagcaagtccagctcctctcccgagctgcagactctgcaggacatcctcggggaccctggggacaaggccgacgtgggccggctgagccctgaggttaaggcccggtcacagtcagggaccctggacggggaaagtgctgcctggtcggcctcgggcgaagacagtcggggccagcccgagggtcccttgccttccagctccccccgctcgcccagtggcctccggccccgaggttacaccatctccgactcggccccatcacgcaggggcaagagagtagagagggacgccttaaagagcagagccacagcctccaatgcagagaaagtgccaggcatcaaccccagtttcgtgttcctgcagctctaccattcccccttctttggcgacgagtcaaacaagccaatcctgctgcccaatgagtcacagtcctttgagcggtcggtgcagctcctcgaccagatcccatcatacgacacccacaagatcgccgtcctgtatgttggagaaggccagagcaacagcgagctcgccatcctgtccaatgagcatggctcctacaggtacacggagttcctgacgggcctgggccggctcatcgagctgaaggactgccagccggacaaggtgtacctgggaggcctggacgtgtgtggtgaggacggccagttcacctactgctggcacgatgacatcatgcaagccgtcttccacatcgccaccctgatgcccaccaaggacgtggacaagcaccgctgcgacaagaagcgccacctgggcaacgactttgtgtccattgtctacaatgactccggtgaggacttcaagcttggcaccatcaagggccagttcaactttgtccacgtgatcgtcaccccgctggactacgagtgcaacctggtgtccctgcagtgcaggaaagacatggagggccttgtggacaccagcgtggccaagatcgtgtctgaccgcaacctgcccttcgtggcccgccagatggccctgcacgcaaatatggcctcacaggtgcatcatagccgctccaaccccaccgatatctacccctccaagtggattgcccggctccgccacatcaagcggctccgccagcggatctgcgaggaagccgcctactccaaccccagcctacctctggtgcaccctccgtcccatagcaaagcccctgcacagactccagccgagcccacacctggctatgaggtgggccagcggaagcgcctcatctcctcggtggaggacttcaccgagtttgtgtgaggccggggccctccctcctgcactggccttggacggtattgcctgtcagtgaaataaataaagtcctgaccccagtgcacagacatagaggcacagattgcaaaaaaca

SEQ ID NO: 360706 - DNA, 4060 bp, Homo sapiens
caaaattcatccataagatgttggatggtagaacagtttcctgtctgctgactggattgttccacccagcgccatgtgtccaggcccgtccaggctgtggcagctgttggtgctcccctccttttcatggctgagtagtattccatcatctggaaggagcacattttgtctgtccgttcctccattggtggacatttggcctgtgtccgccttgcagctgcgtgaagtaagctagagaaaagcaaatgctgttaagatgctaggcatggtgactcacgcctgtaatcctggcagtttgggaggccgaggcgggcagatcatgaggccaggagttcgagaccagcctgaccaacatggtgaaaccccgtctctactaaaaatacaaaaattagctggatgcggtggtgcgcacctgtaatcccagctactcgggaggctgagaccaagctgtacaccctgcctgcaagccacgccacgcgtgtgtatgagatgctggtcagccacattcagctccactacaagcacagctacaccctgccaatcgcgagcagcatccggctgcaggcctttgacttcctgttgctgctgcgggccgactcactgcaccgcctgggcctgcccaacaaggatggagtcgtgcggttcagcccctactgcgtctgcgactacatggagccagagagaggctctgagaagaagaccagcggccccctttctcctcccacagggcctcctggcccggcgcctgcaggccccgccgtgcggctggggtccgtgccctactccctgctcttccgcgtcctgctgcagtgcttgaagcaggagtctgactggaaggtgctgaagctggttctgggcaggctgcctgagtccctgcgctataaagtgctcatctttacttccccttgcagtgtggaccagctgtgctctgctctctgctccatgctttcaggcccaaagacactggagcggctccgaggcgccccagaaggcttctccagaactgacttgcacctggccgtggttccagtgctgacagcattaatctcttaccataactacctggacaaaaccaaacagcgcgagatggtctactgcctggagcagggcctcatccaccgctgtgccagccagtgcgtcgtggccttgtccatctgcagcgtggagatgcctgacatcatcatcaaggcgctgcctgttctggtggtgaagctcacgcacatctcagccacagccagcatggccgtcccactgctggagttcctgtccactctggccaggctgccgcacctctacaggaactttgccgcggagcagtatgccagtgtgttcgccatctccctgccgtacaccaacccctccaagtttaatcagtacatcgtgtgtctggcccatcacgtcatagccatgtggttcatcaggtgccgcctgcccttccggaaggattttgtccctttcatcactaagggcctgcggtccaatgtcctcttgtcttttgatgacacccccgagaaggacagcttcagggcccggagtactagtctcaacgagagacccaagagcaggatacagacgtccctcaccagtgccagcttggggtctgcagatgagaactccgtggcccaggctgacgatagcctgaaaaacctccacctggagctcacggaaacctgtctggacatgatggctcgatacgtcttctccaacttcacggctgtcccgaagaggtctcctgtgggcgagttcctcctagcgggtggcaggaccaaaacctggctggttgggaacaagcttgtcactgtgacgacaagcgtgggaaccgggacccggtcgttactaggcctggactcgggggagctgcagtccggcccggagtcgagctccagccccggggtgcatgtgagacagaccaaggaggcgccggccaagctggagtcccaggctgggcagcaggtgtcccgtggggcccgggatcgggtccgttccatgtcggggggccatggtcttcgagttggcgccctggacgtgccggcctcccagttcctgggcagtgccacttctccaggaccacggactgcaccagccgcgaaacctgagaaggcctcagctggcacccgggttcctgtgcaggagaagacgaacctggcggcctatgtgcccctgctgacccagggctgggcggagatcctggtccggaggcccacagggaacaccagctggctgatgagcctggagaacccgctcagccctttctcctcggacatcaacaacatgcccctgcaggagctgtctaacgccctcatggcggctgagcgcttcaaggagcaccgggacacagccctgtacaagtcactgtcggtgccggcagccagcacggccaaaccccctcctctgcctcgctccaacacagactccgccgtggtcatggaggagggaagtccgggcgaggttcctgtgctggtggagcccccagggttggaggacgttgaggcagcgctaggcatggacaggcgcacggatgcctacagcaggtcgtcctcagtctccagccaggaggagaagtcgctccacgcggaggagctggttggcaggggcatccccatcgagcgagtcgtctcctcggagggtggccggccctctgtggacctctccttccagccctcgcagcccctgagcaagtccagctcctctcccgagctgcagactctgcaggacatcctcggggaccctggggacaaggccgacgtgggccggctgagccctgaggttaaggcccggtcacagtcagggaccctggacggggaaagtgctgcctggtcggcctcgggcgaagacagtcggggccagcccgagggtcccttgccttccagctccccccgctcgcccagtggcctccggccccgaggttacaccatctccgactcggccccatcacgcaggggcaagagagtagagagggacgccttaaagagcagagccacagcctccaatgcagagaaagtgccaggcatcaaccccagtttcgtgttcctgcagctctaccattcccccttctttggcgacgagtcaaacaagccaatcctgctgcccaatgagtcacagtcctttgagcggtcggtgcagctcctcgaccagatcccatcatacgacacccacaagatcgccgtcctgtatgttggagaaggccagagcaacagcgagctcgccatcctgtccaatgagcatggctcctacaggtacacggagttcctgacgggcctgggccggctcatcgagctgaaggactgccagccggacaaggtgtacctgggaggcctggacgtgtgtggtgaggacggccagttcacctactgctggcacgatgacatcatgcaagccgtcttccacatcgccaccctgatgcccaccaaggacgtggacaagcaccgctgcgacaagaagcgccacctgggcaacgactttgtgtccattgtctacaatgactccggtgaggacttcaagcttggcaccatcaagggccagttcaactttgtccacgtgatcgtcaccccgctggactacgagtgcaacctggtgtccctgcagtgcaggaaagacatggagggccttgtggacaccagcgtggccaagatcgtgtctgaccgcaacctgcccttcgtggcccgccagatggccctgcacgcaaatatggcctcacaggtgcatcatagccgctccaaccccaccgatatctacccctccaagtggattgcccggctccgccacatcaagcggctccgccagcggatctgcgaggaagccgcctactccaaccccagcctacctctggtgcaccctccgtcccatagcaaagcccctgcacagactccagccgagcccacacctggctatgaggtgggccagcggaagcgcctcatctcctcggtggaggacttcaccgagtttgtgtgaggccggggccctccctcctgcactggccttggacggtattgcctgtcagtgaaataaataaagtcctgaccccagtgcacagacatagaggcacagattgcaaaaaaca

SEQ ID NO: 360707 - DNA, 2491 bp, Homo sapiens
  misc_feature (38)..(38): n is a, c, g, or t
gcgggacagcacctaggctaggtacgaggctgggtggnggagaactccgtggcccaggctgacgatagcctgaaaaacctccacctggagctcacggaaacctgtctggacatgatggctcgatacgtcttctccaacttcacggctgtcccgaagaggtctcctgtgggcgagttcctcctagcgggtggcaggaccaaaacctggctggttgggaacaagcttgtcactgtgacgacaagcgtgggaaccgggacccggtcgttactaggcctggactcgggggagctgcagtccggcccggagtcgagctccagccccggggtgcatgtgagacagaccaaggaggcgccggccaagctggagtcccaggctgggcagcaggtgtcccgtggggcccgggatcgggtccgttccatgtcggggggccatggtcttcgagttggcgccctggacgtgccggcctcccagttcctgggcagtgccacttctccaggaccacggactgcaccagccgcgaaacctgagaaggcctcagctggcacccgggttcctgtgcaggagaagacgaacctggcggcctatgtgcccctgctgacccagggctgggcggagatcctggtccggaggcccacagggaacaccagctggctgatgagcctggagaacccgctcagccctttctcctcggacatcaacaacatgcccctgcaggagctgtctaacgccctcatggcggctgagcgcttcaaggagcaccgggacacagccctgtacaagtcactgtcggtgccggcagccagcacggccaaaccccctcctctgcctcgctccaacacagactccgccgtggtcatggaggagggaagtccgggcgaggttcctgtgctggtggagcccccagggttggaggacgttgaggcagcgctaggcatggacaggcgcacggatgcctacagcaggtcgtcctcagtctccagccaggaggagaagtcgctccacgcggaggagctggttggcaggggcatccccatcgagcgagtcgtctcctcggagggtggccggccctctgtggacctctccttccagccctcgcagcccctgagcaagtccagctcctctcccgagctgcagactctgcaggacatcctcggggaccctggggacaaggccgacgtgggccggctgagccctgaggttaaggcccggtcacagtcagggaccctggacggggaaagtgctgcctggtcggcctcgggcgaagacagtcggggccagcccgagggtcccttgccttccagctccccccgctcgcccagtggcctccggccccgaggttacaccatctccgactcggccccatcacgcaggggcaagagagtagagagggacgccttaaagagcagagccacagcctccaatgcagagaaagtgccaggcatcaaccccagtttcgtgttcctgcagctctaccattcccccttctttggcgacgagtcaaacaagccaatcctgctgcccaatgagtcacagtcctttgagcggtcggtgcagctcctcgaccagatcccatcatacgacacccacaagatcgccgtcctgtatgttggagaaggccagagcaacagcgagctcgccatcctgtccaatgagcatggctcctacaggtacacggagttcctgacgggcctgggccggctcatcgagctgaaggactgccagccggacaaggtgtacctgggaggcctggacgtgtgtggtgaggacggccagttcacctactgctggcacgatgacatcatgcaagccgtcttccacatcgccaccctgatgcccaccaaggacgtggacaagcaccgctgcgacaagaagcgccacctgggcaacgactttgtgtccattgtctacaatgactccggtgaggacttcaagcttggcaccatcaagggccagttcaactttgtccacgtgatcgtcaccccgctggactacgagtgcaacctggtgtccctgcagtgcaggaaagacatggagggccttgtggacaccagcgtggccaagatcgtgtctgaccgcaacctgcccttcgtggcccgccagatggccctgcacgcaaatatggcctcacaggtgcatcatagccgctccaaccccaccgatatctacccctccaagtggattgcccggctccgccacatcaagcggctccgccagcggatctgcgaggaagccgcctactccaaccccagcctacctctggtgcaccctccgtcccatagcaaagcccctgcacagactccagccgagcccacacctggctatgaggtgggccagcggaagcgcctcatctcctcggtggaggacttcaccgagtttgtgtgaggccggggccctccctcctgcactggccttggacggtattgcctgtcagtgaaataaataaagtcctgaccccagtgcacagacatagaggcacagattgcaaaaaaca

SEQ ID NO: 360708 - DNA, 2167 bp, Homo sapiens
caggaaatgctgctttgggacctcccaccctctctccttagcgtccccagctgtgggtctggcttggagttggagggtgagcctctgctcttgggagcagtctgtttgcaaacagggacttcccccacgtcacggagtctccgcagctctcctcggttacgagggctggtttcaggctcccgctcttttagagctgaggcccgtcgggcggagagcgtcttgcccctgcctacctggaggcacaggggtggctgctggtggacactagggtgggcagagccgattgcctgcccaacccccgggcactcatgcaggagaggcctgtgtcggggtcacgtgcaggccttcccagcgtcctccctgcccgctcggtggatggcagcagtaagcagagccctggggaggctcgcagggctgctgtccctctggtcaggagaaggctggttctcggaggccacgtcagggccagggcctggcccagccccaacatccagcagccccgtctgtgtcctcccagactccgccgtggtcatggaggagggaagtccgggcgaggttcctgtgctggtggagcccccagggttggaggacgttgaggcagcgctaggcatggacaggcgcacggatgcctacagcaggtcgtcctcagtctccagccaggaggagaagtcgctccacgcggaggagctggttggcaggggcatccccatcgagcgagtcgtctcctcggagggtggccggccctctgtggacctctccttccagccctcgcagcccctgagcaagtccagctcctctcccgagctgcagactctgcaggacatcctcggggaccctggggacaaggccgacgtgggccggctgagccctgaggttaaggcccggtcacagtcagggaccctggacggggaaagtgctgcctggtcggcctcgggcgaagacagtcggggccagcccgagggtcccttgccttccagctccccccgctcgcccagtggcctccggccccgaggttacaccatctccgactcggccccatcacgcaggggcaagagagtagagagggacgccttaaagagcagagccacagcctccaatgcagagaaagtgccaggcatcaaccccagtttcgtgttcctgcagctctaccattcccccttctttggcgacgagtcaaacaagccaatcctgctgcccaatgagtcacagtcctttgagcggtcggtgcagctcctcgaccagatcccatcatacgacacccacaagatcgccgtcctgtatgttggagaaggccagagcaacagcgagctcgccatcctgtccaatgagcatggctcctacaggtacacggagttcctgacgggcctgggccggctcatcgagctgaaggactgccagccggacaaggtgtacctgggaggcctggacgtgtgtggtgaggacggccagttcacctactgctggcacgatgacatcatgcaagccgtcttccacatcgccaccctgatgcccaccaaggacgtggacaagcaccgctgcgacaagaagcgccacctgggcaacgactttgtgtccattgtctacaatgactccggtgaggacttcaagcttggcaccatcaagggccagttcaactttgtccacgtgatcgtcaccccgctggactacgagtgcaacctggtgtccctgcagtgcaggaaagacatggagggccttgtggacaccagcgtggccaagatcgtgtctgaccgcaacctgcccttcgtggcccgccagatggccctgcacgcaaatatggcctcacaggtgcatcatagccgctccaaccccaccgatatctacccctccaagtggattgcccggctccgccacatcaagcggctccgccagcggatctgcgaggaagccgcctactccaaccccagcctacctctggtgcaccctccgtcccatagcaaagcccctgcacagactccagccgagcccacacctggctatgaggtgggccagcggaagcgcctcatctcctcggtggaggacttcaccgagtttgtgtgaggccggggccctccctcctgcactggccttggacggtattgcctgtcagtgaaataaataaagtcctgaccccagtgcacagacatagaggcacagattgcaaaaaaca

SEQ ID NO: 360709 - DNA, 5597 bp, Homo sapiens
cgttttcttgcttggggcgaaagggggcagcggagcggagcgcccgaaacccagcccctgcggaccgcaatctttgggaaaaaggcgcaaggtgggaacgcagggccgcacgtgggaaccgttcgcggctgccgggtttgcagcccctgcccgcgcagctgggagccgcaggaggcggcccgggactccagcctgcagcccctatcccgcctcctcccacgctccagccacggcgcggcgctacctgctgcagcctctcttctccggagaggcccgggctcctccctacacccccgcggcccagccccgggtcccaggctccggctccgggtcagcatcctcgcgctcaaggcggtcatgccggactcctgcggactacacatcccggcggcccatgcggccccgtcacgtgatgcaaggatcgccggcctttccgccagagggcggcacagaactacaactcccagcaagctcccaaggcggccctccgcgcaatgccgctaccggaagtgcgggtcgcgcttccggcggcgtcccggggccaggggggtgcgcctttctccgcgtcggggcggcccggagcgcggtggcgcggcgcgggaggggttttctggtgcgtcctggtccaccatggccaaaccaacaagcaaagattcaggcttgaaggagaagtttaagattctgttgggactgggaacaccgaggccaaatcccaggtctgcagagggtaaacagacggagtttatcatcaccgcggaaatactgagagaactgagcatggaatgtggcctcaacaatcgcatccggatgatagggcagatttgtgaagtcgcaaaaaccaagaaatttgaagagcacgcagtggaagcactctggaaggcggtcgcggatctgttgcagccggagcggccgctggaggcccggcacgcggtgctggctctgctgaaggccatcgtgcaggggcagggcgagcgtttgggggtcctcagagccctcttctttaaggtcatcaaggattacccttccaacgaagaccttcacgaaaggctggaggttttcaaggccctcacagacaatgggagacacatcacctacttggaggaagagctggctgactttgtcctgcagtggatggatgttggcttgtcctcggaattccttctggtgctggtgaacttggtcaaattcaatagctgttacctcgacgagtacatcgcaaggatggttcagatgatctgtctgctgtgcgtccggaccgcgtcctctgtggacatagaggtctccctgcaggtgctggacgccgtggtctgctacaactgcctgccggctgagagcctcccgctgttcatcgttaccctctgtcgcaccatcaacgtcaaggagctctgcgagccttgctggaagctgatgcggaacctccttggcacccacctgggccacagcgccatctacaacatgtgccacctcatggaggacagagcctacatggaggacgcgcccctgctgagaggagccgtgttttttgtgggcatggctctctggggagcccaccggctctattctctcaggaactcgccgacatctgtgtttccatcattttaccaggccatggcatgtccgaacgaggtggtgtcctatgagatcgtcctgtccatcaccaggctcatcaagaagtataggaaggagctccaggtggtggcgtgggacattctgctgaacatcatcgaacggctccttcaacagctccagaccttggacagcccggagctcaggaccatcgtccatgacctgttgaccacggtggaggagctgtgtgaccagaacgagttccacgggtctcaggagagatactttgaactggtggagagatgtgcggaccagaggcctgagtcctccctcctgaacctgatctcctatagagcgcagtccatccacccggccaaggacggctggattcagaacctgcaggcgctgatggagagattcttcaggagcgagtcccgaggcgccgtgcgcatcaaggtgctggacgtgctgtcctttgtgctgctcatcaacaggcagttctatgaggaggagctgattaactcagtggtcatctcgcagctctcccacatccccgaggataaagaccaccaggtccgaaagctggccacccagttgctggtggacctggcagagggctgccacacacaccacttcaacagcctgctggacatcatcgagaaggtgatggcccgctccctctccccacccccggagctggaagaaagggatgtggccgcatactcggcctccttggaggatgtgaagacagccgtcctggggcttctggtcatccttcagaccaagctgtacaccctgcctgcaagccacgccacgcgtgtgtatgagatgctggtcagccacattcagctccactacaagcacagctacaccctgccaatcgcgagcagcatccggctgcaggcctttgacttcctgttgctgctgcgggccgactcactgcaccgcctgggcctgcccaacaaggatggagtcgtgcggttcagcccctactgcgtctgcgactacatggagccagagagaggctctgagaagaagaccagcggccccctttctcctcccacagggcctcctggcccggcgcctgcaggccccgccgtgcggctggggtccgtgccctactccctgctcttccgcgtcctgctgcagtgcttgaagcaggagtctgactggaaggtgctgaagctggttctgggcaggctgcctgagtccctgcgctataaagtgctcatctttacttccccttgcagtgtggaccagctgtgctctgctctctgctccatgctttcaggcccaaagacactggagcggctccgaggcgccccagaaggcttctccagaactgacttgcacctggccgtggttccagtgctgacagcattaatctcttaccataactacctggacaaaaccaaacagcgcgagatggtctactgcctggagcagggcctcatccaccgctgtgccagccagtgcgtcgtggccttgtccatctgcagcgtggagatgcctgacatcatcatcaaggcgctgcctgttctggtggtgaagctcacgcacatctcagccacagccagcatggccgtcccactgctggagttcctgtccactctggccaggctgccgcacctctacaggaactttgccgcggagcagtatgccagtgtgttcgccatctccctgccgtacaccaacccctccaagtttaatcagtacatcgtgtgtctggcccatcacgtcatagccatgtggttcatcaggtgccgcctgcccttccggaaggattttgtccctttcatcactaagggcctgcggtccaatgtcctcttgtcttttgatgacacccccgagaaggacagcttcagggcccggagtactagtctcaacgagagacccaagagcaggatacagacgtccctcaccagtgccagcttggggtctgcagatgagaactccgtggcccaggctgacgatagcctgaaaaacctccacctggagctcacggaaacctgtctggacatgatggctcgatacgtcttctccaacttcacggctgtcccgaagaggtctcctgtgggcgagttcctcctagcgggtggcaggaccaaaacctggctggttgggaacaagcttgtcactgtgacgacaagcgtgggaaccgggacccggtcgttactaggcctggactcgggggagctgcagtccggcccggagtcgagctccagccccggggtgcatgtgagacagaccaaggaggcgccggccaagctggagtcccaggctgggcagcaggtgtcccgtggggcccgggatcgggtccgttccatgtcggggggccatggtcttcgagttggcgccctggacgtgccggcctcccagttcctgggcagtgccacttctccaggaccacggactgcaccagccgcgaaacctgagaaggcctcagctggcacccgggttcctgtgcaggagaagacgaacctggcggcctatgtgcccctgctgacccagggctgggcggagatcctggtccggaggcccacagggaacaccagctggctgatgagcctggagaacccgctcagccctttctcctcggacatcaacaacatgcccctgcaggagctgtctaacgccctcatggcggctgagcgcttcaaggagcaccgggacacagccctgtacaagtcactgtcggtgccggcagccagcacggccaaaccccctcctctgcctcgctccaacacagactccgccgtggtcatggaggagggaagtccgggcgaggttcctgtgctggtggagcccccagggttggaggacgttgaggcagcgctaggcatggacaggcgcacggatgcctacagcaggtcgtcctcagtctccagccaggaggagaagtcgctccacgcggaggagctggttggcaggggcatccccatcgagcgagtcgtctcctcggagggtggccggccctctgtggacctctccttccagccctcgcagcccctgagcaagtccagctcctctcccgagctgcagactctgcaggacatcctcggggaccctggggacaaggccgacgtgggccggctgagccctgaggttaaggcccggtcacagtcagggaccctggacggggaaagtgctgcctggtcggcctcgggcgaagacagtcggggccagcccgagggtcccttgccttccagctccccccgctcgcccagtggcctccggccccgaggttacaccatctccgactcggccccatcacgcaggggcaagagagtagagagggacgccttaaagagcagagccacagcctccaatgcagagaaagtgccaggcatcaaccccagtttcgtgttcctgcagctctaccattcccccttctttggcgacgagtcaaacaagccaatcctgctgcccaatgagtcacagtcctttgagcggtcggtgcagctcctcgaccagatcccatcatacgacacccacaagatcgccgtcctgtatgttggagaaggccagagcaacagcgagctcgccatcctgtccaatgagcatggctcctacaggtacacggagttcctgacgggcctgggccggctcatcgagctgaaggactgccagccggacaaggtgtacctgggaggcctggacgtgtgtggtgaggacggccagttcacctactgctggcacgatgacatcatgcaagccgtcttccacatcgccaccctgatgcccaccaaggacgtggacaagcaccgctgcgacaagaagcgccacctgggcaacgactttgtgtccattgtctacaatgactccggtgaggacttcaagcttggcaccatcaagggccagttcaactttgtccacgtgatcgtcaccccgctggactacgagtgcaacctggtgtccctgcagtgcaggaaagccctcctgcactggccttggacggtattgcctgtcagtgaaataaataaagtcctgaccccagtgcacagacatagaggcacagattgcaaaaaaca

SEQ ID NO: 360710 - DNA, 942 bp, Homo sapiens
agcatgaagtgctcattgagctctgtgccaggtgctgctctgagtgctggggaccccggtgcgagtgacagagcaacagcgagctcgccatcctgtccaatgagcatggctcctacaggtacacggagttcctgacgggcctgggccggctcatcgagctgaaggactgccagccggacaaggtgtacctgggaggcctggacgtgtgtggtgaggacggccagttcacctactgctggcacgatgacatcatgcaagccgtcttccacatcgccaccctgatgcccaccaaggacgtggacaagcaccgctgcgacaagaagcgccacctgggcaacgactttgtgtccattgtctacaatgactccggtgaggacttcaagcttggcaccatcaagggccagttcaactttgtccacgtgatcgtcaccccgctggactacgagtgcaacctggtgtccctgcagtgcaggaaagacatggagggccttgtggacaccagcgtggccaagatcgtgtctgaccgcaacctgcccttcgtggcccgccagatggccctgcacgcaaatatggcctcacaggtgcatcatagccgctccaaccccaccgatatctacccctccaagtggattgcccggctccgccacatcaagcggctccgccagcggatctgcgaggaagccgcctactccaaccccagcctacctctggtgcaccctccgtcccatagcaaagcccctgcacagactccagccgagcccacacctggctatgaggtgggccagcggaagcgcctcatctcctcggtggaggacttcaccgagtttgtgtgaggccggggccctccctcctgcactggccttggacggtattgcctgtcagtgaaataaataaagtcctgaccccagtgcacagacatagaggcacagattgcaaaaaaca

SEQ ID NO: 360711 - DNA, 3640 bp, Homo sapiens
cgttttcttgcttggggcgaaagggggcagcggagcggagcgcccgaaacccagcccctgcggaccgcaatctttgggaaaaaggcgcaaggtgggaacgcagggccgcacgtgggaaccgttcgcggctgccgggtttgcagcccctgcccgcgcagctgggagccgcaggaggcggcccgggactccagcctgcagcccctatcccgcctcctcccacgctccagccacggcgcggcgctacctgctgcagcctctcttctccggagaggcccgggctcctccctacacccccgcggcccagccccgggtcccaggctccggctccgggtcagcatcctcgcgctcaaggcggtcatgccggactcctgcggactacacatcccggcggcccatgcggccccgtcacgtgatgcaaggatcgccggcctttccgccagagggcggcacagaactacaactcccagcaagctcccaaggcggccctccgcgcaatgccgctaccggaagtgcgggtcgcgcttccggcggcgtcccggggccaggggggtgcgcctttctccgcgtcggggcggcccggagcgcggtggcgcggcgcgggaggggttttctggtgcgtcctggtccaccatggccaaaccaacaagcaaagattcaggcttgaaggagaagtttaagattctgttgggactgggaacaccgaggccaaatcccaggtctgcagagggtaaacagacggagtttatcatcaccgcggaaatactgagagaactgagcatggaatgtggcctcaacaatcgcatccggatgatagggcagatttgtgaagtcgcaaaaaccaagaaatttgaagagcacgcagtggaagcactctggaaggcggtcgcggatctgttgcagccggagcggccgctggaggcccggcacgcggtgctggctctgctgaaggccatcgtgcaggggcagggcgagcgtttgggggtcctcagagccctcttctttaaggtcatcaaggattacccttccaacgaagaccttcacgaaaggctggaggttttcaaggccctcacagacaatgggagacacatcacctacttggaggaagagctggctgactttgtcctgcagtggatggatgttggcttgtcctcggaattccttctggtgctggtgaacttggtcaaattcaatagctgttacctcgacgagtacatcgcaaggatggttcagatgatctgtctgctgtgcgtccggaccgcgtcctctgtggacatagaggtctccctgcaggtgctggacgccgtggtctgctacaactgcctgccggctgagagcctcccgctgttcatcgttaccctctgtcgcaccatcaacgtcaaggagctctgcgagccttgctggaagctgatgcggaacctccttggcacccacctgggccacagcgccatctacaacatgtgccacctcatggaggacagagcctacatggaggacgcgcccctgctgagaggagccgtgttttttgtgggcatggctctctggggagcccaccggctctattctctcaggaactcgccgacatctgtgtttccatcattttaccaggccatggcatgtccgaacgaggtggtgtcctatgagatcgtcctgtccatcaccaggctcatcaagaagtataggaaggagctccaggtggtggcgtgggacattctgctgaacatcatcgaacggctccttcaacagctccagaccttggacagcccggagctcaggaccatcgtccatgacctgttgaccacggtggaggagctgtgtgaccagaacgagttccacgggtctcaggagagatactttgaactggtggagagatgtgcggaccagaggcctgagtcctccctcctgaacctgatctcctatagagcgcagtccatccacccggccaaggacggctggattcagaacctgcaggcgctgatggagagattcttcaggagcgagtcccgaggcgccgtgcgcatcaaggtgctggacgtgctgtcctttgtgctgctcatcaacaggcagttctatgaggaggagctgattaactcagtggtcatctcgcagctctcccacatccccgaggataaagaccaccaggtccgaaagctggccacccagttgctggtggacctggcagagggctgccacacacaccacttcaacagcctgctggacatcatcgagaaggtgatggcccgctccctctccccacccccggagctggaagaaagggatgtggccgcatactcggcctccttggaggatgtgaagacagccgtcctggggcttctggtcatccttcagaccaagctgtacaccctgcctgcaagccacgccacgcgtgtgtatgagatgctggtcagccacattcagctccactacaagcacagctacaccctgccaatcgcgagcagcatccggctgcaggcctttgacttcctgttgctgctgcgggccgactcactgcaccgcctgggcctgcccaacaaggatggagtcgtgcggttcagcccctactgcgtctgcgactacatggagccagagagaggctctgagaagaagaccagcggccccctttctcctcccacagggcctcctggcccggcgcctgcaggccccgccgtgcggctggggtccgtgccctactccctgctcttccgcgtcctgctgcagtgcttgaagcaggagtctgactggaaggtgctgaagctggttctgggcaggctgcctgagtccctgcgctataaagtgctcatctttacttccccttgcagtgtggaccagctgtgctctgctctctgctccatgctttcaggcccaaagacactggagcggctccgaggcgccccagaaggcttctccagaactgacttgcacctggccgtggttccagtgctgacagcattaatctcttaccataactacctggacaaaaccaaacagcgcgagatggtctactgcctggagcagggcctcatccaccgctgtgccagccagtgcgtcgtggccttgtccatctgcagcgtggagatgcctgacatcatcatcaaggcgctgcctgttctggtggtgaagctcacgcacatctcagccacagccagcatggccgtcccactgctggagttcctgtccactctggccaggctgccgcacctctacaggaactttgccgcggagcagtatgccagtgtgttcgccatctccctgccgtacaccaacccctccaagtttaatcagtacatcgtgtgtctggcccatcacgtcatagccatgtggttcatcaggtgccgcctgcccttccggaaggattttgtccctttcatcactaagggcctgcggtccaatgtcctcttgtcttttgatgacacccccgagaaggacagcttcagggcccggagtactagtctcaacgagagacccaagaggtacggcctgcgggggtgtgcctggagtcggtgtggggtggggaaggacatggggctgtggcctgcctgacggtgcccctcctgcactggccttggacggtattgcctgtcagtgaaataaataaagtcctgaccccagtgcacagacatagaggcacagattgcaaaaaaca

SEQ ID NO: 360712 - DNA, 1918 bp, Homo sapiens
cgttttcttgcttggggcgaaagggggcagcggagcggagcgcccgaaacccagcccctgcggaccgcaatctttgggaaaaaggcgcaaggtgggaacgcagggccgcacgtgggaaccgttcgcggctgccgggtttgcagcccctgcccgcgcagctgggagccgcaggaggcggcccgggactccagcctgcagcccctatcccgcctcctcccacgctccagccacggcgcggcgctacctgctgcagcctctcttctccggagaggcccgggctcctccctacacccccgcggcccagccccgggtcccaggctccggctccgggtcagcatcctcgcgctcaaggcggtcatgccggactcctgcggactacacatcccggcggcccatgcggccccgtcacgtgatgcaaggatcgccggcctttccgccagagggcggcacagaactacaactcccagcaagctcccaaggcggccctccgcgcaatgccgctaccggaagtgcgggtcgcgcttccggcggcgtcccggggccaggggggtgcgcctttctccgcgtcggggcggcccggagcgcggtggcgcggcgcgggaggggttttctggtgcgtcctggtccaccatggccaaaccaacaagcaaagattcaggcttgaaggagaagtttaagattctgttgggactgggaacaccgaggccaaatcccaggtctgcagagggtaaacagacggagtttatcatcaccgcggaaatactgagagaactgagcatggaatgtggcctcaacaatcgcatccggatgatagggcagatttgtgaagtcgcaaaaaccaagaaatttgaagagcacgcagtggaagcactctggaaggcggtcgcggatctgttgcagccggagcggccgctggaggcccggcacgcggtgctggctctgctgaaggccatcgtgcaggggcaggtaaggcccagggcgacgctgggatgggtgacgtcaggctgcccactgactgtcctgtccctgctgggccgtgtttggactcctgcctcgggcgagcgtttgggggtcctcagagccctcttctttaaggtcatcaaggattacccttccaacgaagaccttcacgaaaggctggaggttttcaaggccctcacagacaatgggagacacatcacctacttggaggaagagctgggtgggtgccaccttgggttggaggtttctctggccttgacgatcaagtgtaacctggatgggaaggacctggggctggggaggggctgccgttctcagggatggcctgcagcgggtatgcccaccctgcttcatgcacctgggctcacctgcgtggccggagtgcccctgaggcacgtgttaaaaatgcagagtcctggccttcaccccagacctgctgactgtgagtctctggggcttggggcctccgaacacctctgcaacggcaggagctgggcgagttctgtcactgggaggtggtgctgctgacttggtctcaaccggagcgtactggtcccgtcttcctcctcctttctccactttgtggaccttcctcctgccatcctgtggtgggaggtttccattagtcttgggtctctgtgtcatgattctgggaagtagagaaagaggaggaagagatcggtctgactctggctttgctgttctgtcgcccagaaaagggcctcagtggctgggctgcctgcaggacaggtgccggccaggtgcctaccgtcaggtttcctgtctgaggtgacgtggccggcagccaagtgtgcacacgtctcctccgagccgctctctgctgggggtggggaacgcccaggagtctggtgatgtcggcgtctcccagcctcgggttgggccctgagtgtacggcatacacacttctgctgccgcc

SEQ ID NO: 360713 - DNA, 571 bp, Homo sapiens
tccctcctgaacctgatctcctatagagcgcagtccatccacccggccaaggacggctggattcagaacctgcaggcgctgatggagagattcttcaggtagggggtcctctgtagccttgcctggcacctggagcctggccctgtctctgtctggggcccacccgggctgggtctcaggatgcccgatgagcagggccctcccctctgcctctggagagccctggctctgggtgagcaggtgctagcttgctttccagtccagcaggacaggtcctctcatgacgccactgggctccctcttttcgggggtcgtctggagagatgctccctgggaagcagagctctgtgccctgtgtgcctggccgcgggaggacccagagtcgggctggcctgcgccaggcagacgggctggtgtggggctgtggccgggcactccccacccgccccagcaggctgccgtcccgcaggagcgagtcccgaggcgccgtgcgcatcaaggtgctggacgtgctgtcctttgtgctgctcatcaacaggcagttctatgaggtgcgtgtccaggcggccgc

SEQ ID NO: 360714 - DNA, 858 bp, Homo sapiens
gtcactgggtgcctgccagtagaaaatatttccaagtgtttaggtcagtgtgactccccttatgatcctgaaaattggagaaaatgcagttaacaccaatggggtaaatgccttctgatgtggtcatgagaactggtggtgggcatgagacctacagagaggttatctaacattgtgcttttcccccagtaggtgctttatagcttttagtggcagtgttttgcaaaatgagttatgacaattccataggatttttgtattgttttgtttttttgcttgtaataaggctagatcaatttttaaagacttatgttttcagcccctatagaaatgtgaatggttaaaatcttttaggacatatataccatttgtttttcatatactcagttttagtttattttaaattttaaaaagcataaggaaccagcattctaatcacacacacacacaaaaagcatacctatttaattgagtctgaacagtacttctcaggagtttgtcaaatgttgaggctgctgttatataaggcagtaacaacagattgtttgtacttgccctctccaaaacgggttgcgcaaactatggctattttgtaagaaaaaaaaaaaacaaaaaaaaacaaaaacaaaaaaaccttttatcagaatacagccctgggcatttctgggatgtttacacgtgtaactgctttcttcctccagcagcacagtagtaacatgtggcctgcacagcccatacttactgactacctggccctttacagaaaaagttggctgattacttcccttcaataatgacattatgcctttacataaaaataatgaggctccctatttcctttgagtgtgattctggcta

SEQ ID NO: 360715 - DNA, 1109 bp, Homo sapiens
cagctctcccggtatctggggctttgagcgtcccgggttgggcagggaactggcagcatagctcctaggatgcgagggccatttgtctccggccgggggtcagatcctcgggaagccgagccatcccatccagccgcttgccccaaaccgggcgcaggccgtggtcacttctctaggaagctccgaagatcccgccactccgtccctcaaaggtgcggaaagccggcttcccccagccctcggagaagattcctgactctccgctcggtcggggcatctgagggcaggagctgcgccaggcgtaccggatagaccagtggacaacacccacgccggaccgcctgtcccctacccggacccagactcggcgccgcacattgccccgggggggcccggcgcagtcacgcgcgcgcagagctcacgctctccgccccgcacacctgcgctccgccccctggtcctgggcccgcgacgggtgaaggcatttgggaagccagggcggctgcggaggcgatctccctgacccagggccggagttgcccggagcctgccaccgctctcagccagcccgcatccttctctgttcttccctccccccgcctgccacggcgcgggtatccgcagccacagcccggggccggtgaggcggcgaagggggaggggaggaatcaagggatgagcgccggaagggcgtcgggggccctgagccgcactaggacgcccctggagccggaaccccagcagaagccggaaccagaaccaaatcaccgctgaggacgatgacatgaatgaggacacagtagagaggattgttcgctgcatcatccagaatgaagccaatgctgaggccttgaaggagatgctgggggacagtgaaggagaagggacagtgcagctgtcagtgtggatgccacctccagcctgcaggacggagccccctcccatcatcacacagtgcacctgggctctgcagccccttgcatccattgcagccgcagcaagaggcctccacttgtccgtcagggacgctccaaggaaggaaaaagccgcccccggacaggggagaccactgtgttctctgtgggcaggtggggcaggtgctccaggga

SEQ ID NO: 360716 - DNA, 2131 bp, Homo sapiens
cagctctcccggtatctggggctttgagcgtcccgggttgggcagggaactggcagcatagctcctaggatgcgagggccatttgtctccggccgggggtcagatcctcgggaagccgagccatcccatccagccgcttgccccaaaccgggcgcaggccgtggtcacttctctaggaagctccgaagatcccgccactccgtccctcaaaggtgcggaaagccggcttcccccagccctcggagaagattcctgactctccgctcggtcggggcatctgagggcaggagctgcgccaggcgtaccggatagaccagtggacaacacccacgccggaccgcctgtcccctacccggacccagactcggcgccgcacattgccccgggggggcccggcgcagtcacgcgcgcgcagagctcacgctctccgccccgcacacctgcgctccgccccctggtcctgggcccgcgacgggtgaaggcatttgggaagccagggcggctgcggaggcgatctccctgacccagggccggagttgcccggagcctgccaccgctctcagccagcccgcatccttctctgttcttccctccccccgcctgccacggcgcgggtatccgcagccacagcccggggccggtgaggcggcgaagggggaggggaggaatcaagggatgagcgccggaagggcgtcgggggccctgagccgcactaggacgcccctggagccggaaccccagcagaagccggaaccagaaccaaatcaccgctgcagccccctaaacccaggaggcgccctggcccgcgctcgccccccagggcctcatgtcggaaccacagcctgacctggaaccgccccaacatgggctatatatgctcttcctgcttgtgctggtcttcttcctcatgggcctggtaggcttcatgatctgccacgtgctcaagaagaagggctaccgctgccgcacgtcgaggggctctgagcctgacgatgcccagcttcagccccctgaggacgatgacatgaatgaggacacagtagagaggattgttcgctgcatcatccagaatgaagccaatgctgaggccttgaaggagatgctgggggacagtgaaggagaagggacagtgcagctgtcagtgtggatgccacctccagcctgcaggacggagccccctcccatcatcacacagtgcacctgggctctgcagccccttgcatccattgcagccgcagcaagaggcctccacttgtccgtcagggacgctccaaggaaggaaaaagccgcccccggacaggggagaccactgtgttctctgtgggcaggttccgggtgacacacattgagaagcgctatggactgcacgaacaccgtgatggctcccccacagacaggagctggggctctggtgggggacaggacccaggggtggtcaggggtctgggggagggcagcccaaggcagggatgcctgccatggagaggctgccccctgagaggccacagccccaggtcctagccagccccccagtacagaatggaggactcagggacagcagcctaacccctcgtgcacttgaagggaaccccagagcttctgcagagccaacactgagggccggagggaggggcccaagcccagggctgcccactcaagaggcaaatgggcagccaagcaaaccagacacttctgatcaccaggtgtctctaccacagggagcagggagtatgtgagtctccttcattgtgctgatggactaccagctggcagggccagggggtgggtgggcgtgaaagccctcccctccactggacagcactgccccccagctgagggaccagctctacttccacctggagttgcacagtctcaggctgggggcctcaggagaggtcacagcccctcagtctcttctccttcccctgcctgcaacaggctgcctgccccgccttccccaacacctcgctccatatgatagagcgtggcagctgggagcaggcccctgcccgtggtgggcccctaaagcaatagcaccgtaggccccctgccctcttagcacaagaggcccaggccctggcctggccttcgtgccctttattcattgtcaataaatccgctcagaccatta

SEQ ID NO: 360717 - DNA, 1456 bp, Homo sapiens
cagctctcccggtatctggggctttgagcgtcccgggttgggcagggaactggcagcatagctcctaggatgcgagggccatttgtctccggccgggggtcagatcctcgggaagccgagccatcccatccagccgcttgccccaaaccgggcgcaggccgtggtcacttctctaggaagctccgaagatcccgccactccgtccctcaaaggtgcggaaagccggcttcccccagccctcggagaagattcctgactctccgctcggtcggggcatctgagggcaggagctgcgccaggcgtaccggatagaccagtggacaacacccacgccggaccgcctgtcccctacccggacccagactcggcgccgcacattgccccgggggggcccggcgcagtcacgcgcgcgcagagctcacgctctccgccccgcacacctgcgctccgccccctggtcctgggcccgcgacgggtgaaggcatttgggaagccagggcggctgcggaggcgatctccctgacccagggccggagttgcccggagcctgccaccgctctcagccagcccgcatccttctctgttcttccctccccccgcctgccacggcgcgggtatccgcagccacagcccggggccggtgaggcggcgaagggggaggggaggaatcaagggatgagcgccggaagggcgtcgggggccctgagccgcactaggacgcccctggagccggaaccccagcagaagccggaaccagaaccaaatcaccgctgcagccccctaaacccaggaggcgccctggcccgcgctcgccccccagggcctcatgtcggaaccacagcctgacctggaaccgccccaacatgggctatatatgctcttcctgcttgtgctggtcttcttcctcatgggcctggtaggcttcatgatctgccacgtgctcaagaagaagggctaccgctgccgcacgtcgaggggctctgagcctgacgatgcccagcttcagccccctgaggacgatgacatgaatgaggacacagtagagaggattgttcgctgcatcatccagaatgaagccaatgctgaggccttgaaggagatgctgggggacagtgaaggagaagggacagtgcagctgtcagagcactgccccccagctgagggaccagctctacttccacctggagttgcacagtctcaggctgggggcctcaggagaggtcacagcccctcagtctcttctccttcccctgcctgcaacaggctgcctgccccgccttccccaacacctcgctccatatgatagagcgtggcagctgggagcaggcccctgcccgtggtgggcccctaaagcaatagcaccgtaggccccctgccctcttagcacaagaggcccaggccctggcctggccttcgtgccctttattcattgtcaataaatccgctcagaccatta

SEQ ID NO: 360718 - DNA, 2530 bp, Homo sapiens
cagctctcccggtatctggggctttgagcgtcccgggttgggcagggaactggcagcatagctcctaggatgcgagggccatttgtctccggccgggggtcagatcctcgggaagccgagccatcccatccagccgcttgccccaaaccgggcgcaggccgtggtcacttctctaggaagctccgaagatcccgccactccgtccctcaaaggtgcggaaagccggcttcccccagccctcggagaagattcctgactctccgctcggtcggggcatctgagggcaggagctgcgccaggcgtaccggatagaccagtggacaacacccacgccggaccgcctgtcccctacccggacccagactcggcgccgcacattgccccgggggggcccggcgcagtcacgcgcgcgcagagctcacgctctccgccccgcacacctgcgctccgccccctggtcctgggcccgcgacgggtgaaggcatttgggaagccagggcggctgcggaggcgatctccctgacccagggccggagttgcccggagcctgccaccgctctcagccagcccgcatccttctctgttcttccctccccccgcctgccacggcgcgggtatccgcagccacagcccggggccggtgaggcggcgaagggggaggggaggaatcaagggatgagcgccggaagggcgtcgggggccctgagccgcactaggacgcccctggagccggaaccccagcagaagccggaaccagaaccaaatcaccgctgcagccccctaaacccaggaggcgccctggcccgcgctcgccccccagggcctcatgtcggaaccacagcctgacctggaaccgccccaacatgggctatatatgctcttcctgcttgtgctggtcttcttcctcatgggcctggtaggcttcatgatctgccacgtgctcaagaagaagggctaccgctgccgcacgtcgaggggctctgagcctgacgatgcccagcttcagccccctgaggacgatgacatgaatgaggacacagtagagaggattgttcgctgcatcatccagaatgaagccaatgctgaggccttgaaggagatgctgggggacagtgaaggagaagggacagtgcagctgtcagtgtggatgccacctccagcctgcaggacggagccccctcccatcatcacacagtgcacctgggctctgcagccccttgcatccattgcagccgcagcaagaggcctccacttgtccgtcagggacgctccaaggaaggaaaaagccgcccccggacaggggagaccactgtgttctctgtgggcaggttccgggtgacacacattgagaagcgctatggactgcacgaacaccgtgatggctcccccacagacaggagctggggctctggtgggggacaggacccaggggtggtcaggggtctgggggagggcagcccaaggcagggatgcctgccatggagaggctgccccctgagaggccacagccccaggtcctagccagccccccagtacagaatggaggactcagggacagcagcctaacccctcgtgcacttgaagggaaccccagagcttctgcagagccaacactgagggccggagggaggggcccaagcccagggctgcccactcaagaggcaaatgggcagccaagcaaaccagacacttctgatcaccaggtgtctctaccacagggagcagggagtatgtgagtctccttcattgtgctgatggactaccagctggcagggccagggggtgggtgggcgtgaaagccctcccctccactggacagcactgccccccagctgagggaccagctctacttccacctggagttgcacagtctcaggctgggggcctcaggagaggtcacagcccctcagtctcttctccttcccctgcctgcaacaggctgcctgccccgccttccccaacacctcgctccatatgatagagcgtggcagctgggagcaggcccctgcccgtggtgggcccctaaagcaatagcaccgtaggccccctgccctcttagcacaagaggcccaggccctggcctggccttcgtgccctttattcattgtcaataaatccgctcagaccattaaaaaaaaaaaaaaaaaaaaaaaaaaaaaaaaaaaaaagggggggcgcgccaagaaagtttccccgcagagggggcccccaggtttaaaggcgcttccccgaggttttgttgtgtgcacaagggtggccccctaatggggcgaccgggatattaagaagcctgaggacagctggcacgagacgttataaaccggtctcgtcgatcgctgaggaacacacgctgcgcctactcgggaggacacctgctggggaagaggagacacccctttaccaccgcggggggggtgcgcaccatcatgtggcgaccacaaatccttccctcagcgagagaattttaaaagaggcccaagagggcgacactattcacactctctccagacgcgtctaaaacaacgggcgc

SEQ ID NO: 360719 - DNA, 722 bp, Homo sapiens
cgcgacgggtgaaggcatttgggaagccagggcggctgcggaggcgatctccctgacccagggccggagttgcccggagcctgccaccgctctcagccagcccgcatccttctctgttcttccctccccccgcctgccacggcgcgggtatccgcagccacagcccggggccggtgaggcggcgaagggggaggggaggaatcaagggatgagcgccggaagggcgtcgggggccctgagccgcactaggacgcccctggagccggaaccccagcagaagccggaaccagaaccaaatcaccggggtcggccaggtggtcagggtgggagaaaccaaaaagggagaggggtgcgggagtactgagaggaaggggctgcagaggcctggctcaggccggcgtggaggaggtgcgggcgctgactcaggcaggatttctgctcccgccgcctaagaatgccgtcccatctcgtgctgcagtgtccttgggagggacagaagcgcgaacaagctggaaaggggaacgctcggggcgtcggggaagcgggaccagggtcgtggtagagagcttgcgttgccgctgacctcttgccgaaaggcgaaacagcactcctggcccggacagctccctggttgggtagggggtggggccggacctcagccggacgtcttagacgtgcttgtttcagatcctgaggacggcattcctacccctcccccattc

SEQ ID NO: 360720 - DNA, 1949 bp, Homo sapiens
agccagggtagagactgagtcggcgcctggcgggtgttgtgacgcgcaaaccaggggcgggttctaagcggcgacgcgcgggtgctgggaggccttagaacgccgtggcgtgccgcaggacgcgacggctgcagaacatccgccgcaccgctgggggccaacgttgtcggaccgaggagtccgaggtggcgactgagtgagatacccagctgtgcggagctaggacgcggaacatcccagaggccagcatcaacatgtttccatccttggggaatgaccacgcaactgggcccagccctggtgctgggggtggccctgtgcctgggttgtggccagcccctaccacaggtccctgaacgccccttctctgtgctgtggaatgtaccctcagcacactgtgaggcccgctttggtgtgcacctgccactcaatgctctgggcatcatagccaaccgtggccagcattttcacggtcagaacatgaccattttctacaagaaccaactcggcctctatccctactttggacccaggggcacagctcacaatgggggcatcccccaggctttgccccttgaccgccacctggcactggctgcctaccagatccaccacagcctgagacctggctttgctggcccagcagtgctggattgggaggagtggtgtccactctgggctgggaactggggccgccgccgagcttatcaggcagcctcttgggcttgggcacagcaggtattccctgacctggaccctcaggagcagctctacaaggcctatactggctttgagcaggcggcccgtgcactgatggaggatacgctgcgggtggcccaggcactacggccccatggactctggggcttctatcactacccagcctgtggcaatggctggcatagtatggcttccaactataccggccgctgccatgcagccacccttgcccgcaacactcaactgcattggctctgggccgcctccagtgccctcttccccagcatctacctcccacccaggctgccacctgcccaccaccaggcctttgtccgacatcgcctggaggaggccttccgtgtggcccttgttgggcaccgacatcccctgcctgtcctggcctatgtccgcctcacacaccggagatctgggaggttcctgtcccaggatgaccttgtgcagtccattggtgtgagtgcagcactaggggcagccggcgtggtgctctggggggacctgagcctctccagctctgaggaggagtgctggcatctccatgactacctggtggacaccttgggcccctatgtgatcaatgtgaccagggcagcgatggcctgcagtcaccagcggtgccatggccacgggcgctgtgcccggcgagatccaggacagatggaagcctttctacacctgtggccagacggcagccttggagattggaagtccttcagctgccactgttactggggctgggctggccccacctgccaggagcccaggcctgggcctaaagaagcagtataaagccagggcccctgccactgcctcttcttttccctgctgccacttttccagtcctggaactactctgtcccactcttgctctattcagtttacagtcaaccctcccaagcacacaccccgcttcccttggaatccctgaggggtagaaggggccagaaaaaacgcttataaaaccagaggccctctgagatcatgtgagtcctccatggcaaggaagcagttccagggagagtcaggttccagctagttagggctgccagcctagggctttgtgcctacacctcactaagcccatggagaggtcacagatgggccgtgcacgggcagatgggccccaaaaaatcttggcgaaggtcggtaaagtgctaagctgttgtctgcactctttcatcataaagtcacttttttccactgaaagaggt

SEQ ID NO: 360721 - DNA, 1919 bp, Homo sapiens
agccagggtagagactgagtcggcgcctggcgggtgttgtgacgcgcaaaccaggggcgggttctaagcggcgacgcgcgggtgctgggaggccttagaacgccgtggcgtgccgcaggacgcgacggctgcagaacatccgccgcaccgctgggggccaacgttgtcggaccgaggagtccgaggtggcgactgagtgagatacccagctgtgcggagctaggacgcggaacatcccagaggccagcatcaacatgtcagtaccgcacccttcccatttgctgcctgtaggtccaccccgcgcgtgcggtccccaagtggccatgccaccctgcacgccctccccgcgtcagtcgttcgtttccagaccatgccgagccacacctgcccacagagtcgagctctcgaagtcctcattcccaaaagctccacagcctgtgacccactaggagggagggggaaaccgaggcccgggagagacggagaagccactctctgaggaccccggagccccgcccacagtgggtggggtcggcactgaaggggttaaggccgcggggaagccccgggctcagccctaggggcggatcctggggcttcctccctctagaccaaagggtgcggctgctgcagaggtggctgatgcaggaggagagccactgtggtctgaagagatgctactgcctggagactggggtcttaacctccagcctggcactgagccacctgcaacctagcagcaggtgaccttggctcccagcctgactcagctgaacctggatcctgtgcataggcaagagctgactctgagccctggcccagccaagctgacccctacactagaccctacacaccggatggagctgatcctgagtaccagcccagctgagctgactctggatcctgcgtgccagccaaagctgcccctggattccacatgccaaccagagatgaccttcaatcctggtccaactgagcttaccctggatcctgaacaccagccagaggagaccccagctcctagcctggctgagttgaccctggagcctgtgcaccgccgacccgagctcctggatgcttgtgctgacctcatcaatgatcagtggccccgcagccgcacctcccgcctgcactccctgggccagtcctcagatgccttccccctctgcctgatgctgctaagcccccaccccacacttgaagcagcacccgttgtggtgggccatgcccgcctgtcacgggtgctgaaccagccccagagcctcttagtggagacagtggtggtggcccgggccctgaggggccgtggctttggccgccgcctcatggagggcctggaggtctttgctcgggcccggggcttccgcaagctgcatctcaccacccatgaccaggtgcacttctatacccacctgggctaccagctgggtgagcctgtgcagggcctggtcttcaccagcagacggctgcctgccaccctgcttaatgccttccccacagccccctctccccggccacccaggaaggccccaaacctgactgcccaagctgccccaaggggtcccaagggacctccattgccaccaccccctcccctacctgagtgcctgaccatctcacccccagttccatcagggcccccttcaaaaagcctgctggagacacaatatcaaaatgtgagggggcgccccatattctggatggaaaaagacatctgaggccatccagggcaaggaactgtctttctggttcaatagactgccccgacagtctacaagcctcagcccactgaccatacctcagcccctagcccctggggggcagctttaacctgggcatgtttcctgggtaccagtggggccaggaggtggctctggctcagagccgtcagtgtggctgaataaaggctctcttgggta

SEQ ID NO: 360722 - DNA, 1527 bp, Homo sapiens
agccagggtagagactgagtcggcgcctggcgggtgttgtgacgcgcaaaccaggggcgggttctaagcggcgacgcgcgggtgctgggaggccttagaacgccgtggcgtgccgcaggacgcgacggctgcagaacatccgccgcaccgctgggggccaacgttgtcggaccgaggagtccgaggtggcgactgagtgagatacccagctgtgcggagctaggacgcggaacatcccagaggccagcatcaacatgaggagagccactgtggtctgaagagatgctactgcctggagactggggtcttaacctccagcctggcactgagccacctgcaacctagcagcaggtgaccttggctcccagcctgactcagctgaacctggatcctgtgcataggcaagagctgactctgagccctggcccagccaagctgacccctacactagaccctacacaccggatggagctgatcctgagtaccagcccagctgagctgactctggatcctgcgtgccagccaaagctgcccctggattccacatgccaaccagagatgaccttcaatcctggtccaactgagcttaccctggatcctgaacaccagccagaggagaccccagctcctagcctggctgagttgaccctggagcctgtgcaccgccgacccgagctcctggatgcttgtgctgacctcatcaatgatcagtggccccgcagccgcacctcccgcctgcactccctgggccagtcctcagatgccttccccctctgcctgatgctgctaagcccccaccccacacttgaagcagcacccgttgtggtgggccatgcccgcctgtcacgggtgctgaaccagccccagagcctcttagtggagacagtggtggtggcccgggccctgaggggccgtggctttggccgccgcctcatggagggcctggaggtctttgctcgggcccggggcttccgcaagctgcatctcaccacccatgaccaggtgcacttctatacccacctgggctaccagctgggtgagcctgtgcagggcctggtcttcaccagcagacggctgcctgccaccctgcttaatgccttccccacagccccctctccccggccacccaggaaggccccaaacctgactgcccaagctgccccaaggggtcccaagggacctccattgccaccaccccctcccctacctgagtgcctgaccatctcacccccagttccatcagggcccccttcaaaaagcctgctggagacacaatatcaaaatgtgagggggcgccccatattctggatggaaaaagacatctgaggccatccagggcaaggaactgtctttctggttcaatagactgccccgacagtctacaagcctcagcccactgaccatacctcagcccctagcccctggggggcagctttaacctgggcatgtttcctgggtaccagtggggccaggaggtggctctggctcagagccgtcagtgtggctgaataaaggctctcttgggta

SEQ ID NO: 360723 - DNA, 1897 bp, Homo sapiens
agccagggtagagactgagtcggcgcctggcgggtgttgtgacgcgcaaaccaggggcgggttctaagcggcgacgcgcgggtgctgggaggccttagaacgccgtggcgtgccgcaggacgcgacggctgcagaacatccgccgcaccgctgggggccaacgttgtcggaccgaggagtccgaggtggcgactgagtgagatacccagctgtgcggagctaggacgcggaacatcccagaggccagcatcaacatgaggagagccactgtggtctgaagagatgctactgcctggagactggggtcttaacctccagcctggcactgagccacctgcaacctagcagcaggtgaccttggctcccagcctgactcagctgaacctggatcctgtgcataggcaagagctgactctgagccctggcccagccaagctgacccctacactagaccctacacaccggatggagctgatcctgagtaccagcccagctgagctgactctggatcctgcgtgccagccaaagctgcccctggattccacatgccaaccagagatgaccttcaatcctggtccaactgagcttaccctggatcctgaacaccagccagaggagaccccagctcctagcctggctgagttgaccctggagcctgtgcaccgccgacccgagctcctggatgcttgtgctgacctcatcaatgatcagtggccccgcagccgcacctcccgcctgcactccctgggccagtcctcagatgccttccccctctgcctgatgctgctaagcccccaccccacacttgaagcagcacccgttgtggtgggccatgcccgcctgtcacgggtgctgaaccagccccagagcctcttagtggagacagtggtggtggcccgggccctgaggggccgtggctttggccgccgcctcatggagggcctggaggtctttgctcgggcccggggcttccgcaagctgcatctcaccacccatgaccaggtgcacttctatacccacctgggctaccagctgggtgagcctgtgcagggcctggtcttcaccagcagacggctgcctgccaccctgcttaatgccttccccacagccccctctccccggccacccaggaaggccccaaacctgactgcccaagctgccccaaggggtcccaagggacctccattgccaccaccccctcccctacctgagtgcctgaccatctcacccccagttccatcagggcccccttcaaaaagcctgctggagacacaatatcaaaatgtgagggggcgccccatattctggatggaaaaagacatctgaggccatccagggcaaggaactgtctttctggttcaatagactgccccgacagtctacaagcctcagcccactgaccatacctcagcccctagcccctggggggcagctttaacctgggcatgtttcctgggtaccagtggggccaggaggtggctctggctcagagccgtcagtgtggctgaataaaggctctcttgggtaaaaaaaaaaaaaaaaaaaaaaaaaaaaaaaaaaaaaaaaaaaaaaaaaaaaacaaaaaaaaacaaaacacaaaaagggggggggcgcaaaaaaaaaccctgggggggggcccgagtattaactacgcaccaattgtttattgataaagaggtggtgctctaaaaatagagggtataatataaacgaagagagggggcgtgcagtaaaacacgcgtggtggagagacaacgagggcaggtggcactatgtgcgagaaggaccttttggtgggtggggacattggggaaccacctcagaaaataaggtcggggaaataaatcgagtatttgtggtaacgaatatgttcgggaatgccgactatatcagaatc

SEQ ID NO: 360724 - DNA, 1827 bp, Homo sapiens
agccagggtagagactgagtcggcgcctggcgggtgttgtgacgcgcaaaccaggggcgggttctaagcggcgacgcgcgggtgctgggaggccttagaacgccgtggcgtgccgcaggacgcgacggctgcagaacatccgccgcaccgctgggggccaacgttgtcggaccgaggagtccgaggtggcgactgagtgagatacccagctgtgcggagctaggacgcggaacatcccagaggccagcatcaacatgtttccatccttggggaatgaccacgcaactgggcccagccctggtgctgggggtggccctgtgcctgggttgtggccagcccctaccacaggtccctgaacgccccttctctgtgctgtggaatgtaccctcagcacactgtgaggcccgctttggtgtgcacctgccactcaatgctctgggcatcatagccaaccgtggccagcattttcacggtcagaacatgaccattttctacaagaaccaactcggcctctatccctactttggacccaggggcacagctcacaatgggggcatcccccaggctttgccccttgaccgccacctggcactggctgcctaccagatccaccacagcctgagacctggctttgctggcccagcagtgctggattgggaggagtggtgtccactctgggctgggaactggggccgccgccgagcttatcaggcagcctcttgggcttgggcacagcaggtattccctgacctggaccctcaggagcagctctacaaggcctatactggctttgagcaggcggcccgtgcactgatggaggatacgctgcgggtggcccaggcactacggccccatggactctggggcttctatcactacccagcctgtggcaatggctggcatagtatggcttccaactataccggccgctgccatgcagccacccttgcccgcaacactcaactgcattggctctgggccgcctccagtgccctcttccccagcatctacctcccacccaggctgccacctgcccaccaccaggcctttgtccgacatcgcctggaggaggccttccgtgtggcccttgttgggcaccgacatcccctgcctgtcctggcctatgtccgcctcacacaccggagatctgggaggttcctgtcccaggatgaccttgtgcagtccattggtgtgagtgcagcactaggggcagccggcgtggtgctctggggggacctgagcctctccagctctgaggaggagtgctggcatctccatgactacctggtggacaccttgggcccctatgtgatcaatgtgaccagggcagcgatggcctgcagtcaccagcggtgccatggccacgggcgctgtgcccggcgagatccaggacagatggaagcctttctacacctgtggccagacggcagccttggagattggaagtccttcagctgccactgttactggggctgggctggccccacctgccaggagcccaggcctgggcctaaagaagcagtataaagccagggcccctgccactgcctcttcttttccctgctgccacttttccagtcctggaactactctgtcccactcttgctctattcagtttacagtcaaccctcccaagcacacaccccgcttcccttggaatccctgaggggtagaaggggccagaaaaaacgcttataaaaccagaggtcacagatgggccgtgcacgggcagatgggccccaaaaaatcttggcgaaggtcggtaaagtgctaagctgttgtctgcactctttcatcataaagtcacttttttccactgaaagaggt

SEQ ID NO: 360725 - DNA, 2251 bp, Homo sapiens
agccagggtagagactgagtcggcgcctggcgggtgttgtgacgcgcaaaccaggggcgggttctaagcggcgacgcgcgggtgctgggaggccttagaacgccgtggcgtgccgcaggacgcgacggctgcagaacatccgccgcaccgctgggggccaacgttgtcggaccgaggagtccgaggtggcgactgagtgagatacccagctgtgcggagctaggacgcggaacatcccagaggccagcatcaacatgtcagtaccgcacccttcccatttgctgcctgtaggtccaccccgcgcgtgcggtccccaagtggccatgccaccctgcacgccctccccgcgtcagtcgttcgtttccagaccatgccgagccacacctgcccacagagtcgagctctcgaagtcctcattcccaaaagctccacagcctgtgacccactaggagggagggggaaaccgaggcccgggagagacggagaagccactctctgaggaccccggagccccgcccacagtgggtggggtcggcactgaaggggttaaggccgcggggaagccccgggctcagccctaggggcggatcctggggcttcctccctctagaccaaagggtgcggctgctgcagaggtggctgatgcaggtttccatccttggggaatgaccacgcaactgggcccagccctggtgctgggggtggccctgtgcctgggttgtggccagcccctaccacaggtccctgaacgccccttctctgtgctgtggaatgtaccctcagcacactgtgaggcccgctttggtgtgcacctgccactcaatgctctgggcatcatagccaaccgtggccagcattttcacggtcagaacatgaccattttctacaagaaccaactcggcctctatccctactttggacccaggggcacagctcacaatgggggcatcccccaggctttgccccttgaccgccacctggcactggctgcctaccagatccaccacagcctgagacctggctttgctggcccagcagtgctggattgggaggagtggtgtccactctgggctgggaactggggccgccgccgagcttatcaggcagcctcttgggcttgggcacagcaggtattccctgacctggaccctcaggagcagctctacaaggcctatactggctttgagcaggcggcccgtgcactgatggaggatacgctgcgggtggcccaggcactacggccccatggactctggggcttctatcactacccagcctgtggcaatggctggcatagtatggcttccaactataccggccgctgccatgcagccacccttgcccgcaacactcaactgcattggctctgggccgcctccagtgccctcttccccagcatctacctcccacccaggctgccacctgcccaccaccaggcctttgtccgacatcgcctggaggaggccttccgtgtggcccttgttgggcaccgacatcccctgcctgtcctggcctatgtccgcctcacacaccggagatctgggaggttcctgtcccaggaggagtgctggcatctccatgactacctggtggacaccttgggcccctatgtgatcaatgtgaccagggcagcgatggcctgcagtcaccagcggtgccatggccacgggcgctgtgcccggcgagatccaggacagatggaagcctttctacacctgtggccagacggcagccttggagattggaagtccttcagctgccactgttactggggctgggctggccccacctgccaggagcccaggcctgggcctaaagaagcagtataaagccagggcccctgccactgcctcttcttttccctgctgccacttttccagtcctggaactactctgtcccactcttgctctattcagtttacagtcaaccctcccaagcacacaccccgcttcccttggaatccctgaggggtagaaggggccagaaaaaacgcttataaaaccagaggccctctgagatcatgtgagtcctccatggcaaggaagcagttccagggagagtcaggttccagctagttagggctgccagcctagggctttgtgcctacacctcactaagcccatggagaggtcacagatgggccgtgcacgggcagatgggccccaaaaaatcttggcgaaggtcggtaaagtgctaagctgttgtctgcactctttcatcataaagtcacttttttccactgaaagaggt

SEQ ID NO: 360726 - DNA, 1382 bp, Homo sapiens
agccagggtagagactgagtcggcgcctggcgggtgttgtgacgcgcaaaccaggggcgggttctaagcggcgacgcgcgggtgctgggaggccttagaacgccgtggcgtgccgcaggacgcgacggctgcagaacatccgccgcaccgctgggggccaacgttgtcggaccgaggagtccgaggtggcgactgagtgagatacccagctgtgcggagctaggacgcggaacatcccagaggccagcatcaacatgcaagagctgactctgagccctggcccagccaagctgacccctacactagaccctacacaccggatggagctgatcctgagtaccagcccagctgagctgactctggatcctgcgtgccagccaaagctgcccctggattccacatgccaaccagagatgaccttcaatcctggtccaactgagcttaccctggatcctgaacaccagccagaggagaccccagctcctagcctggctgagttgaccctggagcctgtgcaccgccgacccgagctcctggatgcttgtgctgacctcatcaatgatcagtggccccgcagccgcacctcccgcctgcactccctgggccagtcctcagatgccttccccctctgcctgatgctgctaagcccccaccccacacttgaagcagcacccgttgtggtgggccatgcccgcctgtcacgggtgctgaaccagccccagagcctcttagtggagacagtggtggtggcccgggccctgaggggccgtggctttggccgccgcctcatggagggcctggaggtctttgctcgggcccggggcttccgcaagctgcatctcaccacccatgaccaggtgcacttctatacccacctgggctaccagctgggtgagcctgtgcagggcctggtcttcaccagcagacggctgcctgccaccctgcttaatgccttccccacagccccctctccccggccacccaggaaggccccaaacctgactgcccaagctgccccaaggggtcccaagggacctccattgccaccaccccctcccctacctgagtgcctgaccatctcacccccagttccatcagggcccccttcaaaaagcctgctggagacacaatatcaaaatgtgagggggcgccccatattctggatggaaaaagacatctgaggccatccagggcaaggaactgtctttctggttcaatagactgccccgacagtctacaagcctcagcccactgaccatacctcagcccctagcccctggggggcagctttaacctgggcatgtttcctgggtaccagtggggccaggaggtggctctggctcagagccgtcagtgtggctgaataaaggctctcttgggta

SEQ ID NO: 360727 - DNA, 1774 bp, Homo sapiens
agccagggtagagactgagtcggcgcctggcgggtgttgtgacgcgcaaaccaggggcgggttctaagcggcgacgcgcgggtgctgggaggccttagaacgccgtggcgtgccgcaggacgcgacggctgcagaacatccgccgcaccgctgggggccaacgttgtcggaccgaggagtccgaggtggcgactgagtgagatacccagctgtgcggagctaggacgcggaacatcccagaggccagcatcaacatgtcagtaccgcacccttcccatttgctgcctgtaggtccaccccgcgcgtgcggtccccaagtggccatgccaccctgcacgccctccccgcgtcagtcgttcgtttccagaccatgccgagccacacctgcccacagagtcgagctctcgaagtcctcattcccaaaagctccacagcctgtgacccactaggagggagggggaaaccgaggcccgggagagacggagaagccactctctgaggaccccggagccccgcccacagtgggtggggtcggcactgaaggggttaaggccgcggggaagccccgggctcagccctaggggcggatcctggggcttcctccctctagaccaaagggtgcggctgctgcagaggtggctgatgcaggcaagagctgactctgagccctggcccagccaagctgacccctacactagaccctacacaccggatggagctgatcctgagtaccagcccagctgagctgactctggatcctgcgtgccagccaaagctgcccctggattccacatgccaaccagagatgaccttcaatcctggtccaactgagcttaccctggatcctgaacaccagccagaggagaccccagctcctagcctggctgagttgaccctggagcctgtgcaccgccgacccgagctcctggatgcttgtgctgacctcatcaatgatcagtggccccgcagccgcacctcccgcctgcactccctgggccagtcctcagatgccttccccctctgcctgatgctgctaagcccccaccccacacttgaagcagcacccgttgtggtgggccatgcccgcctgtcacgggtgctgaaccagccccagagcctcttagtggagacagtggtggtggcccgggccctgaggggccgtggctttggccgccgcctcatggagggcctggaggtctttgctcgggcccggggcttccgcaagctgcatctcaccacccatgaccaggtgcacttctatacccacctgggctaccagctgggtgagcctgtgcagggcctggtcttcaccagcagacggctgcctgccaccctgcttaatgccttccccacagccccctctccccggccacccaggaaggccccaaacctgactgcccaagctgccccaaggggtcccaagggacctccattgccaccaccccctcccctacctgagtgcctgaccatctcacccccagttccatcagggcccccttcaaaaagcctgctggagacacaatatcaaaatgtgagggggcgccccatattctggatggaaaaagacatctgaggccatccagggcaaggaactgtctttctggttcaatagactgccccgacagtctacaagcctcagcccactgaccatacctcagcccctagcccctggggggcagctttaacctgggcatgtttcctgggtaccagtggggccaggaggtggctctggctcagagccgtcagtgtggctgaataaaggctctcttgggta

SEQ ID NO: 360728 - DNA, 1938 bp, Homo sapiens
agccagggtagagactgagtcggcgcctggcgggtgttgtgacgcgcaaaccaggggcgggttctaagcggcgacgcgcgggtgctgggaggccttagaacgccgtggcgtgccgcaggacgcgacggctgcagaacatccgccgcaccgctgggggccaacgttgtcggaccgaggagtccgaggtggcgactgagtgagatacccagctgtgcggagctaggacgcggaacatcccagaggccagcatcaacattggtggactaggaggactactggaagacagaaggccagcaagtagattgggtcggctgttttatagacctggtggttacagaccccctgtgaggggaggtcctgaggaggacaaatttgtagccagagcaggctggggccaggactcctaggttctgccccagccttaagcagctcatccatcactcccagcctccctccaatgtggggtagacacctggatctatctgccctgctctataggggatgggtctcttccaggtcacctgtgctatcaggtgagtgtgggacaaagtgcagcccaccactccccagttccagtatgcatggtcccccctgcactctgtcagcccttccctgctccaaccccaccctccctcctggcacagcccagcatggctgttatctacaggaggagagccactgtggtctgaagagatgctactgcctggagactggggtcttaacctccagcctggcactgagccacctgcaacctagcagcaggtgaccttggctcccagcctgactcagctgaacctggatcctgtgcataggcaagagctgactctgagccctggcccagccaagctgacccctacactagaccctacacaccggatggagctgatcctgagtaccagcccagctgagctgactctggatcctgcgtgccagccaaagctgcccctggattccacatgccaaccagagatgaccttcaatcctggtccaactgagcttaccctggatcctgaacaccagccagaggagaccccagctcctagcctggctgagttgaccctggagcctgtgcaccgccgacccgagctcctggatgcttgtgctgacctcatcaatgatcagtggccccgcagccgcacctcccgcctgcactccctgggccagtcctcagatgccttccccctctgcctgatgctgctaagcccccaccccacacttgaagcagcacccgttgtggtgggccatgcccgcctgtcacgggtgctgaaccagccccagagcctcttagtggagacagtggtggtggcccgggccctgaggggccgtggctttggccgccgcctcatggagggcctggaggtctttgctcgggcccggggcttccgcaagctgcatctcaccacccatgaccaggtgcacttctatacccacctgggctaccagctgggtgagcctgtgcagggcctggtcttcaccagcagacggctgcctgccaccctgcttaatgccttccccacagccccctctccccggccacccaggaaggccccaaacctgactgcccaagctgccccaaggggtcccaagggacctccattgccaccaccccctcccctacctgagtgcctgaccatctcacccccagttccatcagggcccccttcaaaaagcctgctggagacacaatatcaaaatgtgagggggcgccccatattctggatggaaaaagacatctgaggccatccagggcaaggaactgtctttctggttcaatagactgccccgacagtctacaagcctcagcccactgaccatacctcagcccctagcccctggggggcagctttaacctgggcatgtttcctgggtaccagtggggccaggaggtggctctggctcagagccgtcagtgtggctgaataaaggctctcttgggta

SEQ ID NO: 360729 - DNA, 1183 bp, Homo sapiens
agccagggtagagactgagtcggcgcctggcgggtgttgtgacgcgcaaaccaggggcgggttctaagcggcgacgcgcgggtgctgggaggccttagaacgccgtggcgtgccgcaggacgcgacggctgcagaacatccgccgcaccgctgggggccaacgttgtcggaccgaggagtccgaggtggcgactgagtgagatacccagctgtgcggagctaggacgcggaacatcccagaggccagcatcaacatgctgccacctgcccaccaccaggcctttgtccgacatcgcctggaggaggccttccgtgtggcccttgttgggcaccgacatcccctgcctgtcctggcctatgtccgcctcacacaccggagatctgggaggttcctgtcccaggatgaccttgtgcagtccattggtgtgagtgcagcactaggggcagccggcgtggtgctctggggggacctgagcctctccagctctgaggaggagtgctggcatctccatgactacctggtggacaccttgggcccctatgtgatcaatgtgaccagggcagcgatggcctgcagtcaccagcggtgccatggccacgggcgctgtgcccggcgagatccaggacagatggaagcctttctacacctgtggccagacggcagccttggagattggaagtccttcagctgccactgttactggggctgggctggccccacctgccaggagcccaggcctgggcctaaagaagcagtataaagccagggcccctgccactgcctcttcttttccctgctgccacttttccagtcctggaactactctgtcccactcttgctctattcagtttacagtcaaccctcccaagcacacaccccgcttcccttggaatccctgaggggtagaaggggccagaaaaaacgcttataaaaccagaggccctctgagatcatgtgagtcctccatggcaaggaagcagttccagggagagtcaggttccagctagttagggctgccagcctagggctttgtgcctacacctcactaagcccatggagaggtcacagatgggccgtgcacgggcagatgggccccaaaaaatcttggcgaaggtcggtaaagtgctaagctgttgtctgcactctttcatcataaagtcacttttttccactgaaagaggt

SEQ ID NO: 360730 - DNA, 411 bp, Homo sapiens
tgtggtttatatttctcaagttcaaatgttcaatgacatataagacaaattcatcacataagaaataggcaaggttggcatagcagtagtatctctaaaattaaatacactttagttctttaaaaatgtgatcacaatgattctcaaccagggacagtttttacccttgggattttttttttttttttttttttgagacggagtctcgctctcttgcccaggctagagtgcagtgacgcgatcacggctcattgcaagctccgcctcctgggttcatgccattctcctgccccagcctcctgagtagctgggactacaggtgcccgccaccacgcccggctaatttttttttgtatttttagtagagacggggattcaccgtgttagccaggatgatctcgatctcttgac

SEQ ID NO: 360731 - DNA, 840 bp, Homo sapiens
ccatctccaaaaccccactttctccttcctttgagcctccgtaccagctggggcgtccggcaagatgtgagttgtcactctgctgcggcacagacctgaattaacaactctagctagggctgacttcaaaaagcactttcgttttttaataaccaacatcagctcagcaggcttcatttgggaaaagaaaccttgtcggattaccccgacattctccacctcctgggaggccagccattcccaaatgccccaaggatgaagaacggagacggtaagatgattaattgcactgcaggttttttgtttctgtatttttttccctcctttttttgggtttacttacacattaatgaggtatttaggaaagacaaatggaatctgataaaaggtaacgttatattgtttgtcgaaacaacattttaaggatttcttgaagttatatggctctgtaggcatgtttcactttaagatgtgtttctgagtcatattaggagaacgactgggattatctatggaagattaactatgaaacatatgggaaatatactttataactgtatattacttataaacccatgaatagttacatgacttttggtatgtggtgagagatgttaagtgaaaggtgttgtaaatgaagtcgttttataagactgttgttactgtaagaattgagacttattttatcacttcccattaagcttctacagtgttagagaggcataacccaatgttgactgaaggtgctatgttttctttttaatttattttttattttgcagtgagcccatatcgtgccactgcactccagcctgggcgacagagcaagactctgtctca

SEQ ID NO: 360732 - DNA, 5803 bp, Homo sapiens
  misc_feature (796)..(796): n is a, c, g, or t
caacaatgaaaccagcagataacgcgtgagtagtatcagctctgggcctggcactattttatatgtattagctcattttttttaaaaaactgttttcaaccactccatgagatgagtgctcttatgatccctttttcacagaagaggaaacggaggtacaaagaaattagtgcacaaagccagtcggagagagcccctggccaggcaccaagctccagaggtcgctctggcgagcgtttgcttcgggatctgatgccctggagtcgccaactcaattcgcgggtcgcagccaggctccatgggggtagtagagccaggtcgtagtggctaggtgagttgtctcaactaactctagtggagccgccgcagccctggaggagccgggccgcgactcgagagcgcccggcagctctccaatgctttggaaccggcgggacccctgcgggctacccggggcagggcggtgtccgcaggggtctgtccagccgcgcctgctcctccgggtggagagttgggacacccggccagctcgctcgcagcccgcggactggcccagccgagccgtctccgcccgttccccgcccccgcagcggcggggctagagccagagccgcgcccggcagttcccggccgcgagggcgggcgcagcttgtggccggcggccggagccgactcggagcgcgcggcgcggccgggaggagccggagcgcggccgggccgggcggtgggggcgccggcctgccccgcgcgccccagggagcggcaggaatgtgacaatcgcgcgcccgcgcaccgnagcactcctcgctcggctcctagggctctcgcccctctgagctgagccgggttccgcccggggctgggatcccatcaccctccacggccgtccgtccaggtagacgcaccctctgaagatggtgactccctcctgagaagctggaccccttggtaaaagacaaggccttctccaagaagaatatgaaagtgttactcagacttatttgtttcatagctctactgatttcttctctggaggctgataaatgcaaggaacgtgaagaaaaaataattttagtgtcatctgcaaatgaaattgatgttcgtccctgtcctcttaacccaaatgaacacaaaggcactataacttggtataaagatgacagcaagacacctgtatctacagaacaagcctccaggattcatcaacacaaagagaaactttggtttgttcctgctaaggtggaggattcaggacattactattgcgtggtaagaaattcatcttactgcctcagaattaaaataagtgcaaaatttgtggagaatgagcctaacttatgttataatgcacaagccatatttaagcagaaactacccgttgcaggagacggaggacttgtgtgcccttatatggagttttttaaaaatgaaaataatgagttacctaaattacagtggtataaggattgcaaacctctacttcttgacaatatacactttagtggagtcaaagataggctcatcgtgatgaatgtggctgaaaagcatagagggaactatacttgtcatgcatcctacacatacttgggcaagcaatatcctattacccgggtaatagaatttattactctagaggaaaacaaacccacaaggcctgtgattgtgagcccagctaatgagacaatggaagtagacttgggatcccagatacaattgatctgtaatgtcaccggccagttgagtgacattgcttactggaagtggaatgggtcagtaattgatgaagatgacccagtgctaggggaagactattacagtgtggaaaatcctgcaaacaaaagaaggagtaccctcatcacagtgcttaatatatcggaaattgaaagtagattttataaacatccatttacctgttttgccaagaatacacatggtatagatgcagcatatatccagttaatatatccagtcactaatttccagaagcacatgattggtatatgtgtcacgttgacagtcataattgtgtgttctgttttcatctataaaatcttcaagattgacattgtgctttggtacagggattcctgctatgattttctcccaataaaagcttcagatggaaagacctatgacgcatatatactgtatccaaagactgttggggaagggtctacctctgactgtgatatttttgtgtttaaagtcttgcctgaggtcttggaaaaacagtgtggatataagctgttcatttatggaagggatgactacgttggggaagacattgttgaggtcattaatgaaaacgtaaagaaaagcagaagactgattatcattttagtcagagaaacatcaggcttcagctggctgggtggttcatctgaagagcaaatagccatgtataatgctcttgttcaggatggaattaaagttgtcctgcttgagctggagaaaatccaagactatgagaaaatgccagaatcgattaaattcattaagcagaaacatggggctatccgctggtcaggggactttacacagggaccacagtctgcaaagacaaggttctggaagaatgtcaggtaccacatgccagtccagcgacggtcaccttcatctaaacaccagttactgtcaccagccactaaggagaaactgcaaagagaggctcacgtgcctctcgggtagcatggagaagttgccaagagttctttaggtgcctcctgtcttatggcgttgcaggccaggttatgcctcatgctgacttgcagagttcatggaatgtaactatatcatcctttatccctgaggtcacctggaatcagattattaagggaataagccatgacgtcaatagcagcccagggcacttcagagtagagggcttgggaagatcttttaaaaaggcagtaggcccggtgtggtggctcacgcctataatcccagcactttgggaggctgaagtgggtggatcaccagaggtcaggagttcgagaccagcccagccaacatggcaaaaccccatctctactaaaaatacaaaaatgagctaggcatggtggcacacgcctgtaatcccagctacacctgaggctgaggcaggagaattgcttgaaccggggagacggaggttgcagtgagccgagtttgggccactgcactctagcctggcaacagagcaagactccgtctcaaaaaaagggcaataaatgccctctctgaatgtttgaactgccaagaaaaggcatggagacagcgaactagaagaaagggcaagaaggaaatagccaccgtctacagatggcttagttaagtcatccacagcccaagggcggggctatgccttgtctggggaccctgtagagtcactgaccctggagcggctctcctgagaggtgctgcaggcaaagtgagactgacacctcactgaggaagggagacatattcttggagaactttccatctgcttgtattttccatacacatccccagccagaagttagtgtccgaagaccgaattttattttacagagcttgaaaactcacttcaatgaacaaagggattctccaggattccaaagttttgaagtcatcttagctttccacaggagggagagaacttaaaaaagcaacagtagcagggaattgatccacttcttaatgctttcctccctggcatgaccatcctgtcctttgttattatcctgcattttacgtctttggaggaacagctccctagtggcttcctccgtctgcaatgtcccttgcacagcccacacatgaaccatccttcccatgatgccgctcttctgtcatcccgctcctgctgaaacacctcccaggggctccacctgttcaggagctgaagcccatgctttcccaccagcatgtcactcccagaccacctccctgccctgtcctccagcttcccctcgctgtcctgctgtgtgaattcccaggttggcctggtggccatgtcgcctgcccccagcactcctctgtctctgctcttgcctgcacccttcctcctcctttgcctaggaggccttctcgcattttctctagctgatcagaattttaccaaaattcagaacatcctccaattccacagtctctgggagactttccctaagaggcgacttcctctccagccttctctctctggtcaggcccactgcagagatggtggtgagcacatctgggaggctggtctccctccagctggaattgctgctctctgagggagaggctgtggtggctgtctctgtccctcactgccttccaggagcaatttgcacatgtaacatagatttatgtaatgctttatgtttaaaaacattccccaattatcttatttaatttttgcaattattctaattttatatatagagaaagtgacctattttttaaaaaaatcacactctaagttctattgaacctaggacttgagcctccatttctggcttctagtctggtgttctgagtacttgatttcaggtcaataacggtcccccctcactccacactggcacgtttgtgagaagaaatgacattttgctaggaagtgaccgagtctaggaatgcttttattcaagacaccaaattccaaacttctaaatgttggaattttcaaaaattgtgtttagattttatgaaaaactcttctactttcatctattctttccctagaggcaaacatttcttaaaatgtttcattttcattaaaaatgaaagccaaatttatatgccaccgattgcaggacacaagcacagttttaagagttgtatgaacatggagaggacttttggtttttatatttctcgtatttaatatgggtgaacaccaacttttatttggaataataattttcctcctaaacaaaaacacattgagtttaagtctctgactcttgcctttccacctgctttctcctgggcccgctttgcctgcttgaaggaacagtgctgttctggagctgctgttccaacagacagggcctagctttcatttgacacacagactacagccagaagcccatggagcagggatgtcacgtcttgaaaagcctattagatgttttacaaatttaattttgcagattattttagtctgtcatccagaaaatgtgtcagcatgcatagtgctaagaaagcaagccaatttggaaacttaggttagtgacaaaattggccagagagtgggggtgatgatgaccaagaattacaagtagaatggcagctggaatttaaggagggacaagaatcaatggataagcgtgggtggaggaagatccaaacagaaaagtgcaaagttattccccatcttccaagggttgaattctggaggaagaagacacattcctagttccccgtgaacttcctttgacttattgtccccactaaaacaaaacaaaaaacttttaatgccttccacattaattagattttcttgcagtttttttatggcatttttttaaagatgccctaagtgttgaagaagagtttgcaaatgcaacaaaatatttaattaccggttgttaaaactggtttagcacaatttatattttccctctcttgcctttcttatttgcaataaaaggtattgagccattttttaaatgacatttttgataaattatgtttgtactagttgatgaaggagttttttttaacctgtttatataattttgcagcagaagccaaattttttgtatattaaagcaccaaattcatgtacagcatgcatcacggatcaatagactgtacttattttccaataaaattttcaaactttgtactgtta

SEQ ID NO: 360733 - DNA, 5179 bp, Homo sapiens
ccatctccaaaaccccactttctccttcctttgagcctccgtaccagctggggcgtccggcaagatgtgagttgtcactctgctgcggcacagacctgaattaacaactctagctagggctgacttcaaaaagcactttcgttttttaataaccaacatcagctcagcaggcttcatttgggaaaagaaaccttgtcggattaccccgacattctccacctcctgggaggccagccattcccaaatgccccaaggatgaagaacggagacggtagacgcaccctctgaagatggtgactccctcctgagaagctggaccccttggtaaaagacaaggccttctccaagaagaatatgaaagtgttactcagacttatttgtttcatagctctactgatttcttctctggaggctgataaatgcaaggaacgtgaagaaaaaataattttagtgtcatctgcaaatgaaattgatgttcgtccctgtcctcttaacccaaatgaacacaaaggcactataacttggtataaagatgacagcaagacacctgtatctacagaacaagcctccaggattcatcaacacaaagagaaactttggtttgttcctgctaaggtggaggattcaggacattactattgcgtggtaagaaattcatcttactgcctcagaattaaaataagtgcaaaatttgtggagaatgagcctaacttatgttataatgcacaagccatatttaagcagaaactacccgttgcaggagacggaggacttgtgtgcccttatatggagttttttaaaaatgaaaataatgagttacctaaattacagtggtataaggattgcaaacctctacttcttgacaatatacactttagtggagtcaaagataggctcatcgtgatgaatgtggctgaaaagcatagagggaactatacttgtcatgcatcctacacatacttgggcaagcaatatcctattacccgggtaatagaatttattactctagaggaaaacaaacccacaaggcctgtgattgtgagcccagctaatgagacaatggaagtagacttgggatcccagatacaattgatctgtaatgtcaccggccagttgagtgacattgcttactggaagtggaatgggtcagtaattgatgaagatgacccagtgctaggggaagactattacagtgtggaaaatcctgcaaacaaaagaaggagtaccctcatcacagtgcttaatatatcggaaattgaaagtagattttataaacatccatttacctgttttgccaagaatacacatggtatagatgcagcatatatccagttaatatatccagtcactaatttccagaagcacatgattggtatatgtgtcacgttgacagtcataattgtgtgttctgttttcatctataaaatcttcaagattgacattgtgctttggtacagggattcctgctatgattttctcccaataaaagcttcagatggaaagacctatgacgcatatatactgtatccaaagactgttggggaagggtctacctctgactgtgatatttttgtgtttaaagtcttgcctgaggtcttggaaaaacagtgtggatataagctgttcatttatggaagggatgactacgttggggaagacattgttgaggtcattaatgaaaacgtaaagaaaagcagaagactgattatcattttagtcagagaaacatcaggcttcagctggctgggtggttcatctgaagagcaaatagccatgtataatgctcttgttcaggatggaattaaagttgtcctgcttgagctggagaaaatccaagactatgagaaaatgccagaatcgattaaattcattaagcagaaacatggggctatccgctggtcaggggactttacacagggaccacagtctgcaaagacaaggttctggaagaatgtcaggtaccacatgccagtccagcgacggtcaccttcatctaaacaccagttactgtcaccagccactaaggagaaactgcaaagagaggctcacgtgcctctcgggtagcatggagaagttgccaagagttctttaggtgcctcctgtcttatggcgttgcaggccaggttatgcctcatgctgacttgcagagttcatggaatgtaactatatcatcctttatccctgaggtcacctggaatcagattattaagggaataagccatgacgtcaatagcagcccagggcacttcagagtagagggcttgggaagatcttttaaaaaggcagtaggcccggtgtggtggctcacgcctataatcccagcactttgggaggctgaagtgggtggatcaccagaggtcaggagttcgagaccagcccagccaacatggcaaaaccccatctctactaaaaatacaaaaatgagctaggcatggtggcacacgcctgtaatcccagctacacctgaggctgaggcaggagaattgcttgaaccggggagacggaggttgcagtgagccgagtttgggccactgcactctagcctggcaacagagcaagactccgtctcaaaaaaagggcaataaatgccctctctgaatgtttgaactgccaagaaaaggcatggagacagcgaactagaagaaagggcaagaaggaaatagccaccgtctacagatggcttagttaagtcatccacagcccaagggcggggctatgccttgtctggggaccctgtagagtcactgaccctggagcggctctcctgagaggtgctgcaggcaaagtgagactgacacctcactgaggaagggagacatattcttggagaactttccatctgcttgtattttccatacacatccccagccagaagttagtgtccgaagaccgaattttattttacagagcttgaaaactcacttcaatgaacaaagggattctccaggattccaaagttttgaagtcatcttagctttccacaggagggagagaacttaaaaaagcaacagtagcagggaattgatccacttcttaatgctttcctccctggcatgaccatcctgtcctttgttattatcctgcattttacgtctttggaggaacagctccctagtggcttcctccgtctgcaatgtcccttgcacagcccacacatgaaccatccttcccatgatgccgctcttctgtcatcccgctcctgctgaaacacctcccaggggctccacctgttcaggagctgaagcccatgctttcccaccagcatgtcactcccagaccacctccctgccctgtcctccagcttcccctcgctgtcctgctgtgtgaattcccaggttggcctggtggccatgtcgcctgcccccagcactcctctgtctctgctcttgcctgcacccttcctcctcctttgcctaggaggccttctcgcattttctctagctgatcagaattttaccaaaattcagaacatcctccaattccacagtctctgggagactttccctaagaggcgacttcctctccagccttctctctctggtcaggcccactgcagagatggtggtgagcacatctgggaggctggtctccctccagctggaattgctgctctctgagggagaggctgtggtggctgtctctgtccctcactgccttccaggagcaatttgcacatgtaacatagatttatgtaatgctttatgtttaaaaacattccccaattatcttatttaatttttgcaattattctaattttatatatagagaaagtgacctattttttaaaaaaatcacactctaagttctattgaacctaggacttgagcctccatttctggcttctagtctggtgttctgagtacttgatttcaggtcaataacggtcccccctcactccacactggcacgtttgtgagaagaaatgacattttgctaggaagtgaccgagtctaggaatgcttttattcaagacaccaaattccaaacttctaaatgttggaattttcaaaaattgtgtttagattttatgaaaaactcttctactttcatctattctttccctagaggcaaacatttcttaaaatgtttcattttcattaaaaatgaaagccaaatttatatgccaccgattgcaggacacaagcacagttttaagagttgtatgaacatggagaggacttttggtttttatatttctcgtatttaatatgggtgaacaccaacttttatttggaataataattttcctcctaaacaaaaacacattgagtttaagtctctgactcttgcctttccacctgctttctcctgggcccgctttgcctgcttgaaggaacagtgctgttctggagctgctgttccaacagacagggcctagctttcatttgacacacagactacagccagaagcccatggagcagggatgtcacgtcttgaaaagcctattagatgttttacaaatttaattttgcagattattttagtctgtcatccagaaaatgtgtcagcatgcatagtgctaagaaagcaagccaatttggaaacttaggttagtgacaaaattggccagagagtgggggtgatgatgaccaagaattacaagtagaatggcagctggaatttaaggagggacaagaatcaatggataagcgtgggtggaggaagatccaaacagaaaagtgcaaagttattccccatcttccaagggttgaattctggaggaagaagacacattcctagttccccgtgaacttcctttgacttattgtccccactaaaacaaaacaaaaaacttttaatgccttccacattaattagattttcttgcagtttttttatggcatttttttaaagatgccctaagtgttgaagaagagtttgcaaatgcaacaaaatatttaattaccggttgttaaaactggtttagcacaatttatattttccctctcttgcctttcttatttgcaataaaaggtattgagccattttttaaatgacatttttgataaattatgtttgtactagttgatgaaggagttttttttaacctgtttatataattttgcagcagaagccaaattttttgtatattaaagcaccaaattcatgtacagcatgcatcacggatcaatagactgtacttattttccaataaaattttcaaactttgtactgtta

SEQ ID NO: 360734 - DNA, 5747 bp, Homo sapiens
  misc_feature (796)..(796): n is a, c, g, or t
caacaatgaaaccagcagataacgcgtgagtagtatcagctctgggcctggcactattttatatgtattagctcattttttttaaaaaactgttttcaaccactccatgagatgagtgctcttatgatccctttttcacagaagaggaaacggaggtacaaagaaattagtgcacaaagccagtcggagagagcccctggccaggcaccaagctccagaggtcgctctggcgagcgtttgcttcgggatctgatgccctggagtcgccaactcaattcgcgggtcgcagccaggctccatgggggtagtagagccaggtcgtagtggctaggtgagttgtctcaactaactctagtggagccgccgcagccctggaggagccgggccgcgactcgagagcgcccggcagctctccaatgctttggaaccggcgggacccctgcgggctacccggggcagggcggtgtccgcaggggtctgtccagccgcgcctgctcctccgggtggagagttgggacacccggccagctcgctcgcagcccgcggactggcccagccgagccgtctccgcccgttccccgcccccgcagcggcggggctagagccagagccgcgcccggcagttcccggccgcgagggcgggcgcagcttgtggccggcggccggagccgactcggagcgcgcggcgcggccgggaggagccggagcgcggccgggccgggcggtgggggcgccggcctgccccgcgcgccccagggagcggcaggaatgtgacaatcgcgcgcccgcgcaccgnagcactcctcgctcggctcctagggctctcgcccctctgagctgagccgggttccgcccggggctgggatcccatcaccctccacggccgtccgtccaggtagacgcaccctctgaagatggtgactccctcctgagaagctggaccccttggtaaaagacaaggccttctccaagaagaatatgaaagtgttactcagacttatttgtttcatagctctactgatttcttctctggaggctgataaatgcaaggaacgtgaagaaaaaataattttagtgtcatctgcaaatgaaattgatgttcgtccctgtcctcttaacccaaatgaacacaaaggcactataacttggtataaagatgacagcaagacacctgtatctacagaacaagcctccaggattcatcaacacaaagagaaactttggtttgttcctgctaaggtggaggattcaggacattactattgcgtggtaagaaattcatcttactgcctcagaattaaaataagtgcaaaatttgtggagaatgagcctaacttatgttataatgcacaagccatatttaagcagaaactacccgttgcaggagacggaggacttgtgtgcccttatatggagttttttaaaaatgaaaataatgagttacctaaattacagtggtataaggattgcaaacctctacttcttgacaatatacactttagtggagtcaaagataggctcatcgtgatgaatgtggctgaaaagcatagagggaactatacttgtcatgcatcctacacatacttgggcaagcaatatcctattacccgggtaatagaatttattactctagaggaaaacaaacccacaaggcctgtgattgtgagcccagctaatgagacaatggaagtagacttgggatcccagatacaattgatctgtaatgtcaccggccagttgagtgacattgcttactggaagtggaatgggtcagtaattgatgaagatgacccagtgctaggggaagactattacagtgtggaaaatcctgcaaacaaaagaaggagtaccctcatcacagtgcttaatatatcggaaattgaaagtagattttataaacatccatttacctgttttgccaagaatacacatggtatagatgcagcatatatccagttaatatatccagtcactaatttccagaagcacatgattggtatatgtgtcacgttgacagtcataattgtgtgttctgttttcatctataaaatcttcaagattgacattgtgctttggtacagggattcctgctatgattttctcccaataaaagcttcagatggaaagacctatgacgcatatatactgtatccaaagactgttggggaagggtctacctctgactgtgatatttttgtgtttaaagtcttgcctgaggtcttggaaaaacagtgtggatataagctgttcatttatggaagggatgactacgttggggaagacattgttgaggtcattaatgaaaacgtaaagaaaagcagaagactgattatcattttagtcagagaaacatcaggcttcagctggctgggtggttcatctgaagagcaaatagccatgtataatgctcttgttcaggatggaattaaagttgtcctgcttgagctggagaaaatccaagactatgagaaaatgccagaatcgattaaattcattaagcagaaacatggggctatccgctggtcaggggactttacacagggaccacagtctgcaaagacaaggttctggaagaatgtcaggtaccacatgccagtccagcgacggtcaccttcatctaaacaccagttactgtcaccagccactaaggagaaactgcaaagagaggctcacgtgcctctcgggtagcatggagaagttgccaagagttctttaggtgcctcctgtcttatggcgttgcaggccaggttatgcctcatgctgacttgcagagttcatggaatgtaactatatcatcctttatccctgaggtcacctggaatcagattattaagggaataagccatgacgtcaatagcagcccagggcacttcagagtagagggcttgggaagatcttttaaaaaggcagtaggcccggtgtggtggctcacgcctataatcccagcactttgggaggctgaagtgggtggatcaccagaggtcaggagttcgagaccagcccagccaacatggcaaaaccccatctctactaaaaatacaaaaatgagctaggcatggtggcacacgcctgtaatcccagctacacctgaggctgaggcaggagaattgcttgaaccggggagacggaggttgcagtgagccgagtttgggccactgcactctagcctggcaacagagcaagactccgtctcaaaacagcgaactagaagaaagggcaagaaggaaatagccaccgtctacagatggcttagttaagtcatccacagcccaagggcggggctatgccttgtctggggaccctgtagagtcactgaccctggagcggctctcctgagaggtgctgcaggcaaagtgagactgacacctcactgaggaagggagacatattcttggagaactttccatctgcttgtattttccatacacatccccagccagaagttagtgtccgaagaccgaattttattttacagagcttgaaaactcacttcaatgaacaaagggattctccaggattccaaagttttgaagtcatcttagctttccacaggagggagagaacttaaaaaagcaacagtagcagggaattgatccacttcttaatgctttcctccctggcatgaccatcctgtcctttgttattatcctgcattttacgtctttggaggaacagctccctagtggcttcctccgtctgcaatgtcccttgcacagcccacacatgaaccatccttcccatgatgccgctcttctgtcatcccgctcctgctgaaacacctcccaggggctccacctgttcaggagctgaagcccatgctttcccaccagcatgtcactcccagaccacctccctgccctgtcctccagcttcccctcgctgtcctgctgtgtgaattcccaggttggcctggtggccatgtcgcctgcccccagcactcctctgtctctgctcttgcctgcacccttcctcctcctttgcctaggaggccttctcgcattttctctagctgatcagaattttaccaaaattcagaacatcctccaattccacagtctctgggagactttccctaagaggcgacttcctctccagccttctctctctggtcaggcccactgcagagatggtggtgagcacatctgggaggctggtctccctccagctggaattgctgctctctgagggagaggctgtggtggctgtctctgtccctcactgccttccaggagcaatttgcacatgtaacatagatttatgtaatgctttatgtttaaaaacattccccaattatcttatttaatttttgcaattattctaattttatatatagagaaagtgacctattttttaaaaaaatcacactctaagttctattgaacctaggacttgagcctccatttctggcttctagtctggtgttctgagtacttgatttcaggtcaataacggtcccccctcactccacactggcacgtttgtgagaagaaatgacattttgctaggaagtgaccgagtctaggaatgcttttattcaagacaccaaattccaaacttctaaatgttggaattttcaaaaattgtgtttagattttatgaaaaactcttctactttcatctattctttccctagaggcaaacatttcttaaaatgtttcattttcattaaaaatgaaagccaaatttatatgccaccgattgcaggacacaagcacagttttaagagttgtatgaacatggagaggacttttggtttttatatttctcgtatttaatatgggtgaacaccaacttttatttggaataataattttcctcctaaacaaaaacacattgagtttaagtctctgactcttgcctttccacctgctttctcctgggcccgctttgcctgcttgaaggaacagtgctgttctggagctgctgttccaacagacagggcctagctttcatttgacacacagactacagccagaagcccatggagcagggatgtcacgtcttgaaaagcctattagatgttttacaaatttaattttgcagattattttagtctgtcatccagaaaatgtgtcagcatgcatagtgctaagaaagcaagccaatttggaaacttaggttagtgacaaaattggccagagagtgggggtgatgatgaccaagaattacaagtagaatggcagctggaatttaaggagggacaagaatcaatggataagcgtgggtggaggaagatccaaacagaaaagtgcaaagttattccccatcttccaagggttgaattctggaggaagaagacacattcctagttccccgtgaacttcctttgacttattgtccccactaaaacaaaacaaaaaacttttaatgccttccacattaattagattttcttgcagtttttttatggcatttttttaaagatgccctaagtgttgaagaagagtttgcaaatgcaacaaaatatttaattaccggttgttaaaactggtttagcacaatttatattttccctctcttgcctttcttatttgcaataaaaggtattgagccattttttaaatgacatttttgataaattatgtttgtactagttgatgaaggagttttttttaacctgtttatataattttgcagcagaagccaaattttttgtatattaaagcaccaaattcatgtacagcatgcatcacggatcaatagactgtacttattttccaataaaattttcaaactttgtactgtta

SEQ ID NO: 360735 - DNA, 5065 bp, Homo sapiens
  misc_feature (1062)..(1062): n is a, c, g, or t
  misc_feature (1459)..(1459): n is a, c, g, or t
ttttactaagagggtttctaaaatgaaaagtggcatatacaagaatactagttattcttacacagaattatagttttagaactcattaggctgaatatcattgttttctaagttcctgcctcaacattcatattggtagaataaacaggtatttagagcatctgtttataaattcagttatgcacaagccattggtaggccttgctctgtgatgaataggacagacagagatcataccttaatgaaagaaatgaaatgactagatcttcatgcatcagggaggttctctctctcctttgtttaaactttgcgaaaaaaaaaaaaggaataccacaatatctaaaaaaaaatgaatggataggattcagggctgagacctctggggaagaagatgaggacagggagactttaaggatggctctatactaagagtatacgaggcagcctccaaatagaagaacaaatttgcagtaaaacacaagaaatagaaaccttgtaagagatgaacactttttaaagggattatatttttggtattgctgcttcagtcatgccattgtataaaaaaagatgaatagttcattatgtaatgaatgtttgtgatactgactttatcaaatctcttatttttgccttgtggttctaaatacattatgtttttcctttagcttcagatggaaagacctatgacgcatatatactgtatccaaagactgttggggaagggtctacctctgactgtgatatttttgtgtttaaagtcttgcctgaggtcttggaaaaacagtgtggatataagctgttcatttatggaagggatgactacgttggggaaggtatgtgtgtaatggaacagagtaaaggcttattgttgtaaaactacttagtaaaatgtggattccatctttctagaagatcgtggcataggggtatatgtttcacaattttaagaacctcttcagaagtgtatgatgatttttacatttattaaatgcatttacttctctcatattttgtcagagcaataattaagtgattttcatttagttttgaaaaacttantgactagttaaacccaacagttgctttacaactgatacaattaaacaggagtggtagagatcaaatgattgaataataagtttttaaaattccaacaaagttttctgagttctaaatgaaatatttgtcttttgagggccaatttttgagttagtctataaaatgggaggtttgcagtggctcatgccttttatctcagtacaaccctgggaggccagggtgagagggtcacttgagcctaggagtttgaggctgcagtgatccaagatcacgccactgcgctccagtgtgagcaacagaacaagagactgtctcttaaaattaattaattaaaaacatgggaaactcctttaattttaagtaagacaagaaaaaggcattaggagccatacggttntgaaaagccttgtgtggctttggttcaggagagaatgatgataaatagaattttacttactatattgtgcttcctgtttttcagacattgttgaggtcattaatgaaaacgtaaagaaaagcagaagactgattatcattttagtcagagaaacatcaggcttcagctggctgggtggttcatctgaagagcaaatagccatgtataatgctcttgttcaggatggaattaaagttgtcctgcttgagctggagaaaatccaagactatgagaaaatgccagaatcgattaaattcattaagcagaaacatggggctatccgctggtcaggggactttacacagggaccacagtctgcaaagacaaggttctggaagaatgtcaggtaccacatgccagtccagcgacggtcaccttcatctaaacaccagttactgtcaccagccactaaggagaaactgcaaagagaggctcacgtgcctctcgggtagcatggagaagttgccaagagttctttaggtgcctcctgtcttatggcgttgcaggccaggttatgcctcatgctgacttgcagagttcatggaatgtaactatatcatcctttatccctgaggtcacctggaatcagattattaagggaataagccatgacgtcaatagcagcccagggcacttcagagtagagggcttgggaagatcttttaaaaaggcagtaggcccggtgtggtggctcacgcctataatcccagcactttgggaggctgaagtgggtggatcaccagaggtcaggagttcgagaccagcccagccaacatggcaaaaccccatctctactaaaaatacaaaaatgagctaggcatggtggcacacgcctgtaatcccagctacacctgaggctgaggcaggagaattgcttgaaccggggagacggaggttgcagtgagccgagtttgggccactgcactctagcctggcaacagagcaagactccgtctcaaaaaaagggcaataaatgccctctctgaatgtttgaactgccaagaaaaggcatggagacagcgaactagaagaaagggcaagaaggaaatagccaccgtctacagatggcttagttaagtcatccacagcccaagggcggggctatgccttgtctggggaccctgtagagtcactgaccctggagcggctctcctgagaggtgctgcaggcaaagtgagactgacacctcactgaggaagggagacatattcttggagaactttccatctgcttgtattttccatacacatccccagccagaagttagtgtccgaagaccgaattttattttacagagcttgaaaactcacttcaatgaacaaagggattctccaggattccaaagttttgaagtcatcttagctttccacaggagggagagaacttaaaaaagcaacagtagcagggaattgatccacttcttaatgctttcctccctggcatgaccatcctgtcctttgttattatcctgcattttacgtctttggaggaacagctccctagtggcttcctccgtctgcaatgtcccttgcacagcccacacatgaaccatccttcccatgatgccgctcttctgtcatcccgctcctgctgaaacacctcccaggggctccacctgttcaggagctgaagcccatgctttcccaccagcatgtcactcccagaccacctccctgccctgtcctccagcttcccctcgctgtcctgctgtgtgaattcccaggttggcctggtggccatgtcgcctgcccccagcactcctctgtctctgctcttgcctgcacccttcctcctcctttgcctaggaggccttctcgcattttctctagctgatcagaattttaccaaaattcagaacatcctccaattccacagtctctgggagactttccctaagaggcgacttcctctccagccttctctctctggtcaggcccactgcagagatggtggtgagcacatctgggaggctggtctccctccagctggaattgctgctctctgagggagaggctgtggtggctgtctctgtccctcactgccttccaggagcaatttgcacatgtaacatagatttatgtaatgctttatgtttaaaaacattccccaattatcttatttaatttttgcaattattctaattttatatatagagaaagtgacctattttttaaaaaaatcacactctaagttctattgaacctaggacttgagcctccatttctggcttctagtctggtgttctgagtacttgatttcaggtcaataacggtcccccctcactccacactggcacgtttgtgagaagaaatgacattttgctaggaagtgaccgagtctaggaatgcttttattcaagacaccaaattccaaacttctaaatgttggaattttcaaaaattgtgtttagattttatgaaaaactcttctactttcatctattctttccctagaggcaaacatttcttaaaatgtttcattttcattaaaaatgaaagccaaatttatatgccaccgattgcaggacacaagcacagttttaagagttgtatgaacatggagaggacttttggtttttatatttctcgtatttaatatgggtgaacaccaacttttatttggaataataattttcctcctaaacaaaaacacattgagtttaagtctctgactcttgcctttccacctgctttctcctgggcccgctttgcctgcttgaaggaacagtgctgttctggagctgctgttccaacagacagggcctagctttcatttgacacacagactacagccagaagcccatggagcagggatgtcacgtcttgaaaagcctattagatgttttacaaatttaattttgcagattattttagtctgtcatccagaaaatgtgtcagcatgcatagtgctaagaaagcaagccaatttggaaacttaggttagtgacaaaattggccagagagtgggggtgatgatgaccaagaattacaagtagaatggcagctggaatttaaggagggacaagaatcaatggataagcgtgggtggaggaagatccaaacagaaaagtgcaaagttattccccatcttccaagggttgaattctggaggaagaagacacattcctagttccccgtgaacttcctttgacttattgtccccactaaaacaaaacaaaaaacttttaatgccttccacattaattagattttcttgcagtttttttatggcatttttttaaagatgccctaagtgttgaagaagagtttgcaaatgcaacaaaatatttaattaccggttgttaaaactggtttagcacaatttatattttccctctcttgcctttcttatttgcaataaaaggtattgagccattttttaaatgacatttttgataaattatgtttgtactagttgatgaaggagttttttttaacctgtttatataattttgcagcagaagccaaattttttgtatattaaagcaccaaattcatgtacagcatgcatcacggatcaatagactgtacttattttccaataaaattttcaaactttgtactgtta

SEQ ID NO: 360736 - DNA, 1900 bp, Homo sapiens
  misc_feature (28)..(28): n is a, c, g, or t
tgcagagctgattctagaggatccctgncttgatgtcctgctgtgtgaattcccaggttggcctggtggccatgtcgcctgcccccagcactcctctgtctctgctcttgcctgcacccttcctcctcctttgcctaggaggccttctcgcattttctctagctgatcagaattttaccaaaattcagaacatcctccaattccacagtctctgggagactttccctaagaggcgacttcctctccagccttctctctctggtcaggcccactgcagagatggtggtgagcacatctgggaggctggtctccctccagctggaattgctgctctctgagggagaggctgtggtggctgtctctgtccctcactgccttccaggagcaatttgcacatgtaacatagatttatgtaatgctttatgtttaaaaacattccccaattatcttatttaatttttgcaattattctaattttatatatagagaaagtgacctattttttaaaaaaatcacactctaagttctattgaacctaggacttgagcctccatttctggcttctagtctggtgttctgagtacttgatttcaggtcaataacggtcccccctcactccacactggcacgtttgtgagaagaaatgacattttgctaggaagtgaccgagtctaggaatgcttttattcaagacaccaaattccaaacttctaaatgttggaattttcaaaaattgtgtttagattttatgaaaaactcttctactttcatctattctttccctagaggcaaacatttcttaaaatgtttcattttcattaaaaatgaaagccaaatttatatgccaccgattgcaggacacaagcacagttttaagagttgtatgaacatggagaggacttttggtttttatatttctcgtatttaatatgggtgaacaccaacttttatttggaataataattttcctcctaaacaaaaacacattgagtttaagtctctgactcttgcctttccacctgctttctcctgggcccgctttgcctgcttgaaggaacagtgctgttctggagctgctgttccaacagacagggcctagctttcatttgacacacagactacagccagaagcccatggagcagggatgtcacgtcttgaaaagcctattagatgttttacaaatttaattttgcagattattttagtctgtcatccagaaaatgtgtcagcatgcatagtgctaagaaagcaagccaatttggaaacttaggttagtgacaaaattggccagagagtgggggtgatgatgaccaagaattacaagtagaatggcagctggaatttaaggagggacaagaatcaatggataagcgtgggtggaggaagatccaaacagaaaagtgcaaagttattccccatcttccaagggttgaattctggaggaagaagacacattcctagttccccgtgaacttcctttgacttattgtccccactaaaacaaaacaaaaaacttttaatgccttccacattaattagattttcttgcagtttttttatggcatttttttaaagatgccctaagtgttgaagaagagtttgcaaatgcaacaaaatatttaattaccggttgttaaaactggtttagcacaatttatattttccctctcttgcctttcttatttgcaataaaaggtattgagccattttttaaatgacatttttgataaattatgtttgtactagttgatgaaggagttttttttaacctgtttatataattttgcagcagaagccaaattttttgtatattaaagcaccaaattcatgtacagcatgcatcacggatcaatagactgtacttattttccaataaaattttcaaactttgtactgtta

SEQ ID NO: 360737 - DNA, 6120 bp, Homo sapiens
  misc_feature (796)..(796): n is a, c, g, or t
caacaatgaaaccagcagataacgcgtgagtagtatcagctctgggcctggcactattttatatgtattagctcattttttttaaaaaactgttttcaaccactccatgagatgagtgctcttatgatccctttttcacagaagaggaaacggaggtacaaagaaattagtgcacaaagccagtcggagagagcccctggccaggcaccaagctccagaggtcgctctggcgagcgtttgcttcgggatctgatgccctggagtcgccaactcaattcgcgggtcgcagccaggctccatgggggtagtagagccaggtcgtagtggctaggtgagttgtctcaactaactctagtggagccgccgcagccctggaggagccgggccgcgactcgagagcgcccggcagctctccaatgctttggaaccggcgggacccctgcgggctacccggggcagggcggtgtccgcaggggtctgtccagccgcgcctgctcctccgggtggagagttgggacacccggccagctcgctcgcagcccgcggactggcccagccgagccgtctccgcccgttccccgcccccgcagcggcggggctagagccagagccgcgcccggcagttcccggccgcgagggcgggcgcagcttgtggccggcggccggagccgactcggagcgcgcggcgcggccgggaggagccggagcgcggccgggccgggcggtgggggcgccggcctgccccgcgcgccccagggagcggcaggaatgtgacaatcgcgcgcccgcgcaccgnagcactcctcgctcggctcctagggctctcgcccctctgagctgagccgggttccgcccggggctgggatcccatcaccctccacggccgtccgtccaggtagacgcaccctctgaagatggtgactccctcctgagaagctggaccccttggtaaaagacaaggccttctccaagaagaatatgaaagtgttactcagacttatttgtttcatagctctactgatttcttctctggaggctgataaatgcaaggaacgtgaagaaaaaataattttagtgtcatctgcaaatgaaattgatgttcgtccctgtcctcttaacccaaatgaacacaaaggcactataacttggtataaagatgacagcaagacacctgtatctacagaacaagcctccaggattcatcaacacaaagagaaactttggtttgttcctgctaaggtggaggattcaggacattactattgcgtggtaagaaattcatcttactgcctcagaattaaaataagtgcaaaatttgtggagaatgagcctaacttatgttataatgcacaagccatatttaagcagaaactacccgttgcaggagacggaggacttgtgtgcccttatatggagttttttaaaaatgaaaataatgagttacctaaattacagtggtataaggattgcaaacctctacttcttgacaatatacactttagtggagtcaaagataggctcatcgtgatgaatgtggctgaaaagcatagagggaactatacttgtcatgcatcctacacatacttgggcaagcaatatcctattacccgggtaatagaatttattactctagaggaaaacaaacccacaaggcctgtgattgtgagcccagctaatgagacaatggaagtagacttgggatcccagatacaattgatctgtaatgtcaccggccagttgagtgacattgcttactggaagtggaatgggtcagtaattgatgaagatgacccagtgctaggggaagactattacagtgtggaaaatcctgcaaacaaaagaaggagtaccctcatcacagtgcttaatatatcggaaattgaaagtagattttataaacatccatttacctgttttgccaagaatacacatggtatagatgcagcatatatccagttaatatatccagtcactaatttccagaagcacatgattggtatatgtgtcacgttgacagtcataattgtgtgttctgttttcatctataaaatcttcaagattgacattgtgctttggtacagggattcctgctatgattttctcccaataaaagcttcagatggaaagacctatgacgcatatatactgtatccaaagactgttggggaagggtctacctctgactgtgatatttttgtgtttaaagtcttgcctgaggtcttggaaaaacagtgtggatataagctgttcatttatggaagggatgactacgttggggaagacattgttgaggtcattaatgaaaacgtaaagaaaagcagaagactgattatcattttagtcagagaaacatcaggcttcagctggctgggtggttcatctgaagagcaaatagccatgtataatgctcttgttcaggatggaattaaagttgtcctgcttgagctggagaaaatccaagactatgagaaaatgccagaatcgattaaattcattaagcagaaacatggggctatccgctggtcaggggactttacacagggaccacagtctgcaaagacaaggttctggaagaatgtcaggtaccacatgccagtccagcgacggtcaccttcatctaaacaccagttactgtcaccagccactaaggagaaactgcaaagagaggctcacgtgcctctcgggtagcatggagaagttgccaagagttctttaggtgcctcctgtcttatggcgttgcaggccaggttatgcctcatgctgacttgcagagttcatggaatgtaactatatcatcctttatccctgaggtcacctggaatcagattattaagggaataagccatgacgtcaatagcagcccagggcacttcagagtagagggcttgggaagatcttttaaaaaggcagtaggcccggtgtggtggctcacgcctataatcccagcactttgggaggctgaagtgggtggatcaccagaggtcaggagttcgagaccagcccagccaacatggcaaaaccccatctctactaaaaatacaaaaatgagctaggcatggtggcacacgcctgtaatcccagctacacctgaggctgaggcaggagaattgcttgaaccggggagacggaggttgcagtgagccgagtttgggccactgcactctagcctggcaacagagcaagactccgtctcaaaaaaagggcaataaatgccctctctgaatgtttgaactgccaagaaaaggcatggagacagcgaactagaagaaagggcaagaaggaaatagccaccgtctacagatggcttagttaagtcatccacagcccaagggcggggctatgccttgtctggggaccctgtagagtcactgaccctggagcggctctcctgagaggtgctgcaggcaaagtgagactgacacctcactgaggaagggagacatattcttggagaactttccatctgcttgtattttccatacacatccccagccagaagttagtgtccgaagaccgaattttattttacagagcttgaaaactcacttcaatgaacaaagggattctccaggattccaaagttttgaagtcatcttagctttccacaggagggagagaacttaaaaaagcaacagtagcagggaattgatccacttcttaatgctttcctccctggcatgaccatcctgtcctttgttattatcctgcattttacgtctttggaggaacagctccctagtggcttcctccgtctgcaatgtcccttgcacagcccacacatgaaccatccttcccatgatgccgctcttctgtcatcccgctcctgctgaaacacctcccaggggctccacctgttcaggagctgaagcccatgctttcccaccagcatgtcactcccagaccacctccctgccctgtcctccagcttcccctcgctgtcctgctgtgtgaattcccaggttggcctggtggccatgtcgcctgcccccagcactcctctgtctctgctcttgcctgcacccttcctcctcctttgcctaggaggccttctcgcattttctctagctgatcagaattttaccaaaattcagaacatcctccaattccacagtctctgggagactttccctaagaggcgacttcctctccagccttctctctctggtcaggcccactgcagagatggtggtgagcacatctgggaggctggtctccctccagctggaattgctgctctctgagggagaggctgtggtggctgtctctgtccctcactgccttccaggagcaatttgcacatgtaacatagatttatgtaatgctttatgtttaaaaacattccccaattatcttatttaatttttgcaattattctaattttatatatagagaaagtgacctattttttaaaaaaatcacactctaagttctattgaacctaggacttgagcctccatttctggcttctagtctggtgttctgagtacttgatttcaggtcaataacggtcccccctcactccacactggcacgtttgtgagaagaaatgacattttgctaggaagtgaccgagtctaggaatgcttttattcaagacaccaaattccaaacttctaaatgttggaattttcaaaaattgtgtttagattttatgaaaaactcttctactttcatctattctttccctagaggcaaacatttcttaaaatgtttcattttcattaaaaatgaaagccaaatttatatgccaccgattgcaggacacaagcacagttttaagagttgtatgaacatggagaggacttttggtttttatatttctcgtatttaatatgggtgaacaccaacttttatttggaataataattttcctcctaaacaaaaacacattgagtttaagtctctgactcttgcctttccacctgctttctcctgggcccgctttgcctgcttgaaggaacagtgctgttctggagctgctgttccaacagacagggcctagctttcatttgacacacagactacagccagaagcccatggagcagggatgtcacgtcttgaaaagcctattagatgttttacaaatttaattttgcagattattttagtctgtcatccagaaaatgtgtcagcatgcatagtgctaagaaagcaagccaatttggaaacttaggttagtgacaaaattggccagagagtgggggtgatgatgaccaagaattacaagtagaatggcagctggaatttaaggagggacaagaatcaatggataagcgtgggtggaggaagatccaaacagaaaagtgcaaagttattccccatcttccaagggttgaattctggaggaagaagacacattcctagttccccgtgaacttcctttgacttattgtccccactaaaacaaaacaaaaaacttttaatgccttccacattaattagattttcttgcagtttttttatggcatttttttaaagatgccctaagtgttgaagaagagtttgcaaatgcaacaaaatatttaattaccggttgttaaaactggtttagcacaatttatattttccctctcttgcctttcttatttgcaataaaaggtattgagccattttttaaatgacatttttgataaattatgtttgtactagttgatgaaggagttttttttaacctgtttatataattttgcagcagaagccaaattttttgtatattaaagcaccaaattcatgtacagcatgcatcacggatcaatagactgtacttattttccaataaaattttcaaactttgtactgttaaaaaaaaaaaaaaaaaccagacaccagaaaacaggaaaacaacaaccacaacacccagaaacaacaaaaaaaaaaacaggcgcaaagccaacgaacgaagacacagcacacaagaacagcaacatacaccaaagggagggacgagcacactaagcatacccgggggaggaaacaaaaactcgacccagttgagaaaggccgccccaagcgaagcgttataaaagacagcccgcgccaaaccgaggagtgacacgcagctctgtgacaaccccatgtgggagcccaccacacagagccgcgaacatggtgcgcaccag

SEQ ID NO: 360738 - DNA, 1459 bp, Homo sapiens
tgaagcggccagcaattggagtggctccagtggcagcagcaaacttcagcacagcctattttttaaaaaaatcacactctaagttctattgaacctaggacttgagcctccatttctggcttctagtctggtgttctgagtacttgatttcaggtcaataacggtcccccctcactccacactggcacgtttgtgagaagaaatgacattttgctaggaagtgaccgagtctaggaatgcttttattcaagacaccaaattccaaacttctaaatgttggaattttcaaaaattgtgtttagattttatgaaaaactcttctactttcatctattctttccctagaggcaaacatttcttaaaatgtttcattttcattaaaaatgaaagccaaatttatatgccaccgattgcaggacacaagcacagttttaagagttgtatgaacatggagaggacttttggtttttatatttctcgtatttaatatgggtgaacaccaacttttatttggaataataattttcctcctaaacaaaaacacattgagtttaagtctctgactcttgcctttccacctgctttctcctgggcccgctttgcctgcttgaaggaacagtgctgttctggagctgctgttccaacagacagggcctagctttcatttgacacacagactacagccagaagcccatggagcagggatgtcacgtcttgaaaagcctattagatgttttacaaatttaattttgcagattattttagtctgtcatccagaaaatgtgtcagcatgcatagtgctaagaaagcaagccaatttggaaacttaggttagtgacaaaattggccagagagtgggggtgatgatgaccaagaattacaagtagaatggcagctggaatttaaggagggacaagaatcaatggataagcgtgggtggaggaagatccaaacagaaaagtgcaaagttattccccatcttccaagggttgaattctggaggaagaagacacattcctagttccccgtgaacttcctttgacttattgtccccactaaaacaaaacaaaaaacttttaatgccttccacattaattagattttcttgcagtttttttatggcatttttttaaagatgccctaagtgttgaagaagagtttgcaaatgcaacaaaatatttaattaccggttgttaaaactggtttagcacaatttatattttccctctcttgcctttcttatttgcaataaaaggtattgagccattttttaaatgacatttttgataaattatgtttgtactagttgatgaaggagttttttttaacctgtttatataattttgcagcagaagccaaattttttgtatattaaagcaccaaattcatgtacagcatgcatcacggatcaatagactgtacttattttccaataaaattttcaaactttgtactgtta

SEQ ID NO: 360739 - DNA, 5076 bp, Homo sapiens
aatgtgaaagatgattacagtggccagaggactgccaaggctccttctcaagctgcttgagtcaatgaggatgtagaaactgagatccagtgagatgaagtgattttcccaaagatacatagatgaagttgaagcttagctctttaacccaggtctgctggcgtccaggtagacgcaccctctgaagatggtgactccctcctgagaagctggaccccttggtaaaagacaaggccttctccaagaagaatatgaaagtgttactcagacttatttgtttcatagctctactgatttcttctctggaggctgataaatgcaaggaacgtgaagaaaaaataattttagtgtcatctgcaaatgaaattgatgttcgtccctgtcctcttaacccaaatgaacacaaaggcactataacttggtataaagatgacagcaagacacctgtatctacagaacaagcctccaggattcatcaacacaaagagaaactttggtttgttcctgctaaggtggaggattcaggacattactattgcgtggtaagaaattcatcttactgcctcagaattaaaataagtgcaaaatttgtggagaatgagcctaacttatgttataatgcacaagccatatttaagcagaaactacccgttgcaggagacggaggacttgtgtgcccttatatggagttttttaaaaatgaaaataatgagttacctaaattacagtggtataaggattgcaaacctctacttcttgacaatatacactttagtggagtcaaagataggctcatcgtgatgaatgtggctgaaaagcatagagggaactatacttgtcatgcatcctacacatacttgggcaagcaatatcctattacccgggtaatagaatttattactctagaggaaaacaaacccacaaggcctgtgattgtgagcccagctaatgagacaatggaagtagacttgggatcccagatacaattgatctgtaatgtcaccggccagttgagtgacattgcttactggaagtggaatgggtcagtaattgatgaagatgacccagtgctaggggaagactattacagtgtggaaaatcctgcaaacaaaagaaggagtaccctcatcacagtgcttaatatatcggaaattgaaagtagattttataaacatccatttacctgttttgccaagaatacacatggtatagatgcagcatatatccagttaatatatccagtcactaatttccagaagcacatgattggtatatgtgtcacgttgacagtcataattgtgtgttctgttttcatctataaaatcttcaagattgacattgtgctttggtacagggattcctgctatgattttctcccaataaaagcttcagatggaaagacctatgacgcatatatactgtatccaaagactgttggggaagggtctacctctgactgtgatatttttgtgtttaaagtcttgcctgaggtcttggaaaaacagtgtggatataagctgttcatttatggaagggatgactacgttggggaagacattgttgaggtcattaatgaaaacgtaaagaaaagcagaagactgattatcattttagtcagagaaacatcaggcttcagctggctgggtggttcatctgaagagcaaatagccatgtataatgctcttgttcaggatggaattaaagttgtcctgcttgagctggagaaaatccaagactatgagaaaatgccagaatcgattaaattcattaagcagaaacatggggctatccgctggtcaggggactttacacagggaccacagtctgcaaagacaaggttctggaagaatgtcaggtaccacatgccagtccagcgacggtcaccttcatctaaacaccagttactgtcaccagccactaaggagaaactgcaaagagaggctcacgtgcctctcgggtagcatggagaagttgccaagagttctttaggtgcctcctgtcttatggcgttgcaggccaggttatgcctcatgctgacttgcagagttcatggaatgtaactatatcatcctttatccctgaggtcacctggaatcagattattaagggaataagccatgacgtcaatagcagcccagggcacttcagagtagagggcttgggaagatcttttaaaaaggcagtaggcccggtgtggtggctcacgcctataatcccagcactttgggaggctgaagtgggtggatcaccagaggtcaggagttcgagaccagcccagccaacatggcaaaaccccatctctactaaaaatacaaaaatgagctaggcatggtggcacacgcctgtaatcccagctacacctgaggctgaggcaggagaattgcttgaaccggggagacggaggttgcagtgagccgagtttgggccactgcactctagcctggcaacagagcaagactccgtctcaaaaaaagggcaataaatgccctctctgaatgtttgaactgccaagaaaaggcatggagacagcgaactagaagaaagggcaagaaggaaatagccaccgtctacagatggcttagttaagtcatccacagcccaagggcggggctatgccttgtctggggaccctgtagagtcactgaccctggagcggctctcctgagaggtgctgcaggcaaagtgagactgacacctcactgaggaagggagacatattcttggagaactttccatctgcttgtattttccatacacatccccagccagaagttagtgtccgaagaccgaattttattttacagagcttgaaaactcacttcaatgaacaaagggattctccaggattccaaagttttgaagtcatcttagctttccacaggagggagagaacttaaaaaagcaacagtagcagggaattgatccacttcttaatgctttcctccctggcatgaccatcctgtcctttgttattatcctgcattttacgtctttggaggaacagctccctagtggcttcctccgtctgcaatgtcccttgcacagcccacacatgaaccatccttcccatgatgccgctcttctgtcatcccgctcctgctgaaacacctcccaggggctccacctgttcaggagctgaagcccatgctttcccaccagcatgtcactcccagaccacctccctgccctgtcctccagcttcccctcgctgtcctgctgtgtgaattcccaggttggcctggtggccatgtcgcctgcccccagcactcctctgtctctgctcttgcctgcacccttcctcctcctttgcctaggaggccttctcgcattttctctagctgatcagaattttaccaaaattcagaacatcctccaattccacagtctctgggagactttccctaagaggcgacttcctctccagccttctctctctggtcaggcccactgcagagatggtggtgagcacatctgggaggctggtctccctccagctggaattgctgctctctgagggagaggctgtggtggctgtctctgtccctcactgccttccaggagcaatttgcacatgtaacatagatttatgtaatgctttatgtttaaaaacattccccaattatcttatttaatttttgcaattattctaattttatatatagagaaagtgacctattttttaaaaaaatcacactctaagttctattgaacctaggacttgagcctccatttctggcttctagtctggtgttctgagtacttgatttcaggtcaataacggtcccccctcactccacactggcacgtttgtgagaagaaatgacattttgctaggaagtgaccgagtctaggaatgcttttattcaagacaccaaattccaaacttctaaatgttggaattttcaaaaattgtgtttagattttatgaaaaactcttctactttcatctattctttccctagaggcaaacatttcttaaaatgtttcattttcattaaaaatgaaagccaaatttatatgccaccgattgcaggacacaagcacagttttaagagttgtatgaacatggagaggacttttggtttttatatttctcgtatttaatatgggtgaacaccaacttttatttggaataataattttcctcctaaacaaaaacacattgagtttaagtctctgactcttgcctttccacctgctttctcctgggcccgctttgcctgcttgaaggaacagtgctgttctggagctgctgttccaacagacagggcctagctttcatttgacacacagactacagccagaagcccatggagcagggatgtcacgtcttgaaaagcctattagatgttttacaaatttaattttgcagattattttagtctgtcatccagaaaatgtgtcagcatgcatagtgctaagaaagcaagccaatttggaaacttaggttagtgacaaaattggccagagagtgggggtgatgatgaccaagaattacaagtagaatggcagctggaatttaaggagggacaagaatcaatggataagcgtgggtggaggaagatccaaacagaaaagtgcaaagttattccccatcttccaagggttgaattctggaggaagaagacacattcctagttccccgtgaacttcctttgacttattgtccccactaaaacaaaacaaaaaacttttaatgccttccacattaattagattttcttgcagtttttttatggcatttttttaaagatgccctaagtgttgaagaagagtttgcaaatgcaacaaaatatttaattaccggttgttaaaactggtttagcacaatttatattttccctctcttgcctttcttatttgcaataaaaggtattgagccattttttaaatgacatttttgataaattatgtttgtactagttgatgaaggagttttttttaacctgtttatataattttgcagcagaagccaaattttttgtatattaaagcaccaaattcatgtacagcatgcatcacggatcaatagactgtacttattttccaataaaattttcaaactttgtactgtta

SEQ ID NO: 360740 - DNA, 4978 bp, Homo sapiens
aatgtgaaagatgattacagtggccagaggactgccaaggctccttctcaagctgcttgagtcaatgagggtagacgcaccctctgaagatggtgactccctcctgagaagctggaccccttggtaaaagacaaggccttctccaagaagaatatgaaagtgttactcagacttatttgtttcatagctctactgatttcttctctggaggctgataaatgcaaggaacgtgaagaaaaaataattttagtgtcatctgcaaatgaaattgatgttcgtccctgtcctcttaacccaaatgaacacaaaggcactataacttggtataaagatgacagcaagacacctgtatctacagaacaagcctccaggattcatcaacacaaagagaaactttggtttgttcctgctaaggtggaggattcaggacattactattgcgtggtaagaaattcatcttactgcctcagaattaaaataagtgcaaaatttgtggagaatgagcctaacttatgttataatgcacaagccatatttaagcagaaactacccgttgcaggagacggaggacttgtgtgcccttatatggagttttttaaaaatgaaaataatgagttacctaaattacagtggtataaggattgcaaacctctacttcttgacaatatacactttagtggagtcaaagataggctcatcgtgatgaatgtggctgaaaagcatagagggaactatacttgtcatgcatcctacacatacttgggcaagcaatatcctattacccgggtaatagaatttattactctagaggaaaacaaacccacaaggcctgtgattgtgagcccagctaatgagacaatggaagtagacttgggatcccagatacaattgatctgtaatgtcaccggccagttgagtgacattgcttactggaagtggaatgggtcagtaattgatgaagatgacccagtgctaggggaagactattacagtgtggaaaatcctgcaaacaaaagaaggagtaccctcatcacagtgcttaatatatcggaaattgaaagtagattttataaacatccatttacctgttttgccaagaatacacatggtatagatgcagcatatatccagttaatatatccagtcactaatttccagaagcacatgattggtatatgtgtcacgttgacagtcataattgtgtgttctgttttcatctataaaatcttcaagattgacattgtgctttggtacagggattcctgctatgattttctcccaataaaagcttcagatggaaagacctatgacgcatatatactgtatccaaagactgttggggaagggtctacctctgactgtgatatttttgtgtttaaagtcttgcctgaggtcttggaaaaacagtgtggatataagctgttcatttatggaagggatgactacgttggggaagacattgttgaggtcattaatgaaaacgtaaagaaaagcagaagactgattatcattttagtcagagaaacatcaggcttcagctggctgggtggttcatctgaagagcaaatagccatgtataatgctcttgttcaggatggaattaaagttgtcctgcttgagctggagaaaatccaagactatgagaaaatgccagaatcgattaaattcattaagcagaaacatggggctatccgctggtcaggggactttacacagggaccacagtctgcaaagacaaggttctggaagaatgtcaggtaccacatgccagtccagcgacggtcaccttcatctaaacaccagttactgtcaccagccactaaggagaaactgcaaagagaggctcacgtgcctctcgggtagcatggagaagttgccaagagttctttaggtgcctcctgtcttatggcgttgcaggccaggttatgcctcatgctgacttgcagagttcatggaatgtaactatatcatcctttatccctgaggtcacctggaatcagattattaagggaataagccatgacgtcaatagcagcccagggcacttcagagtagagggcttgggaagatcttttaaaaaggcagtaggcccggtgtggtggctcacgcctataatcccagcactttgggaggctgaagtgggtggatcaccagaggtcaggagttcgagaccagcccagccaacatggcaaaaccccatctctactaaaaatacaaaaatgagctaggcatggtggcacacgcctgtaatcccagctacacctgaggctgaggcaggagaattgcttgaaccggggagacggaggttgcagtgagccgagtttgggccactgcactctagcctggcaacagagcaagactccgtctcaaaaaaagggcaataaatgccctctctgaatgtttgaactgccaagaaaaggcatggagacagcgaactagaagaaagggcaagaaggaaatagccaccgtctacagatggcttagttaagtcatccacagcccaagggcggggctatgccttgtctggggaccctgtagagtcactgaccctggagcggctctcctgagaggtgctgcaggcaaagtgagactgacacctcactgaggaagggagacatattcttggagaactttccatctgcttgtattttccatacacatccccagccagaagttagtgtccgaagaccgaattttattttacagagcttgaaaactcacttcaatgaacaaagggattctccaggattccaaagttttgaagtcatcttagctttccacaggagggagagaacttaaaaaagcaacagtagcagggaattgatccacttcttaatgctttcctccctggcatgaccatcctgtcctttgttattatcctgcattttacgtctttggaggaacagctccctagtggcttcctccgtctgcaatgtcccttgcacagcccacacatgaaccatccttcccatgatgccgctcttctgtcatcccgctcctgctgaaacacctcccaggggctccacctgttcaggagctgaagcccatgctttcccaccagcatgtcactcccagaccacctccctgccctgtcctccagcttcccctcgctgtcctgctgtgtgaattcccaggttggcctggtggccatgtcgcctgcccccagcactcctctgtctctgctcttgcctgcacccttcctcctcctttgcctaggaggccttctcgcattttctctagctgatcagaattttaccaaaattcagaacatcctccaattccacagtctctgggagactttccctaagaggcgacttcctctccagccttctctctctggtcaggcccactgcagagatggtggtgagcacatctgggaggctggtctccctccagctggaattgctgctctctgagggagaggctgtggtggctgtctctgtccctcactgccttccaggagcaatttgcacatgtaacatagatttatgtaatgctttatgtttaaaaacattccccaattatcttatttaatttttgcaattattctaattttatatatagagaaagtgacctattttttaaaaaaatcacactctaagttctattgaacctaggacttgagcctccatttctggcttctagtctggtgttctgagtacttgatttcaggtcaataacggtcccccctcactccacactggcacgtttgtgagaagaaatgacattttgctaggaagtgaccgagtctaggaatgcttttattcaagacaccaaattccaaacttctaaatgttggaattttcaaaaattgtgtttagattttatgaaaaactcttctactttcatctattctttccctagaggcaaacatttcttaaaatgtttcattttcattaaaaatgaaagccaaatttatatgccaccgattgcaggacacaagcacagttttaagagttgtatgaacatggagaggacttttggtttttatatttctcgtatttaatatgggtgaacaccaacttttatttggaataataattttcctcctaaacaaaaacacattgagtttaagtctctgactcttgcctttccacctgctttctcctgggcccgctttgcctgcttgaaggaacagtgctgttctggagctgctgttccaacagacagggcctagctttcatttgacacacagactacagccagaagcccatggagcagggatgtcacgtcttgaaaagcctattagatgttttacaaatttaattttgcagattattttagtctgtcatccagaaaatgtgtcagcatgcatagtgctaagaaagcaagccaatttggaaacttaggttagtgacaaaattggccagagagtgggggtgatgatgaccaagaattacaagtagaatggcagctggaatttaaggagggacaagaatcaatggataagcgtgggtggaggaagatccaaacagaaaagtgcaaagttattccccatcttccaagggttgaattctggaggaagaagacacattcctagttccccgtgaacttcctttgacttattgtccccactaaaacaaaacaaaaaacttttaatgccttccacattaattagattttcttgcagtttttttatggcatttttttaaagatgccctaagtgttgaagaagagtttgcaaatgcaacaaaatatttaattaccggttgttaaaactggtttagcacaatttatattttccctctcttgcctttcttatttgcaataaaaggtattgagccattttttaaatgacatttttgataaattatgtttgtactagttgatgaaggagttttttttaacctgtttatataattttgcagcagaagccaaattttttgtatattaaagcaccaaattcatgtacagcatgcatcacggatcaatagactgtacttattttccaataaaattttcaaactttgtactgtta

SEQ ID NO: 360741 - DNA, 6510 bp, Homo sapiens
  misc_feature (796)..(796): n is a, c, g, or t
  misc_feature (2507)..(2507): n is a, c, g, or t
  misc_feature (2904)..(2904): n is a, c, g, or t
caacaatgaaaccagcagataacgcgtgagtagtatcagctctgggcctggcactattttatatgtattagctcattttttttaaaaaactgttttcaaccactccatgagatgagtgctcttatgatccctttttcacagaagaggaaacggaggtacaaagaaattagtgcacaaagccagtcggagagagcccctggccaggcaccaagctccagaggtcgctctggcgagcgtttgcttcgggatctgatgccctggagtcgccaactcaattcgcgggtcgcagccaggctccatgggggtagtagagccaggtcgtagtggctaggtgagttgtctcaactaactctagtggagccgccgcagccctggaggagccgggccgcgactcgagagcgcccggcagctctccaatgctttggaaccggcgggacccctgcgggctacccggggcagggcggtgtccgcaggggtctgtccagccgcgcctgctcctccgggtggagagttgggacacccggccagctcgctcgcagcccgcggactggcccagccgagccgtctccgcccgttccccgcccccgcagcggcggggctagagccagagccgcgcccggcagttcccggccgcgagggcgggcgcagcttgtggccggcggccggagccgactcggagcgcgcggcgcggccgggaggagccggagcgcggccgggccgggcggtgggggcgccggcctgccccgcgcgccccagggagcggcaggaatgtgacaatcgcgcgcccgcgcaccgnagcactcctcgctcggctcctagggctctcgcccctctgagctgagccgggttccgcccggggctgggatcccatcaccctccacggccgtccgtccaggtagacgcaccctctgaagatggtgactccctcctgagaagctggaccccttggtaaaagacaaggccttctccaagaagaatatgaaagtgttactcagacttatttgtttcatagctctactgatttcttctctggaggctgataaatgcaaggaacgtgaagaaaaaataattttagtgtcatctgcaaatgaaattgatgttcgtccctgtcctcttaacccaaatgaacacaaaggcactataacttggtataaagatgacagcaagacacctgtatctacagaacaagcctccaggattcatcaacacaaagagaaactttggtttgttcctgctaaggtggaggattcaggacattactattgcgtggtaagaaattcatcttactgcctcagaattaaaataagtgcaaaatttgtggagaatgagcctaacttatgttataatgcacaagccatatttaagcagaaactacccgttgcaggagacggaggacttgtgtgcccttatatggagttttttaaaaatgaaaataatgagttacctaaattacagtggtataaggattgcaaacctctacttcttgacaatatacactttagtggagtcaaagataggctcatcgtgatgaatgtggctgaaaagcatagagggaactatacttgtcatgcatcctacacatacttgggcaagcaatatcctattacccgggtaatagaatttattactctagaggaaaacaaacccacaaggcctgtgattgtgagcccagctaatgagacaatggaagtagacttgggatcccagatacaattgatctgtaatgtcaccggccagttgagtgacattgcttactggaagtggaatgggtcagtaattgatgaagatgacccagtgctaggggaagactattacagtgtggaaaatcctgcaaacaaaagaaggagtaccctcatcacagtgcttaatatatcggaaattgaaagtagattttataaacatccatttacctgttttgccaagaatacacatggtatagatgcagcatatatccagttaatatatccagtcactaatttccagaagcacatgattggtatatgtgtcacgttgacagtcataattgtgtgttctgttttcatctataaaatcttcaagattgacattgtgctttggtacagggattcctgctatgattttctcccaataaaagcttcagatggaaagacctatgacgcatatatactgtatccaaagactgttggggaagggtctacctctgactgtgatatttttgtgtttaaagtcttgcctgaggtcttggaaaaacagtgtggatataagctgttcatttatggaagggatgactacgttggggaaggtatgtgtgtaatggaacagagtaaaggcttattgttgtaaaactacttagtaaaatgtggattccatctttctagaagatcgtggcataggggtatatgtttcacaattttaagaacctcttcagaagtgtatgatgatttttacatttattaaatgcatttacttctctcatattttgtcagagcaataattaagtgattttcatttagttttgaaaaacttantgactagttaaacccaacagttgctttacaactgatacaattaaacaggagtggtagagatcaaatgattgaataataagtttttaaaattccaacaaagttttctgagttctaaatgaaatatttgtcttttgagggccaatttttgagttagtctataaaatgggaggtttgcagtggctcatgccttttatctcagtacaaccctgggaggccagggtgagagggtcacttgagcctaggagtttgaggctgcagtgatccaagatcacgccactgcgctccagtgtgagcaacagaacaagagactgtctcttaaaattaattaattaaaaacatgggaaactcctttaattttaagtaagacaagaaaaaggcattaggagccatacggttntgaaaagccttgtgtggctttggttcaggagagaatgatgataaatagaattttacttactatattgtgcttcctgtttttcagacattgttgaggtcattaatgaaaacgtaaagaaaagcagaagactgattatcattttagtcagagaaacatcaggcttcagctggctgggtggttcatctgaagagcaaatagccatgtataatgctcttgttcaggatggaattaaagttgtcctgcttgagctggagaaaatccaagactatgagaaaatgccagaatcgattaaattcattaagcagaaacatggggctatccgctggtcaggggactttacacagggaccacagtctgcaaagacaaggttctggaagaatgtcaggtaccacatgccagtccagcgacggtcaccttcatctaaacaccagttactgtcaccagccactaaggagaaactgcaaagagaggctcacgtgcctctcgggtagcatggagaagttgccaagagttctttaggtgcctcctgtcttatggcgttgcaggccaggttatgcctcatgctgacttgcagagttcatggaatgtaactatatcatcctttatccctgaggtcacctggaatcagattattaagggaataagccatgacgtcaatagcagcccagggcacttcagagtagagggcttgggaagatcttttaaaaaggcagtaggcccggtgtggtggctcacgcctataatcccagcactttgggaggctgaagtgggtggatcaccagaggtcaggagttcgagaccagcccagccaacatggcaaaaccccatctctactaaaaatacaaaaatgagctaggcatggtggcacacgcctgtaatcccagctacacctgaggctgaggcaggagaattgcttgaaccggggagacggaggttgcagtgagccgagtttgggccactgcactctagcctggcaacagagcaagactccgtctcaaaaaaagggcaataaatgccctctctgaatgtttgaactgccaagaaaaggcatggagacagcgaactagaagaaagggcaagaaggaaatagccaccgtctacagatggcttagttaagtcatccacagcccaagggcggggctatgccttgtctggggaccctgtagagtcactgaccctggagcggctctcctgagaggtgctgcaggcaaagtgagactgacacctcactgaggaagggagacatattcttggagaactttccatctgcttgtattttccatacacatccccagccagaagttagtgtccgaagaccgaattttattttacagagcttgaaaactcacttcaatgaacaaagggattctccaggattccaaagttttgaagtcatcttagctttccacaggagggagagaacttaaaaaagcaacagtagcagggaattgatccacttcttaatgctttcctccctggcatgaccatcctgtcctttgttattatcctgcattttacgtctttggaggaacagctccctagtggcttcctccgtctgcaatgtcccttgcacagcccacacatgaaccatccttcccatgatgccgctcttctgtcatcccgctcctgctgaaacacctcccaggggctccacctgttcaggagctgaagcccatgctttcccaccagcatgtcactcccagaccacctccctgccctgtcctccagcttcccctcgctgtcctgctgtgtgaattcccaggttggcctggtggccatgtcgcctgcccccagcactcctctgtctctgctcttgcctgcacccttcctcctcctttgcctaggaggccttctcgcattttctctagctgatcagaattttaccaaaattcagaacatcctccaattccacagtctctgggagactttccctaagaggcgacttcctctccagccttctctctctggtcaggcccactgcagagatggtggtgagcacatctgggaggctggtctccctccagctggaattgctgctctctgagggagaggctgtggtggctgtctctgtccctcactgccttccaggagcaatttgcacatgtaacatagatttatgtaatgctttatgtttaaaaacattccccaattatcttatttaatttttgcaattattctaattttatatatagagaaagtgacctattttttaaaaaaatcacactctaagttctattgaacctaggacttgagcctccatttctggcttctagtctggtgttctgagtacttgatttcaggtcaataacggtcccccctcactccacactggcacgtttgtgagaagaaatgacattttgctaggaagtgaccgagtctaggaatgcttttattcaagacaccaaattccaaacttctaaatgttggaattttcaaaaattgtgtttagattttatgaaaaactcttctactttcatctattctttccctagaggcaaacatttcttaaaatgtttcattttcattaaaaatgaaagccaaatttatatgccaccgattgcaggacacaagcacagttttaagagttgtatgaacatggagaggacttttggtttttatatttctcgtatttaatatgggtgaacaccaacttttatttggaataataattttcctcctaaacaaaaacacattgagtttaagtctctgactcttgcctttccacctgctttctcctgggcccgctttgcctgcttgaaggaacagtgctgttctggagctgctgttccaacagacagggcctagctttcatttgacacacagactacagccagaagcccatggagcagggatgtcacgtcttgaaaagcctattagatgttttacaaatttaattttgcagattattttagtctgtcatccagaaaatgtgtcagcatgcatagtgctaagaaagcaagccaatttggaaacttaggttagtgacaaaattggccagagagtgggggtgatgatgaccaagaattacaagtagaatggcagctggaatttaaggagggacaagaatcaatggataagcgtgggtggaggaagatccaaacagaaaagtgcaaagttattccccatcttccaagggttgaattctggaggaagaagacacattcctagttccccgtgaacttcctttgacttattgtccccactaaaacaaaacaaaaaacttttaatgccttccacattaattagattttcttgcagtttttttatggcatttttttaaagatgccctaagtgttgaagaagagtttgcaaatgcaacaaaatatttaattaccggttgttaaaactggtttagcacaatttatattttccctctcttgcctttcttatttgcaataaaaggtattgagccattttttaaatgacatttttgataaattatgtttgtactagttgatgaaggagttttttttaacctgtttatataattttgcagcagaagccaaattttttgtatattaaagcaccaaattcatgtacagcatgcatcacggatcaatagactgtacttattttccaataaaattttcaaactttgtactgtta

SEQ ID NO: 360742 - DNA, 4512 bp, Homo sapiens
  misc_feature (796)..(796): n is a, c, g, or t
caacaatgaaaccagcagataacgcgtgagtagtatcagctctgggcctggcactattttatatgtattagctcattttttttaaaaaactgttttcaaccactccatgagatgagtgctcttatgatccctttttcacagaagaggaaacggaggtacaaagaaattagtgcacaaagccagtcggagagagcccctggccaggcaccaagctccagaggtcgctctggcgagcgtttgcttcgggatctgatgccctggagtcgccaactcaattcgcgggtcgcagccaggctccatgggggtagtagagccaggtcgtagtggctaggtgagttgtctcaactaactctagtggagccgccgcagccctggaggagccgggccgcgactcgagagcgcccggcagctctccaatgctttggaaccggcgggacccctgcgggctacccggggcagggcggtgtccgcaggggtctgtccagccgcgcctgctcctccgggtggagagttgggacacccggccagctcgctcgcagcccgcggactggcccagccgagccgtctccgcccgttccccgcccccgcagcggcggggctagagccagagccgcgcccggcagttcccggccgcgagggcgggcgcagcttgtggccggcggccggagccgactcggagcgcgcggcgcggccgggaggagccggagcgcggccgggccgggcggtgggggcgccggcctgccccgcgcgccccagggagcggcaggaatgtgacaatcgcgcgcccgcgcaccgnagcactcctcgctcggctcctagggctctcgcccctctgagctgagccgggttccgcccggggctgggatcccatcaccctccacggccgtccgtccaggtagacgcaccctctgaagatggtgactccctcctgagaagctggaccccttggtaaaagacaaggccttctccaagaagaatatgaaagtgttactcagacttatttgtttcatagctctactgatttcttctctggaggctgataaatgcaaggaacgtgaagaaaaaataattttagtgtcatctgcaaatgaaattgatgttcgtccctgtcctcttaacccaaatgaacacaaaggcactataacttggtataaagatgacagcaagacacctgtatctacagaacaagcctccaggattcatcaacacaaagagaaactttggtttgttcctgctaaggtggaggattcaggacattactattgcgtggtaagaaattcatcttactgcctcagaattaaaataagtgcaaaatttgtggagaatgagcctaacttatgttataatgcacaagccatatttaagcagaaactacccgttgcaggagacggaggacttgtgtgcccttatatggagttttttaaaaatgaaaataatgagttacctaaattacagtggtataaggattgcaaacctctacttcttgacaatatacactttagtggagtcaaagataggctcatcgtgatgaatgtggctgaaaagcatagagggaactatacttgtcatgcatcctacacatacttgggcaagcaatatcctattacccgggtaatagaatttattactctagaggaaaacaaacccacaaggcctgtgattgtgagcccagctaatgagacaatggaagtagacttgggatcccagatacaattgatctgtaatgtcaccggccagttgagtgacattgcttactggaagtggaatgggtcagtaattgatgaagatgacccagtgctaggggaagactattacagtgtggaaaatcctgcaaacaaaagaaggagtaccctcatcacagtgcttaatatatcggaaattgaaagtagattttataaacatccatttacctgttttgccaagaatacacatggtatagatgcagcatatatccagttaatatatccagtcactaatttccagaagcacatgattggtatatgtgtcacgttgacagtcataattgtgtgttctgttttcatctataaaatcttcaagattgacattgtgctttggtacagggattcctgctatgattttctcccaataaaagcttcagatggaaagacctatgacgcatatatactgtatccaaagactgttggggaagggtctacctctgactgtgatatttttgtgtttaaagtcttgcctgaggtcttggaaaaacagtgtggatataagctgttcatttatggaagggatgactacgttggggaagacattgttgaggtcattaatgaaaacgtaaagaaaagcagaagactgattatcattttagtcagagaaacatcaggcttcagctggctgggtggttcatctgaagagcaaatagccatgtataatgctcttgttcaggatggaattaaagttgtcctgcttgagctggagaaaatccaagactatgagaaaatgccagaatcgattaaattcattaagcagaaacatggggctatccgctggtcaggggactttacacagggaccacagtctgcaaagacaaggttctggaagaatgtcaggtaccacatgccagtccagcgacggtcaccttcatctaaacaccagttactgtcaccagccactaaggagaaactgcaaagagaggctcacgtgcctctcgggtagcatggagaagttgccaagagttctttaggtgcctcctgtcttatggcgttgcaggccaggttatgcctcatgctgacttgcagagttcatggaatgtaactatatcatcctttatccctgaggtcacctggaatcagattattaagggaataagccatgacgtcaatagcagcccagggcacttcagagtagagggcttgggaagatcttttaaaaaggcagtaggcccggtgtggtggctcacgcctataatcccagcactttgggaggctgaagtgggtggatcaccagaggtcaggagttcgagaccagcccagccaacatggcaaaaccccatctctactaaaaatacaaaaatgagctaggcatggtggcacacgcctgtaatcccagctacacctgaggctgaggcaggagaattgcttgaaccggggagacggaggttgcagtgagccgagtttgggccactgcactctagcctggcaacagagcaagactccgtctcaaaaaaagggcaataaatgccctctctgaatgtttgaactgccaagaaaaggcatggagacagcgaactagaagaaagggcaagaaggaaatagccaccgtctacagatggcttagttaagtcatccacagcccaagggcggggctatgccttgtctggggaccctgtagagtcactgaccctggagcggctctcctgagaggtgctgcaggcaaagtgagactgacacctcactgaggaagggagacatattcttggagaactttccatctgcttgtattttccatacacatccccagccagaagttagtgtccgaagaccgaattttattttacagagcttgaaaactcacttcaatgaacaaagggattctccaggattccaaagttttgaagtcatcttagctttccacaggagggagagaacttaaaaaagcaacagtagcagggaattgatccacttcttaatgctttcctccctggcatgaccatcctgtcctttgttattatcctgcattttacgtctttggaggaacagctccctagtggcttcctccgtctgcaatgtcccttgcacagcccacacatgaaccatccttcccatgatgccgctcttctgtcatcccgctcctgctgaaacacctcccaggggctccacctgttcaggagctgaagcccatgctttcccaccagcatgtcactcccagaccacctccctgccctgtcctccagcttcccctcgctgtcctgctgtgtgaattcccaggttggcctggtggccatgtcgcctgcccccagcactcctctgtctctgctcttgcctgcacccttcctcctcctttgcctaggaggccttctcgcattttctctagctgatcagaattttaccaaaattcagaacatcctccaattccacagtctctgggagactttccctaagaggcgacttcctctccagccttctctctctggtcaggcccactgcagagatggtggtgagcacatctgggaggctggtctccctccagctggaattgctgctctctgagggagaggctgtggtggctgtctctgtccctcactgccttccaggagcaatttgcacatgtaacatagatttatgtaatgctttatgtttaaaaacattccccaattatcttatttaatttttgcaattattctaattttatatatagagaaagtgacctattttttaaaaaaatcacactctaagttctattgaacctaggacttataaaaggaaaagtgatggcatctataacataaatctcaagaggacctgggagaagcttctgctg

SEQ ID NO: 360743 - DNA, 935 bp, Homo sapiens
gattagagacatgcccagggttgttgaatggccaatgattactatcccacagggtgagtaatctcttttctccctcccttggggcattcccatgtaggcagaaaactcttaaattaggagctggttggcagatcataaaaatagattgagccaagcaccatggatcattcctgtaatcccaacaactcaggaggtcaaggtgggaaaatgcttgaggccagaagttcaagaacaacctgggcaacataacaagaccttgtctctaaaaaaattttaaaagttagctgagcatggtggcctgtgcctgtagccacagctacttgggatgctgaggtgggagtattgcatgagcccaggtgtttgaggatgcagtgagccgtgatcatgccactgctctccagcctgggcaacagaacgagaccctgatagtttgaggatgcagtgagctgtaatcatgccactgcactccagcctgggcaacagagagagaccctgatggtttgaggatgcagtgagctgtaatcatgccactgcactccagcctgggcaacagagagagaccctgactcctaaaaaaaaaaaattgattcattctcttttggctgggtaaagagcctctctgctttctagtaatgggcaaacaaacattcttcataccacaccccagttttttaacctcttttgtttagagtgtccttgcacatgaattagaatcctactggttaagatatagtatcagataagagtcctaaggaatgtcctcagccattctgtagttacatgaatcttcccggggatttgctttgtgctatcagaggagatgccttttccaagtgaccctttctcttgggcctagttctgctcttaactctgagaccttggacaatgacttctttctgtgcctcagttccctaaactttaaaaaaagagtgtgg

SEQ ID NO: 360744 - DNA, 249 bp, Homo sapiens
gcccaaaatctcgctgcccacctgggtgcagacagcgtgagggctgcccactccttgaatggtgggccccggactccccgccaggacttctccccagctccctccaagggtcacagtgcctctccttccccagcagtgggttcggccctgagcctgcttagtcatctctcccacctcccatttgacagcagctgcagccacagtgggggcagtgtgggtctcccatctgtccccagttgcaagagatac

SEQ ID NO: 360745 - DNA, 363 bp, Homo sapiens
ttcttctttgacccaatggttgaatatattgtttagtttccatgtatttgtgaatttttccagttttcttttattgatttctagtttcatttctttgtagtcaaaaaagataattgaaattatttcagtcttcttaaatttgtcagaacttgttttgtgaccttgcatgtaatctatcttggagaatctttcatgtgcagttgagaggaatttttattctgctgccgttaggtagaaggttccgtacatgtctgttagctccatttggcctatagtgttattcaaaaccactgtttctttatttctctaatgtctggatgaactattattgaaagtggggtattgaagtctcctaatacattc

SEQ ID NO: 360746 - DNA, 966 bp, Homo sapiens
gatggacaggcaagcacatcagatgtcactgtttggcagctgataaaagtcagtggtgctataatactaagacagagccactagattagtctgtgagggaaggagatgcctcttccttcccttcaatagtgggttaaacccagctggcaccctctggaactacgggaacaatattcttcaagagaaggtcactctaccaaagccaggagcacagtattctcaggatctcaacaaggaagagcagaccaagatgctggctccaacccaggcaaagggttacaaccacctataaccagtccccagccagcttcctcagctccatattaccatcacagcctgattacaatagcagtaaaatcccttccgctatggattccaaattcagcaaatatttagcacttaatgggaaaggtttgaatgtaaaacaagcttttaacccagaaggagaatttcagcgtttggcagctcaatctggactctatgaaagtgaagaactttaataactttaccaacattggaaaacagccaactacaccattagtaatatatttgattacatttttttgaaattaatccatagctgtattaacagattatggttttaattaggtaatatagttaatatatatttataatattatttatcctttgactcttgcacattctatgtacccctccgatttgtgaagcctacaggaaatctgggtatatggatttgtaactgcagaagactatcttaaaatacaggattttaacatttaagtcatgcacatttaacaattacaggttataaattagtatcaactttttaaacacatctaatgcttgtaataacgtttactggtactgctttctaaatactgttttacccgttttctcttgtaggaatactaacatggtatagattatctgagtgttccacagttgtatgtcaaaagaaaataaaattcaaatatttaaaacgga

SEQ ID NO: 360747 - DNA, 930 bp, Homo sapiens
  misc_feature (878)..(878): n is a, c, g, or t
  misc_feature (883)..(883): n is a, c, g, or t
  misc_feature (887)..(887): n is a, c, g, or t
gatggacaggcaagcacatcagatgtcactgtttggcagctgataaaagtcagtggtgctataatactaagacagagccactagattagtctgtgagggaaggagatgcctcttccttcccttcaatagtgggttaaacccagctggcaccctctggaactacgggaacaatattcttcaagagaaggtcactctaccaaagccaggagcacagtattctcaggatctcaacaaggaagagcagaccaaggttgcttctgattccttacaaccttccgtaattccaggcttgtggccccaaattcagggccccacccttccaggaacaaatcattatagtaataatttgccttcatcttccatataccaactaagcatgtttaactacgaacgtccaaaacacttcatccagtcccaaaacccatgtggctccagattgcagcctcctggaccagaaacctccagcttctctagccagaccaaacagtcttccattatcatccagccccgccagtgtacagagcaaagattttctgcctcctcaacactgagctctcacatcaccatgtcctcctctgctttccctgcttctccccagcagcatgctggctccaacccaggcaaagggttacaaccacctataaccagtccccagccagcttcctcagctccatattaccatcacagcctgattacaatagcagtaaaatcccttccgctatggattccaactatcaacagtcctcaggtggcaacctataaatggaagcatcccaatggaatgtgtagccataccagaatcctgatctgaatacaggtcaaagagttggtccgatggaagagtgatggggcctttctaaggatacggacttgaaganggtcngtgnggcccaaagagcggggtaaccaagaaggggcaaacgcgcatca

SEQ ID NO: 360748 - DNA, 868 bp, Homo sapiens
gatggacaggcaagcacatcagatgtcactgtttggcagctgataaaagtcagtggtgctataatactaagacagagccactagattagtctgtgagggaaggagatgcctcttccttcccttcaatagtgggttaaacccagctggcaccctctggaactacgggaacaatattcttcaagagaaggtcactctaccaaagccaggagcacagtattctcaggatctcaacaaggaagagcagaccaagctatcaacagtcctcagctggccaacctataaatgcaaagccatcccaaactgcaaatgctaagcccataccaagaactcctgatcatgaaatacaaggatcaaaagaagctttgattcaagatttggaaagaaagctgaaatgcaaggacacccttcttcataatggaaatcaacgtctaacatatgaagagaagatggctcgcagattgctaggaccacagaatgcagctgctgtgtttcaagctcaggatgacagtggtgcacaagactcgcagcaacacaactcagaacatgcgcgactgcaagttcctacatcacaagtaagaagtagatcaacctcaaggggagatgtgaatgatcaggatgcaatccaggagaaattttacccaccacgtttcattcaagtgccagagaacatgtcgattgatgaaggaagattctgcagaatggacttcaaaggagtggactggcagctcctgatgtgtcatggtatcctaactgggagaccgtcacctcgatgattggcccaatgatcgtgtcgggaaggctcctcctcatcttggaagtgtcgagtcgagcgggttgctgtgtgccaataagggaaccctcctgggtg

SEQ ID NO: 360749 - DNA, 413 bp, Homo sapiens
ttctttttaaaaatcttttctttttcctttttaaagctatcaacagtcctcagctggccaacctataaatgcaaagccatcccaaactgcaaatgctaagcccataccaagaactcctgatcatgaaatacaaggatcaaaagaagctttgattcaagatttggaaagaaagctgaaatgcaaggacacccttcttcataatggaaatcaagtgggcaagatgtctattttgtacaaaaggccaattaaactataaaatctaattttaataaggaagttctagctcacagatctaggtccatatatcaacaaggaataagattatctaaaaagaaggaatatttgggccctattccatttctctctgcatgaaatcacctcttggtttacagtagtaaaagaatgaagcaaat

SEQ ID NO: 360750 - DNA, 627 bp, Homo sapiens
gatggacaggcaagcacatcagatgtcactgtttggcagctgataaaagtcagtggtgctataatactaagacagagccactagattagtctgtgagggaaggagatgcctcttccttcccttcaatagtgggttaaacccagctggcaccctctggaactacgggaacaatattcttcaagagaaggtcactctaccaaagccaggagcacagtattctcaggatctcaacaaggaagagcagaccaagctatcaacagtcctcagctggccaacctataaatgcaaagccatcccaaactgcaaatgctaagcccataccaagaactcctgatcatgaaatacaaggatcaaaagaagctttgattcaagatttggaaagaaagctgaaatgcaaggacacccttcttcataatggaaatcaagtgggcaagatgtctattttgtacaaaaggccaattaaactataaaatctaattttaataaggaagttctagctcacagatctaggtccatatatcaacaaggaataagattatctaaaaagaaggaatatttgggccctattccatttctctctgcatgaaatcacctcttggtttacagtagtaaaagaatgaagcaaat

SEQ ID NO: 360751 - DNA, 1879 bp, Homo sapiens
gatggacaggcaagcacatcagatgtcactgtttggcagctgataaaagtcagtggtgctataatactaagacagagccactagattagtctgtgagggaaggagatgcctcttccttcccttcaatagtgggttaaacccagatgctggctccaacccaggcaaagggttacaaccacctataaccagtccccagccagcttcctcagctccatattaccatcacagcctgattacaatagcagtaaaatcccttccgctatggattccaactatcaacagtcctcagctggccaacctataaatgcaaagccatcccaaactgcaaatgctaagcccataccaagaactcctgatcatgaaatacaaggatcaaaagaagctttgattcaagatttggaaagaaagctgaaatgcaaggacacccttcttcataatggaaatcaacgtctaacatatgaagagaagatggctcgcagattgctaggaccacagaatgcagctgctgtgtttcaagctcaggatgacagtggtgcacaagactcgcagcaacacaactcagaacatgcgcgactgcaagttcctacatcacaagtaagaagtagatcaacctcaaggggagatgtgaatgatcaggatgcaatccaggagaaattttacccaccacgtttcattcaagtgccagagaacatgtcgattgatgaaggaagattctgcagaatggacttcaaagtgagtggactgccagctcctgatgtgtcatggtatctaaatggaagaacagttcaatcagatgatttgcacaaaatgatagtgtctgagaagggtcttcattcactcatctttgaagtagtcagagcttcagatgcaggggcttatgcatgtgttgccaagaatagagcaggagaagccaccttcactgtgcagctggatgtccttgcaaaagaacataaaagagcaccaatgtttatctacaaaccacagagcaaaaaagttttagagggagattcagtgaaactagaatgccagatctcggctatacctccaccaaagcttttctggaaaagaaataatgaaatggtacaattcaacactgaccgaataagcttatatcaagataacactggaagagttactttactgataaaagatgtaaacaagaaagatgctgggtggtatactgtgtcagcagttaatgaagctggagtgactacatgtaacacaagattagacgttacggcacgtccaaaccaaactcttccagctcctaagcagttacgggttcgaccaacattcagcaaatatttagcacttaatgggaaaggtttgaatgtaaaacaagcttttaacccagaaggagaatttcagcgtttggcagctcaatctggactctatgaaagtgaagaactttaataactttaccaacattggaaaacagccaactacaccattagtaatatatttgattacatttttttgaaattaatccatagctgtattaacagattatggttttaattaggtaatatagttaatatatatttataatattatttatcctttgactcttgcacattctatgtacccctccgatttgtgaagcctacaggaaatctgggtatatggatttgtaactgcagaagactatcttaaaatacaggattttaacatttaagtcatgcacatttaacaattacaggttataaattagtatcaactttttaaacacatctaatgcttgtaataacgtttactggtactgctttctaaatactgttttacccgttttctcttgtaggaatactaacatggtatagattatctgagtgttccacagttgtatgtcaaaagaaaataaaattcaaatatttaaaacgga

SEQ ID NO: 360752 - DNA, 2205 bp, Homo sapiens
gatggacaggcaagcacatcagatgtcactgtttggcagctgataaaagtcagtggtgctataatactaagacagagccactagattagtctgtgagggaaggagatgcctcttccttcccttcaatagtgggttaaacccagctggcaccctctggaactacgggaacaatattcttcaagagaaggtcactctaccaaagccaggagcacagtattctcaggatctcaacaaggaagagcagaccaaggttgcttctgattccttacaaccttccgtaattccaggcttgtggccccaaattcagggccccacccttccaggaacaaatcattatagtaataatttgccttcatcttccatataccaactaagcatgtttaactacgaacgtccaaaacacttcatccagtcccaaaacccatgtggctccagattgcagcctcctggaccagaaacctccagcttctctagccagaccaaacagtcttccattatcatccagccccgccagtgtacagagcaaagattttctgcctcctcaacactgagctctcacatcaccatgtcctcctctgctttccctgcttctccccagcagcatgctggctccaacccaggcaaagggttacaaccacctataaccagtccccagccagcttcctcagctccatattaccatcacagcctgattacaatagcagtaaaatcccttccgctatggattccaactatcaacagtcctcagctggccaacctataaatgcaaagccatcccaaactgcaaatgctaagcccataccaagaactcctgatcatgaaatacaaggatcaaaagaagctttgattcaagatttggaaagaaagctgaaatgcaaggacacccttcttcataatggaaatcaacgtctaacatatgaagagaagatggctcgcagattgctaggaccacagaatgcagctgctgtgtttcaagctcaggatgacagtggtgcacaagactcgcagcaacacaactcagaacatgcgcgactgcaagttcctacatcacaagtaaggtgagtggactgccagctcctgatgtgtcatggtatctaaatggaagaacagttcaatcagatgatttgcacaaaatgatagtgtctgagaagggtcttcattcactcatctttgaagtagtcagagcttcagatgcaggggcttatgcatgtgttgccaagaatagagcaggagaagccaccttcactgtgcagctggatgtccttgcaaaagaacataaaagagcaccaatgtttatctacaaaccacagagcaaaaaagttttagagggagattcagtgaaactagaatgccagatctcggctatacctccaccaaagcttttctggaaaagaaataatgaaatggtacaattcaacactgaccgaataagcttatatcaagataacactggaagagttactttactgataaaagatgtaaacaagaaagatgctgggtggtatactgtgtcagcagttaatgaagctggagtgactacatgtaacacaagattagacgttacggcacgtccaaaccaaactcttccagctcctaagcagttacgggttcgaccaacattcagcaaatatttagcacttaatgggaaaggtttgaatgtaaaacaagcttttaacccagaaggagaatttcagcgtttggcagctcaatctggactctatgaaagtgaagaactttaataactttaccaacattggaaaacagccaactacaccattagtaatatatttgattacatttttttgaaattaatccatagctgtattaacagattatggttttaattaggtaatatagttaatatatatttataatattatttatcctttgactcttgcacattctatgtacccctccgatttgtgaagcctacaggaaatctgggtatatggatttgtaactgcagaagactatcttaaaatacaggattttaacatttaagtcatgcacatttaacaattacaggttataaattagtatcaactttttaaacacatctaatgcttgtaataacgtttactggtactgctttctaaatactgttttacccgttttctcttgtaggaatactaacatggtatagattatctgagtgttccacagttgtatgtcaaaagaaaataaaattcaaatatttaaaacgga

SEQ ID NO: 360753 - DNA, 2283 bp, Homo sapiens
  misc_feature (2190)..(2190): n is a, c, g, or t
  misc_feature (2194)..(2195): n is a, c, g, or t
  misc_feature (2197)..(2197): n is a, c, g, or t
  misc_feature (2214)..(2214): n is a, c, g, or t
gatggacaggcaagcacatcagatgtcactgtttggcagctgataaaagtcagtggtgctataatactaagacagagccactagattagtctgtgagggaaggagatgcctcttccttcccttcaatagtgggttaaacccagctggcaccctctggaactacgggaacaatattcttcaagagaaggtcactctaccaaagccaggagcacagtattctcaggatctcaacaaggaagagcagaccaaggttgcttctgattccttacaaccttccgtaattccaggcttgtggccccaaattcagggccccacccttccaggaacaaatcattatagtaataatttgccttcatcttccatataccaactaagcatgtttaactacgaacgtccaaaacacttcatccagtcccaaaacccatgtggctccagattgcagcctcctggaccagaaacctccagcttctctagccagaccaaacagtcttccattatcatccagccccgccagtgtacagagcaaagattttctgcctcctcaacactgagctctcacatcaccatgtcctcctctgctttccctgcttctccccagcagcatgctggctccaacccaggcaaagggttacaaccacctataaccagtccccagccagcttcctcagctccatattaccatcacagcctgattacaatagcagtaaaatcccttccgctatggattccaactatcaacagtcctcagctggccaacctataaatgcaaagccatcccaaactgcaaatgctaagcccataccaagaactcctgatcatgaaatacaaggatcaaaagaagctttgattcaagatttggaaagaaagctgaaatgcaaggacacccttcttcataatggaaatcaacgtctaacatatgaagagaagatggctcgcagattgctaggaccacagaatgcagctgctgtgtttcaagctcaggatgacagtggtgcacaagactcgcagcaacacaactcagaacatgcgcgactgcaagttcctacatcacaagtaagaagtagatcaacctcaaggggagatgtgaatgatcaggatgcaatccaggagaaattttacccaccacgtttcattcaagtgccagagaacatgtcgattgatgaaggaagattctgcagaatggacttcaaagtgagtggactgccagctcctgatgtgtcatggtatctaaatggaagaacagttcaatcagatgatttgcacaaaatgatagtgtctgagaagggtcttcattcactcatctttgaagtagtcagagcttcagatgcaggggcttatgcatgtgttgccaagaatagagcaggagaagccaccttcactgtgcagctggatgtccttgcaaaagaacataaaagagcaccaatgtttatctacaaaccacagagcaaaaaagttttagagggagattcagtgaaactagaatgccagatctcggctatacctccaccaaagcttttctggaaaagaaataatgaaatggtacaattcaacactgaccgaataagcttatatcaagataacactggaagagttactttactgataaaagatgtaaacaagaaagatgctgggtggtatactgtgtcagcagttaatgaagctggagtgactacatgtaacacaagattagacgttacggcacgtccaaaccaaactcttccagctcctaagcagttacgggttcgaccaacattcagcaaatatttagcacttaatgggaaaggtttgaatgtaaaacaagcttttaacccagaaggagaatttcagcgtttggcagctcaatctggactctatgaaagtgaagaactttaataactttaccaacattggaaaacagccaactacaccattagtaatatatttgattacatttttttgaaattaatccatagctgtattaacagattatggttttaattaggtaatatagttaatatatatttataatattatttatcctttgactcttgcacattctatgtacccctccgatttgtgaagcctacaggaaatctgggtatatggatttgtaactgcagaagactatcttaaaatacaggattttaacatttaagtcatgcacatttaacaattacaggttataaattagtatcaactttttaaacaccncttnnangctggaaacgttacggnggctcaaacggtcaccgcctcggggaacaccggagaaaatcgggtcccggtttccgaaaatctttgcaa

SEQ ID NO: 360754 - DNA, 1517 bp, Homo sapiens
ggcttctgctagagtggtagtatgttagtgcactgtactttaagggcttaaaagctgaatatatagaacttaccaggctgttcaaatacagccaaaataggaatgttcctttcaactgtaactacttaattctgcttcattcaagctaacaatgcatgtaaacattcttacttgttttaatttcaagcaacacaactcagaacatgcgcgactgcaagttcctacatcacaagtaagaagtagatcaacctcaaggggagatgtgaatgatcaggatgcaatccaggagaaattttacccaccacgtttcattcaagtgccagagaacatgtcgattgatgaaggaagattctgcagaatggacttcaaagtgagtggactgccagctcctgatgtgtcatggtatctaaatggaagaacagttcaatcagatgatttgcacaaaatgatagtgtctgagaagggtcttcattcactcatctttgaagtagtcagagcttcagatgcaggggcttatgcatgtgttgccaagaatagagcaggagaagccaccttcactgtgcagctggatgtccttgcaaaagaacataaaagagcaccaatgtttatctacaaaccacagagcaaaaaagttttagagggagattcagtgaaactagaatgccagatctcggctatacctccaccaaagcttttctggaaaagaaataatgaaatggtacaattcaacactgaccgaataagcttatatcaagataacactggaagagttactttactgataaaagatgtaaacaagaaagatgctgggtggtatactgtgtcagcagttaatgaagctggagtgactacatgtaacacaagattagacgttacggcacgtccaaaccaaactcttccagctcctaagcagttacgggttcgaccaacattcagcaaatatttagcacttaatgggaaaggtttgaatgtaaaacaagcttttaacccagaaggagaatttcagcgtttggcagctcaatctggactctatgaaagtgaagaactttaataactttaccaacattggaaaacagccaactacaccattagtaatatatttgattacatttttttgaaattaatccatagctgtattaacagattatggttttaattaggtaatatagttaatatatatttataatattatttatcctttgactcttgcacattctatgtacccctccgatttgtgaagcctacaggaaatctgggtatatggatttgtaactgcagaagactatcttaaaatacaggattttaacatttaagtcatgcacatttaacaattacaggttataaattagtatcaactttttaaacacatctaatgcttgtaataacgtttactggtactgctttctaaatactgttttacccgttttctcttgtaggaatactaacatggtatagattatctgagtgttccacagttgtatgtcaaaagaaaataaaattcaaatatttaaaacgga

SEQ ID NO: 360755 - DNA, 1260 bp, Homo sapiens
gatggacaggcaagcacatcagatgtcactgtttggcagctgataaaagtcagtggtgctataatactaagacagagccactagattagtctgtgagggaaggagatgcctcttccttcccttcaatagtgggttaaacccagctggcaccctctggaactacgggaacaatattcttcaagagaaggtcactctaccaaagccaggagcacagtattctcaggatctcaacaaggaagagcagaccaagatgctggctccaacccaggcaaagggttacaaccacagaagccaccttcactgtgcagctggatgtccttgcaaaagaacataaaagagcaccaatgtttatctacaaaccacagagcaaaaaagttttagagggagattcagtgaaactagaatgccagatctcggctatacctccaccaaagcttttctggaaaagaaataatgaaatggtacaattcaacactgaccgaataagcttatatcaagataacactggaagagttactttactgataaaagatgtaaacaagaaagatgctgggtggtatactgtgtcagcagttaatgaagctggagtgactacatgtaacacaagattagacgttacggcacgtccaaaccaaactcttccagctcctaagcagttacgggttcgaccaacattcagcaaatatttagcacttaatgggaaaggtttgaatgtaaaacaagcttttaacccagaaggagaatttcagcgtttggcagctcaatctggactctatgaaagtgaagaactttaataactttaccaacattggaaaacagccaactacaccattagtaatatatttgattacatttttttgaaattaatccatagctgtattaacagattatggttttaattaggtaatatagttaatatatatttataatattatttatcctttgactcttgcacattctatgtacccctccgatttgtgaagcctacaggaaatctgggtatatggatttgtaactgcagaagactatcttaaaatacaggattttaacatttaagtcatgcacatttaacaattacaggttataaattagtatcaactttttaaacacatctaatgcttgtaataacgtttactggtactgctttctaaatactgttttacccgttttctcttgtaggaatactaacatggtatagattatctgagtgttccacagttgtatgtcaaaagaaaataaaattcaaatatttaaaacgga

SEQ ID NO: 360756 - DNA, 1417 bp, Homo sapiens
gatggacaggcaagcacatcagatgtcactgtttggcagctgataaaagtcagtggtgctataatactaagacagagccactagattagtctgtgagggaaggagatgcctcttccttcccttcaatagtgggttaaacccagctggcaccctctggaactacgggaacaatattcttcaagagaaggtcactctaccaaagccaggagcacagtattctcaggatctcaacaaggaagagcagaccaaggttgcttctgattccttacaaccttccgtaattccaggcttgtggccccaaattcagggccccacccttccaggaacaaatcattatagtaataatttgccttcatcttccatataccaactaagcatgtttaactacgaacgtccaaaacacttcatccagtcccaaaacccatgtggctccagattgcagcctcctggaccagaaacctccagcttctctagccagaccaaacagtcttccattatcatccagccccgccagtgtacagaagcaaaaaagttttagagggagattcagtgaaactagaatgccagatctcggctatacctccaccaaagcttttctggaaaagaaataatgaaatggtacaattcaacactgaccgaataagcttatatcaagataacactggaagagttactttactgataaaagatgtaaacaagaaagatgctgggtggtatactgtgtcagcagttaatgaagctggagtgactacatgtaacacaagattagacgttacggcacgtccaaaccaaactcttccagctcctaagcagttacgggttcgaccaacattcagcaaatatttagcacttaatgggaaaggtttgaatgtaaaacaagcttttaacccagaaggagaatttcagcgtttggcagctcaatctggactctatgaaagtgaagaactttaataactttaccaacattggaaaacagccaactacaccattagtaatatatttgattacatttttttgaaattaatccatagctgtattaacagattatggttttaattaggtaatatagttaatatatatttataatattatttatcctttgactcttgcacattctatgtacccctccgatttgtgaagcctacaggaaatctgggtatatggatttgtaactgcagaagactatcttaaaatacaggattttaacatttaagtcatgcacatttaacaattacaggttataaattagtatcaactttttaaacacatctaatgcttgtaataacgtttactggtactgctttctaaatactgttttacccgttttctcttgtaggaatactaacatggtatagattatctgagtgttccacagttgtatgtcaaaagaaaataaaattcaaatatttaaaacgga

SEQ ID NO: 360757 - DNA, 1854 bp, Homo sapiens
  misc_feature (1766)..(1766): n is a, c, g, or t
gatggacaggcaagcacatcagatgtcactgtttggcagctgataaaagtcagtggtgctataatactaagacagagccactagattagtctgtgagggaaggagatgcctcttccttcccttcaatagtgggttaaacccagctggcaccctctggaactacgggaacaatattcttcaagagaaggtcactctaccaaagccaggagcacagtattctcaggatctcaacaaggaagagcagaccaaggttgcttctgattccttacaaccttccgtaattccaggcttgtggccccaaattcagggccccacccttccaggaacaaatcattatagtaataatttgccttcatcttccatataccaactaagcatgtttaactacgaacgtccaaaacacttcatccagtcccaaaacccatgtggctccagattgcagcctcctggaccagaaacctccagcttctctagccagaccaaacagtcttccattatcatccagccccgccagtgtacagagcaaagattttctgcctcctcaacactgagctctcacatcaccatgtcctcctctgctttccctgcttctccccagcagcatgctggctccaacccaggcaaagggttacaaccacctataaccagtccccagccagcttcctcagctccatattaccatcacagcctgattacaatagcagtaaaatcccttccgctatggattccaactatcaacagtcctcagctggccaacctataaatgcaaagccatcccaaactgcaaatgctaagcccataccaagaactcctgatcatgaaatacaaggatcaaaagaagctttgattcaagatttggaaagaaagctgaaatgcaaggacacccttcttcataatggaaatcaacgtctaacatatgaagagaagatggctcgcagattgctaggaccacagaatgcagctgctgtgtttcaagctcaggatgacagtggtgcacaagactcgcagcaacacaactcagaacatgcgcgactgcaagttcctacatcacaagtaagaagtagatcaacctcaaggggagatgtgaatgatcaggatgcaatccaggagaaattttacccaccacgtttcattcaagtgccagagaacatgtcgattgatgaaggaagattctgcagaatggacttcaaagtgagtggactgccagctcctgatgtgtcatggtatctaaatggaagaacagttcaatcagatgatttgcacaaaatgatagtgtctgagaagggtcttcattcactcatctttgaagtagtcagagcttcagatgcaggggcttatgcatgtgttgccaagaatagagcaggagaagccaccttcactgtgcagctggatgtccttgcaaaagaacataaaagagcaccaatgtttatctacaaaccacagagcaaaaaagttttagagggagattcagtgaaactagaatgccagatctcggctatacctccaccaaagcttttctggaaaagaaataatgaaatggtacaattcaacactgaccgaataagcttatatcaagataacactggaagagttactttactgataaaagatgtaaacaagaaagatgctgggtggtatactgtgtcagcagttaatgaagctggagtgactacatgtaacacaagattagacgttacggcacgtccaaaccaaactcttccagctccttgcagtcgcgcatgtcctgagttgtgttgctgcgagtnttgtgcaccactgtcatcctgagctttaaacacagcagctgcattctgtggtcctagcaatctgcgagccatcttctctgcatatgtt

SEQ ID NO: 360758 - DNA, 937 bp, Homo sapiens
ggggggatgtttaattcaagaaaaccaatagctatttggcaataaatagatacagctttggaattttcaaatgtttttttcttcctagtctgactgttggtcagagacatccacttcacagaaataattcctgtactttcatttcttaaaaatttttatttcagcttatatcaagataacactggaagagttactttactgataaaagatgtaaacaagaaagatgctgggtggtatactgtgtcagcagttaatgaagctggagtgactacatgtaacacaagattagacgttacggcacgtccaaaccaaactcttccagctcctaagcagttacgggttcgaccaacattcagcaaatatttagcacttaatgggaaaggtttgaatgtaaaacaagcttttaacccagaaggagaatttcagcgtttggcagctcaatctggactctatgaaagtgaagaactttaataactttaccaacattggaaaacagccaactacaccattagtaatatatttgattacatttttttgaaattaatccatagctgtattaacagattatggttttaattaggtaatatagttaatatatatttataatattatttatcctttgactcttgcacattctatgtacccctccgatttgtgaagcctacaggaaatctgggtatatggatttgtaactgcagaagactatcttaaaatacaggattttaacatttaagtcatgcacatttaacaattacaggttataaattagtatcaactttttaaacacatctaatgcttgtaataacgtttactggtactgctttctaaatactgttttacccgttttctcttgtaggaatactaacatggtatagattatctgagtgttccacagttgtatgtcaaaagaaaataaaattcaaatatttaaaacgga

SEQ ID NO: 360759 - DNA, 2338 bp, Homo sapiens
gatggacaggcaagcacatcagatgtcactgtttggcagctgataaaagtcagtggtgctataatactaagacagagccactagattagtctgtgagggaaggagatgcctcttccttcccttcaatagtgggttaaacccagctggcaccctctggaactacgggaacaatattcttcaagagaaggtcactctaccaaagccaggagcacagtattctcaggatctcaacaaggaagagcagaccaaggttgcttctgattccttacaaccttccgtaattccaggcttgtggccccaaattcagggccccacccttccaggaacaaatcattatagtaataatttgccttcatcttccatataccaactaagcatgtttaactacgaacgtccaaaacacttcatccagtcccaaaacccatgtggctccagattgcagcctcctggaccagaaacctccagcttctctagccagaccaaacagtcttccattatcatccagccccgccagtgtacagagcaaagattttctgcctcctcaacactgagctctcacatcaccatgtcctcctctgctttccctgcttctccccagcagcatgctggctccaacccaggcaaagggttacaaccacctataaccagtccccagccagcttcctcagctccatattaccatcacagcctgattacaatagcagtaaaatcccttccgctatggattccaactatcaacagtcctcagctggccaacctataaatgcaaagccatcccaaactgcaaatgctaagcccataccaagaactcctgatcatgaaatacaaggatcaaaagaagctttgattcaagatttggaaagaaagctgaaatgcaaggacacccttcttcataatggaaatcaacgtctaacatatgaagagaagatggctcgcagattgctaggaccacagaatgcagctgctgtgtttcaagctcaggatgacagtggtgcacaagactcgcagcaacacaactcagaacatgcgcgactgcaagttcctacatcacaagtaagaagtagatcaacctcaaggggagatgtgaatgatcaggatgcaatccaggagaaattttacccaccacgtttcattcaagtgccagagaacatgtcgattgatgaaggaagattctgcagaatggacttcaaagtgagtggactgccagctcctgatgtgtcatggtatctaaatggaagaacagttcaatcagatgatttgcacaaaatgatagtgtctgagaagggtcttcattcactcatctttgaagtagtcagagcttcagatgcaggggcttatgcatgtgttgccaagaatagagcaggagaagccaccttcactgtgcagctggatgtccttgcaaaagaacataaaagagcaccaatgtttatctacaaaccacagagcaaaaaagttttagagggagattcagtgaaactagaatgccagatctcggctatacctccaccaaagcttttctggaaaagaaataatgaaatggtacaattcaacactgaccgaataagcttatatcaagataacactggaagagttactttactgataaaagatgtaaacaagaaagatgctgggtggtatactgtgtcagcagttaatgaagctggagtgactacatgtaacacaagattagacgttacggcacgtccaaaccaaactcttccagctcctaagcagttacgggttcgaccaacattcagcaaatatttagcacttaatgggaaaggtttgaatgtaaaacaagcttttaacccagaaggagaatttcagcgtttggcagctcaatctggactctatgaaagtgaagaactttaataactttaccaacattggaaaacagccaactacaccattagtaatatatttgattacatttttttgaaattaatccatagctgtattaacagattatggttttaattaggtaatatagttaatatatatttataatattatttatcctttgactcttgcacattctatgtacccctccgatttgtgaagcctacaggaaatctgggtatatggatttgtaactgcagaagactatcttaaaatacaggattttaacatttaagtcatgcacatttaacaattacaggttataaattagtatcaactttttaaacacatctaatgcttgtaataacgtttactggtactgctttctaaatactgttttacccgttttctcttgtaggaatactaacatggtatagattatctgagtgttccacagttgtatgtcaaaagaaaataaaattcaaatatttaaaacgga

SEQ ID NO: 360760 - DNA, 1986 bp, Homo sapiens
gatggacaggcaagcacatcagatgtcactgtttggcagctgataaaagtcagtggtgctataatactaagacagagccactagattagtctgtgagggaaggagatgcctcttccttcccttcaatagtgggttaaacccagctggcaccctctggaactacgggaacaatattcttcaagagaaggtcactctaccaaagccaggagcacagtattctcaggatctcaacaaggaagagcagaccaagatgctggctccaacccaggcaaagggttacaaccacctataaccagtccccagccagcttcctcagctccatattaccatcacagcctgattacaatagcagtaaaatcccttccgctatggattccaactatcaacagtcctcagctggccaacctataaatgcaaagccatcccaaactgcaaatgctaagcccataccaagaactcctgatcatgaaatacaaggatcaaaagaagctttgattcaagatttggaaagaaagctgaaatgcaaggacacccttcttcataatggaaatcaacgtctaacatatgaagagaagatggctcgcagattgctaggaccacagaatgcagctgctgtgtttcaagctcaggatgacagtggtgcacaagactcgcagcaacacaactcagaacatgcgcgactgcaagttcctacatcacaagtaagaagtagatcaacctcaaggggagatgtgaatgatcaggatgcaatccaggagaaattttacccaccacgtttcattcaagtgccagagaacatgtcgattgatgaaggaagattctgcagaatggacttcaaagtgagtggactgccagctcctgatgtgtcatggtatctaaatggaagaacagttcaatcagatgatttgcacaaaatgatagtgtctgagaagggtcttcattcactcatctttgaagtagtcagagcttcagatgcaggggcttatgcatgtgttgccaagaatagagcaggagaagccaccttcactgtgcagctggatgtccttgcaaaagaacataaaagagcaccaatgtttatctacaaaccacagagcaaaaaagttttagagggagattcagtgaaactagaatgccagatctcggctatacctccaccaaagcttttctggaaaagaaataatgaaatggtacaattcaacactgaccgaataagcttatatcaagataacactggaagagttactttactgataaaagatgtaaacaagaaagatgctgggtggtatactgtgtcagcagttaatgaagctggagtgactacatgtaacacaagattagacgttacggcacgtccaaaccaaactcttccagctcctaagcagttacgggttcgaccaacattcagcaaatatttagcacttaatgggaaaggtttgaatgtaaaacaagcttttaacccagaaggagaatttcagcgtttggcagctcaatctggactctatgaaagtgaagaactttaataactttaccaacattggaaaacagccaactacaccattagtaatatatttgattacatttttttgaaattaatccatagctgtattaacagattatggttttaattaggtaatatagttaatatatatttataatattatttatcctttgactcttgcacattctatgtacccctccgatttgtgaagcctacaggaaatctgggtatatggatttgtaactgcagaagactatcttaaaatacaggattttaacatttaagtcatgcacatttaacaattacaggttataaattagtatcaactttttaaacacatctaatgcttgtaataacgtttactggtactgctttctaaatactgttttacccgttttctcttgtaggaatactaacatggtatagattatctgagtgttccacagttgtatgtcaaaagaaaataaaattcaaatatttaaaacgga

SEQ ID NO: 360761 - DNA, 1966 bp, Homo sapiens
gatggacaggcaagcacatcagatgtcactgtttggcagctgataaaagtcagtggtgctataatactaagacagagccactagattagtctgtgagggaaggagatgcctcttccttcccttcaatagtgggttaaacccagctggcaccctctggaactacgggaacaatattcttcaagagaaggtcactctaccaaagccaggagcacagtattctcaggatctcaacaaggaagagcagaccaaggttgcttctgattccttacaaccttccgtaattccaggcttgtggccccaaattcagggccccacccttccaggaacaaatcattatagtaataatttgccttcatcttccatataccaactaagcatgtttaactacgaacgtccaaaacacttcatccagtcccaaaacccatgtggctccagattgcagcctcctggaccagaaacctccagcttctctagccagaccaaacagtcttccattatcatccagccccgccagtgtacagagcaaagattttctgcctcctcaacactgagctctcacatcaccatgtcctcctctgctttccctgcttctccccagcagcatgctggctccaacccaggcaaagggttacaaccacctataaccagtccccagccagcttcctcagctccatattaccatcacaaagtagatcaacctcaaggggagatgtgaatgatcaggatgcaatccaggagaaattttacccaccacgtttcattcaagtgccagagaacatgtcgattgatgaaggaagattctgcagaatggacttcaaagtgagtggactgccagctcctgatgtgtcatggtatctaaatggaagaacagttcaatcagatgatttgcacaaaatgatagtgtctgagaagggtcttcattcactcatctttgaagtagtcagagcttcagatgcaggggcttatgcatgtgttgccaagaatagagcaggagaagccaccttcactgtgcagctggatgtccttgcaaaagaacataaaagagcaccaatgtttatctacaaaccacagagcaaaaaagttttagagggagattcagtgaaactagaatgccagatctcggctatacctccaccaaagcttttctggaaaagaaataatgaaatggtacaattcaacactgaccgaataagcttatatcaagataacactggaagagttactttactgataaaagatgtaaacaagaaagatgctgggtggtatactgtgtcagcagttaatgaagctggagtgactacatgtaacacaagattagacgttacggcacgtccaaaccaaactcttccagctcctaagcagttacgggttcgaccaacattcagcaaatatttagcacttaatgggaaaggtttgaatgtaaaacaagcttttaacccagaaggagaatttcagcgtttggcagctcaatctggactctatgaaagtgaagaactttaataactttaccaacattggaaaacagccaactacaccattagtaatatatttgattacatttttttgaaattaatccatagctgtattaacagattatggttttaattaggtaatatagttaatatatatttataatattatttatcctttgactcttgcacattctatgtacccctccgatttgtgaagcctacaggaaatctgggtatatggatttgtaactgcagaagactatcttaaaatacaggattttaacatttaagtcatgcacatttaacaattacaggttataaattagtatcaactttttaaacacatctaatgcttgtaataacgtttactggtactgctttctaaatactgttttacccgttttctcttgtaggaatactaacatggtatagattatctgagtgttccacagttgtatgtcaaaagaaaataaaattcaaatatttaaaacgga

SEQ ID NO: 360762 - DNA, 1857 bp, Homo sapiens
gatggacaggcaagcacatcagatgtcactgtttggcagctgataaaagtcagtggtgctataatactaagacagagccactagattagtctgtgagggaaggagatgcctcttccttcccttcaatagtgggttaaacccagctggcaccctctggaactacgggaacaatattcttcaagagaaggtcactctaccaaagccaggagcacagtattctcaggatctcaacaaggaagagcagaccaagctatcaacagtcctcagctggccaacctataaatgcaaagccatcccaaactgcaaatgctaagcccataccaagaactcctgatcatgaaatacaaggatcaaaagaagctttgattcaagatttggaaagaaagctgaaatgcaaggacacccttcttcataatggaaatcaacgtctaacatatgaagagaagatggctcgcagattgctaggaccacagaatgcagctgctgtgtttcaagctcaggatgacagtggtgcacaagactcgcagcaacacaactcagaacatgcgcgactgcaagttcctacatcacaagtaagaagtagatcaacctcaaggggagatgtgaatgatcaggatgcaatccaggagaaattttacccaccacgtttcattcaagtgccagagaacatgtcgattgatgaaggaagattctgcagaatggacttcaaagtgagtggactgccagctcctgatgtgtcatggtatctaaatggaagaacagttcaatcagatgatttgcacaaaatgatagtgtctgagaagggtcttcattcactcatctttgaagtagtcagagcttcagatgcaggggcttatgcatgtgttgccaagaatagagcaggagaagccaccttcactgtgcagctggatgtccttgcaaaagaacataaaagagcaccaatgtttatctacaaaccacagagcaaaaaagttttagagggagattcagtgaaactagaatgccagatctcggctatacctccaccaaagcttttctggaaaagaaataatgaaatggtacaattcaacactgaccgaataagcttatatcaagataacactggaagagttactttactgataaaagatgtaaacaagaaagatgctgggtggtatactgtgtcagcagttaatgaagctggagtgactacatgtaacacaagattagacgttacggcacgtccaaaccaaactcttccagctcctaagcagttacgggttcgaccaacattcagcaaatatttagcacttaatgggaaaggtttgaatgtaaaacaagcttttaacccagaaggagaatttcagcgtttggcagctcaatctggactctatgaaagtgaagaactttaataactttaccaacattggaaaacagccaactacaccattagtaatatatttgattacatttttttgaaattaatccatagctgtattaacagattatggttttaattaggtaatatagttaatatatatttataatattatttatcctttgactcttgcacattctatgtacccctccgatttgtgaagcctacaggaaatctgggtatatggatttgtaactgcagaagactatcttaaaatacaggattttaacatttaagtcatgcacatttaacaattacaggttataaattagtatcaactttttaaacacatctaatgcttgtaataacgtttactggtactgctttctaaatactgttttacccgttttctcttgtaggaatactaacatggtatagattatctgagtgttccacagttgtatgtcaaaagaaaataaaattcaaatatttaaaacgga

SEQ ID NO: 360763 - DNA, 1717 bp, Homo sapiens
gatggacaggcaagcacatcagatgtcactgtttggcagctgataaaagtcagtggtgctataatactaagacagagccactagattagtctgtgagggaaggagatgcctcttccttcccttcaatagtgggttaaacccagctggcaccctctggaactacgggaacaatattcttcaagagaaggtcactctaccaaagccaggagcacagtattctcaggatctcaacaaggaagagcagaccaaggttgcttctgattccttacaaccttccgtaattccaggcttgtggccccaaattcagggccccacccttccaggaacaaatcattatagtaataatttgccttcatcttccatataccaactaagcatgtttaactacgaacgtccaaaacacttcatccagtcccaaaacccatgtggctccagattgcagcctcctggaccagaaacctccagcttctctagccagaccaaacagtcttccattatcatccagccccgccagtgtacagagcaaagattttctgcctcctcaacactgagctctcacatcaccatgtcgtgagtggactgccagctcctgatgtgtcatggtatctaaatggaagaacagttcaatcagatgatttgcacaaaatgatagtgtctgagaagggtcttcattcactcatctttgaagtagtcagagcttcagatgcaggggcttatgcatgtgttgccaagaatagagcaggagaagccaccttcactgtgcagctggatgtccttgcaaaagaacataaaagagcaccaatgtttatctacaaaccacagagcaaaaaagttttagagggagattcagtgaaactagaatgccagatctcggctatacctccaccaaagcttttctggaaaagaaataatgaaatggtacaattcaacactgaccgaataagcttatatcaagataacactggaagagttactttactgataaaagatgtaaacaagaaagatgctgggtggtatactgtgtcagcagttaatgaagctggagtgactacatgtaacacaagattagacgttacggcacgtccaaaccaaactcttccagctcctaagcagttacgggttcgaccaacattcagcaaatatttagcacttaatgggaaaggtttgaatgtaaaacaagcttttaacccagaaggagaatttcagcgtttggcagctcaatctggactctatgaaagtgaagaactttaataactttaccaacattggaaaacagccaactacaccattagtaatatatttgattacatttttttgaaattaatccatagctgtattaacagattatggttttaattaggtaatatagttaatatatatttataatattatttatcctttgactcttgcacattctatgtacccctccgatttgtgaagcctacaggaaatctgggtatatggatttgtaactgcagaagactatcttaaaatacaggattttaacatttaagtcatgcacatttaacaattacaggttataaattagtatcaactttttaaacacatctaatgcttgtaataacgtttactggtactgctttctaaatactgttttacccgttttctcttgtaggaatactaacatggtatagattatctgagtgttccacagttgtatgtcaaaagaaaataaaattcaaatatttaaaacgga

SEQ ID NO: 360764 - DNA, 1516 bp, Homo sapiens
gatggacaggcaagcacatcagatgtcactgtttggcagctgataaaagtcagtggtgctataatactaagacagagccactagattagtctgtgagggaaggagatgcctcttccttcccttcaatagtgggttaaacccagctggcaccctctggaactacgggaacaatattcttcaagagaaggtcactctaccaaagccaggagcacagtattctcaggatctcaacaaggaagagcagaccaagctatcaacagtcctcagctggccaacctataaatgcaaagccatcccaaactgcaaatgctaagcccataccaagaactcctgatcatgaaatacaaggatcaaaagaagctttgattcaagatttggaaagaaagctgaaatgcaaggacacccttcttcataatggaaatcaacgtctaacatatgaagagaagatggctcgcagattgctaggaccacagaatgcagctgctgtgtttcaagctcaggatgacagtggtgcacaagactcgcagcaacacaactcagaacatgcgcgactgcaagttcctacatcacaagtaagcaaaagaacataaaagagcaccaatgtttatctacaaaccacagagcaaaaaagttttagagggagattcagtgaaactagaatgccagatctcggctatacctccaccaaagcttttctggaaaagaaataatgaaatggtacaattcaacactgaccgaataagcttatatcaagataacactggaagagttactttactgataaaagatgtaaacaagaaagatgctgggtggtatactgtgtcagcagttaatgaagctggagtgactacatgtaacacaagattagacgttacggcacgtccaaaccaaactcttccagctcctaagcagttacgggttcgaccaacattcagcaaatatttagcacttaatgggaaaggtttgaatgtaaaacaagcttttaacccagaaggagaatttcagcgtttggcagctcaatctggactctatgaaagtgaagaactttaataactttaccaacattggaaaacagccaactacaccattagtaatatatttgattacatttttttgaaattaatccatagctgtattaacagattatggttttaattaggtaatatagttaatatatatttataatattatttatcctttgactcttgcacattctatgtacccctccgatttgtgaagcctacaggaaatctgggtatatggatttgtaactgcagaagactatcttaaaatacaggattttaacatttaagtcatgcacatttaacaattacaggttataaattagtatcaactttttaaacacatctaatgcttgtaataacgtttactggtactgctttctaaatactgttttacccgttttctcttgtaggaatactaacatggtatagattatctgagtgttccacagttgtatgtcaaaagaaaataaaattcaaatatttaaaacgga

SEQ ID NO: 360765 - DNA, 2045 bp, Homo sapiens
gatggacaggcaagcacatcagatgtcactgtttggcagctgataaaagtcagtggtgctataatactaagacagagccactagattagtctgtgagggaaggagatgcctcttccttcccttcaatagtgggttaaacccagctggcaccctctggaactacgggaacaatattcttcaagagaaggtcactctaccaaagccaggagcacagtattctcaggatctcaacaaggaagagcagaccaaggttgcttctgattccttacaaccttccgtaattccaggcttgtggccccaaattcagggccccacccttccaggaacaaatcattatagtaataatttgccttcatcttccatataccaactaagcatgtttaactacgaacgtccaaaacacttcatccagtcccaaaacccatgtggctccagattgcagcctcctggaccagaaacctccagcttctctagccagaccaaacagtcttccattatcatccagccccgccagtgtacagagcaaagattttctgcctcctcaacactgagctctcacatcaccatgtcctcctctgctttccctgcttctccccagcagcatgctggctccaacccaggcaaagggttacaaccacctataaccagtccccagccagcttcctcagctccatattaccatcacagcctgattacaatagcagtaaaatcccttccgctatggattccaactatcaacagtcctcagctggccaacctataaatgcaaagccatcccaaactgcaaatgctaagcccataccaagaactcctgatcatgaaatacaaggatcaaaagaagctttgattcaagatttggaaagaaagctgaaatgcaaggacacccttcttcataatggaaatcaacgtctaacatatgaagagaagatggctcgcagattgctaggaccacagaatgcagctgctgtgtttcaagctcaggatgacagtggtgcacaagactcgcagcaacacaactcagaacatgcgcgactgcaagttcctacatcacaagtaagaagtagatcaacctcaaggggagatgtgaatgatcaggatgcaatccaggagaaattttacccaccacgtttcattcaagtgccagagaacatgtcgattgatgaaggaagattctgcagaatggacttcaaagtgagtggactgccagctcctgatgtgtcatggtatctaaatggaagaacagttcaatcagatgatttgcacaaaatgatagtgtctgagaagggtcttcattcactcatctttgaagtagtcagagcttcagatgcaggggcttatgcatgtgttgccaagaatagagcaggagaagccaccttcactgtgcagctggatgtccttgcaaaagaacataaaagagcaccaatgtttatctacaaaccacagagcaaaaaagttttagagggagattcagtgaaactagaatgccagatctcggctatacctccaccaaagcttttctggaaaagaaataatgaaatggtacaattcaacactgaccgaataaggtaggatatgtatttctagacttactatagtttatttgggtgaatccagttatactttttaacatgcattataaatggcatgcatttatctcaatttgtctagtttttaaaacactaaagaataatataataaaatatatattagataaaaatgtaagaaaacttcagtaagccagattccactaatcagaaatgtaaggcataaagtagactaggatttatctttttatcaacgatgatgaaagatggcccaaggaaataaatgacataaacaagattaaagggggatgttttcttttcttttctttctttacaaaaagcttcagcctttattaaacaaaggaggaggtaggagacagataacggaacaggtcaggacccctccattcccctatacatacgcataaatacaaacacagacacacccgagtgaatgacagggaccatcaggggacagattgaagagcagagggagacagc

SEQ ID NO: 360766 - DNA, 404 bp, Homo sapiens
tgcctcacagtgtcatcagagccaggggaggacaggagaagtgagcacaccgttgctgggaggtgcatcctgccaagcccagcccgtggctctgatgcccacgggctccagcatgcagtccagagtgcagaggctgtgtgcagcaggggtgtgacaggcccctgggtgggctgacgggaggccccacccacccatacacacctggggtgctcgggggtggggggttgctggtagggtcctggcctgaagcctgcgaggcctggatgtcaggccaggctctgggggtgggccggggatgcctctgggcacctgctgccgcctccatacactactgactgtctcatgtggcctctggccattgccctgctgtctctgttcccggaaagtggtcccaattcagatcc

SEQ ID NO: 360767 - DNA, 510 bp, Homo sapiens
tgcagcagaattcattccatgtcccctctggatattagactgataatttggatcaggtctcagcatgggccattgaggaacactacagccctgctgagagataaaaaggattatccactcaaggagttcacacctccgggccgacatggagaacgtgcctagaagcagacttggagggtgctcagtggtgggttgtggaatgtaagcctgaagaagcagagtttaattctacgggggtgctttcataatttagtaccctgacagggctcctggtgttggtccttagacactcctgggatggctccctggaaacatggaggaaaccttggtcgcatgacatgatacggagatgttggagctgcctggacacagttacagagggaggcattaaaaggcttcgagagaaccctaaaccttgaatcagccttatagtcctggctcctagaagagtgtttctcaaagtgtactccacggaccacctggataagaagcacgtgaggcttttaatta

SEQ ID NO: 360768 - DNA, 467 bp, Homo sapiens
agaaaatgactcttcctgtctcaaaatgcagtccttcattctgattgatgaattggaagcacatggctggtgtaaagaataagaaactaattataagccaggaaacagcaggagaagaaagcagagaagcaacgcttaccctgaagaattaatttccgtttagaaaatatcacagctgatgtgtcaaaggccccggtatgcaggaatgagattaaacaaatgtggtcatgaggaagaggtttctgaataatgatagagaagcttgagtctacaagaaatccagagtccagaatactgcaggggagcagtgctgggttcatgtttatctggtctcttgtctattggatcctctttcttccagaaccctaaaccttgaatcagccttatagtcctggctcctagaagagtgtttctcaaagtgtactccacggaccacctggataagaagcacgtgaggcttttaatta

SEQ ID NO: 360769 - DNA, 2073 bp, Homo sapiens
cgcgagacgggtgcgcttacgccacggcgtctgctggcggccgcggagacgcagagtcttgagcagcgcggcaggtgagtagctgtgcgaattcggttctctagggaactccttcttcgcctgctggccttacctgggctccccgcttctctggaggggaggcggtgcgggaactcccgtaggcgtgagctggagcgcgcgcccgctgctctctccaggtcccgccgcgccagttcgcctccgcaaagcccgtccctctcttccgcaggcaccatgttcctgactgcgctcctctggcgcggccgcattcccggccgtcagtggatcgggaagcaccggcggccgcggttcgtgtcgttgcgcgccaagcagaacatgatccgccgcctggagatcgaggcggagaaccattactggctgagcatgccctacatgacccgggagcaggagcgcggccacgccgcggtgcgcaggagggaggccttcgaggccataaaggcggccgccacttccaagttccccccgcatagattcattgcggaccagctcgaccatctcaatgtcaccaagaaatggtcctaatcctgagtcgtcacccttggattttatggatcacggagctgaccatctttacctggtcctggaactgaaaaactgtagcttgtgtgaaaatgagcctttggaccagtctttattaaaacaaacaaacatgagtagtctgcatatcgaatatctagagctctaaaccccccaatacttaaaagtctaattgctgtcctgtggtttcattagtctgataggaagatagggatttcctcagtcacagatgatattttgaaggaaagctgcaataaagccacaatgatttgaggtctttgcttaagtatgagatacttgatgggggctttatcatgcaacattagtttgcttaccttaagaattgcccaaaaatgaaagaaaatatgagcttttcagttaaacatactcctaaaaacattttccgggattttactactaaaattggacatttaagcgaagtaaaagaggccgggtgcggtggctcacgcctgtaatcccaacactttaggagtccaaggcgggcggatcacttgaggtcaggagttcaagaccagcttggccaaggtgataaaacccgtctctactaatacaaaaaaaattagctgggtatgttggtgcaggcttgcaatcccagctacttgggacgctgaggtgggaggatcgcctgaacctcagaggcagaggttgcaatgaagcggaggttgcagtgagccgagagcatgccgctgcactccagcctgggagactgcatctcaaaaaagaaaaataaacgaagtaaaagatatttatcagaactgttacaggaaggtgtattttttagctattttggcagggtgctgtggtgcttgcatgtagtcccagctattcaggaatattgcttgagtccagcttgggcaacatagcgagaccctatctaaaataacaataatatatggccaggcgggatggctcacgcctgtaatcccagcactttgggaggcttaggcagaaggatcacctgagatcaggagttccagaccagcctggccaacatggcgaaaccccatctctactaaaaatacaaaaattagccgggcgtggtggcttacgcctgtaatcccagcactttgggaggccaaggtgggcggatcacaaggtcaggagttcgagaccagcctggccaatatggtgaaaccccatctctactaaaaatataaaaatcagcaaaaaaaatttagccaggcttggtcatgcatgcctgtaatcctagctactgggaaggctgaggaaggagaattgcttgaacccaggtggtggaggttgcagtgagctgagatcgtgccactgctctccagcctgcatgacgggagtgagacaccatctcaaaaaatacatataataatataaataaaaatatcttttttgaaaataatttaatataccatgtaatttaccagttgaagatgttcgctttcagaatataataaaaatagtcaaaaactttgtgtttctaaa

SEQ ID NO: 360770 - DNA, 1256 bp, Homo sapiens
agagcatgccgctgcactccagcctgggagactgcatcaacatacccagctaattttttttgttaagtatgagatacttgatgggggctttatcatgcaacattagtttgcttaccttaagaattgcccaaaaatgaaagaaaatatgagcttttcagttaaacatactcctaaaaacattttccgggattttactactaaaattggacatttaagcgaagtaaaagaggccgggtgcggtggctcacgcctgtaatcccaacactttaggagtccaaggcgggcggatcacttgaggtcaggagttcaagaccagcttggccaaggtgataaaacccgtctctactaatacaaaaaaaattagctgggtatgttggtgcaggcttgcaatcccagctacttgggacgctgaggtgggaggatcgcctgaacctcagaggcagaggttgcaatgaagcggaggttgcagtgagccgagagcatgccgctgcactccagcctgggagactgcatctcaaaaaagaaaaataaacgaagtaaaagatatttatcagaactgttacaggaaggtgtattttttagctattttggcagggtgctgtggtgcttgcatgtagtcccagctattcaggaatattgcttgagtccagcttgggcaacatagcgagaccctatctaaaataacaataatatatggccaggcgggatggctcacgcctgtaatcccagcactttgggaggcttaggcagaaggatcacctgagatcaggagttccagaccagcctggccaacatggcgaaaccccatctctactaaaaatacaaaaattagccgggcgtggtggcttacgcctgtaatcccagcactttgggaggccaaggtgggcggatcacaaggtcaggagttcgagaccagcctggccaatatggtgaaaccccatctctactaaaaatataaaaatcagcaaaaaaaatttagccaggcttggtcatgcatgcctgtaatcctagctactgggaaggctgaggaaggagaattgcttgaacccaggtggtggaggttgcagtgagctgagatcgtgccactgctctccagcctgcatgacgggagtgagacaccatctcaaaaaatacatataataatataaataaaaatatcttttttgaaaataatttaatataccatgtaatttaccagttgaagatgttcgctttcagaatataataaaaatagtcaaaaactttgtgtttctaaa

SEQ ID NO: 360771 - DNA, 757 bp, Homo sapiens
gatgatattttgaaggaaagctgcaataaagccacaatgatttgaggtctttgcttaagtatgagatacttgatgggggctttatcatgcaacattagtttgcttaccttaagaattgcccaaaaatgaaagaaaatatgagcttttcagttaaacatactcctaaaaacattttccgggattttactactaaaattggacatttaagcgaagtaaaagaggccgggtgcggtggctcacgcctgtaatcccaacactttaggagtccaaggcgggcggatcacttgaggtcaggagttcaagaccagcttggccaaggtgataaaacccgtctctactaatacaaaaaaaattagctgggtatgttggtgcaggcttgcaatcccagctacttgggacgctgaggtgggaggatcgcctgaacctcagaggcagaggttgcaatgaagcggaggttgcagtgagccgagagcatgccgctgcactccagcctgggagactgcatctcaaaaaagaaaaataaacgaagtaaaagatatttatcagaactgttacaggaaggtgtattttttagctattttggcagggtgctgtggtgcttgcatgtagtcccagctattcaggaatattgcttgagtccagcttgggcaacatagcgagaccctatctaaaataacaataatatatggccaggcgggatggctcacgcctgtaatcccagcactttgggaggctgaggcgggcagatcacttgagg

SEQ ID NO: 360772 - DNA, 1879 bp, Homo sapiens
cgcgagacgggtgcgcttacgccacggcgtctgctggcggccgcggagacgcagagtcttgagcagcgcggcaggcaccatgttcctgactgcgctcctctggcgcggccgcattcccggccgtcagtggatcgggaagcaccggcggccgcggttcgtgtcgttgcgcgccaagcagaacatgatccgccgcctggagatcgaggcggagaaccattactggctgagcatgccctacatgacccgggagcaggagcgcggccacgccgcggtgcgcaggagggaggccttcgaggccataaaggcggccgccacttccaagttccccccgcatagattcattgcggaccagctcgaccatctcaatgtcaccaagaaatggtcctaatcctgagtcgtcacccttggattttatggatcacggagctgaccatctttacctggtcctggaactgaaaaactgtagcttgtgtgaaaatgagcctttggaccagtctttattaaaacaaacaaacatgagtagtctgcatatcgaatatctagagctctaaaccccccaatacttaaaagtctaattgctgtcctgtggtttcattagtctgataggaagatagggatttcctcagtcacagatgatattttgaaggaaagctgcaataaagccacaatgatttgaggtctttgcttaagtatgagatacttgatgggggctttatcatgcaacattagtttgcttaccttaagaattgcccaaaaatgaaagaaaatatgagcttttcagttaaacatactcctaaaaacattttccgggattttactactaaaattggacatttaagcgaagtaaaagaggccgggtgcggtggctcacgcctgtaatcccaacactttaggagtccaaggcgggcggatcacttgaggtcaggagttcaagaccagcttggccaaggtgataaaacccgtctctactaatacaaaaaaaattagctgggtatgttggtgcaggcttgcaatcccagctacttgggacgctgaggtgggaggatcgcctgaacctcagaggcagaggttgcaatgaagcggaggttgcagtgagccgagagcatgccgctgcactccagcctgggagactgcatctcaaaaaagaaaaataaacgaagtaaaagatatttatcagaactgttacaggaaggtgtattttttagctattttggcagggtgctgtggtgcttgcatgtagtcccagctattcaggaatattgcttgagtccagcttgggcaacatagcgagaccctatctaaaataacaataatatatggccaggcgggatggctcacgcctgtaatcccagcactttgggaggcttaggcagaaggatcacctgagatcaggagttccagaccagcctggccaacatggcgaaaccccatctctactaaaaatacaaaaattagccgggcgtggtggcttacgcctgtaatcccagcactttgggaggccaaggtgggcggatcacaaggtcaggagttcgagaccagcctggccaatatggtgaaaccccatctctactaaaaatataaaaatcagcaaaaaaaatttagccaggcttggtcatgcatgcctgtaatcctagctactgggaaggctgaggaaggagaattgcttgaacccaggtggtggaggttgcagtgagctgagatcgtgccactgctctccagcctgcatgacgggagtgagacaccatctcaaaaaatacatataataatataaataaaaatatcttttttgaaaataatttaatataccatgtaatttaccagttgaagatgttcgctttcagaatataataaaaatagtcaaaaactttgtgtttctaaa

SEQ ID NO: 360773 - DNA, 582 bp, Homo sapiens
tattagactgagattttatttatatgagccaagaaaccaaaataaaacacccatatttctaatttgagagatcaagcagtgctaaaaatcacataactgtaggcagttctttaatcaatcagtccaaactttcactcttctgtggtaagaggaagaattcttttgagaccatttttagttctaatttccttttttggtatattaagaagaagataaaagaataatatatatctttcagctcctaggcatgtagaatttatataaacttgagcaattctgtgatatgtttgccactaataaaatgaataatgtcatttgactgcttggagatcacttattaaaccataaatctattattttgcttttagtatgctgaaattgataaagccccagatgaaagcccttacattggcaaatccagatacaagagaaatatgtttgccacagagagttatattattgacagtgctcaggcagtacagatcaagaagatggagccagatgaacaacttagaaatgatcacatgaacttgagaggccacacaccactggacacgcaactggaagacaaagaaaaaaaaa

SEQ ID NO: 360774 - DNA, 546 bp, Homo sapiens
gaacccaagattagttgacagtgttgattgtgagttgctttcttgagactcggagacttatgatcattcagtgaaaatatcaatgtgggtaatgtgctggacaccctgcagcagtacatcgaaggcagcatggaagaataggcagtattggatttgaaatcaggagacttggaattgaattctgcctcttccactaccagctgtgaaattggctaaaacagaagaccatagaattaacacgagcatgtcagaagcaatatgagctggaacaggaattggccttttataaaattgatgctaaatttgagccactaaattattatccatcagagtatgctgaaattgataaagccccagatgaaagcccttacattggcaaatccagatacaagagaaatatgtttgccacagagagttatattattgacagtgctcaggcagtacagatcaagaagatggagccagatgaacaacttagaaatgatcacatgaacttgagaggccacacaccactggacacgcaactggaagacaaagaaaaaaaaa

SEQ ID NO: 360775 - DNA, 1762 bp, Homo sapiens
ctggctgcaaaagaggcgggaaacgcctccgcgtcccttccaacagtaccggagagggagaggggcgtggctgagactagccccgaccacgcgcgcgcggcccctcggcaaccggcacaacacaacaaaatggctgccgcgccgctgggcccctgaggaaagagcccgaacttctcccgctctacctcagcctgcgggactgctcggctcggcttctaggcgagacaggggctccctgtgtttcccaggctgcagtgcagtggccagtcacaaggttgatcatagcacattgtagcctggagctcctgggatcaagcaatcctcctgcctcatcctctggagtaactgggactgcaagtatacataccgtgcctgacgaaatatcacaatatttggttttgatgaacacctggctttattcttgcaatgaagaaaggttctcaacaaaaaatattctccaaagcaaagataccatcatcatctcactctcctatcccatcatctatgtccaatatgagatctaggtcactttcacctttgattggatcagagactctaccttttcattctggaggacagtggtgtgagcaagttgagattgcagatgaaaacaatatgcttttggactatcaagaccataaaggagctgattcacatgcaggagttagatatattacagaggccctcattaaaaaacttactaaacaggataatttggctttgataaaatctctgaacctttcactttctaaagacggtggcaagaaatttaagtatattgagaatttggaaaaatgtgttaaacttgaagtactgaatctcagctataatctaatagggaagattgaaaagttggacaagctgttaaaattacgtgaactcaacttatcatataacaaaatcagcaaaattgaaggcatagaaaatatgtgtaatctgcaaaagcttaaccttgcaggaaatgaaattgagcatattccagtatggttagggaagaagttaaaatctttgcgagtcctcaatttgaaaggcaacaagatatcatcgctccaagatataagcaagttgaaaccgcttcaagatttgatttctctgatcctagttgaaaatccagttgtgacccttcctcattacctccagtttaccattttccacctccgttcattggaaagtttggaaggtcagccagtaaccactcaggatagacaggaggcttttgagagattcagtttagaagaggtagaaagactggaaagagacctagaaaaaaagatgatagaaactgaagagcttaagagcaaacaaacaaggttccttgaggaaattaaaaatcaagataaattgaataaatcattaaaagaggaggccatgttacagaaacagagctgtgaggaactcaagagtgacttaaacacaaaaaatgaattgctaaaacagaagaccatagaattaacacgagcatgtcagaagcaatatgagctggaacaggaattggccttttataaaattgatgctaaatttgagccactaaattattatccatcagagtatgctgaaattgataaagccccagatgaaagcccttacattggcaaatccagatacaagagaaatatgtttgccacagagagttatattattgacagtgctcaggcagtacagatcaagaagatggagccagatgaacaacttagaaatgatcacatgaacttgagaggccacacaccactggacacgcaactggaagacaaagaaaaaaaaa

SEQ ID NO: 360776 - DNA, 1255 bp, Homo sapiens
ctggctgcaaaagaggcgggaaacgcctccgcgtcccttccaacagtaccggagagggagaggggcgtggctgagactagccccgaccacgcgcgcgcggcccctcggcaaccggcacaacacaacaaaatggctgccgcgccgctgggcccctgaggaaagagcccgaacttctcccgctctacctcagcctgcgggactgctcggctcggcttctaggcgagacaggggctccctgtgtttcccaggctgcagtgcagtggccagtcacaaggttgatcatagcacattgtagcctggagctcctgggatcaagcaatcctcctgcctcatcctctggagtaactgggactgcaagtatacataccgtgcctgacgaaatatcacaatatttggttttgatgaacacctggctttattcttgcaatgaagaaaggttctcaacaaaaaatattctccaaagcaaagataccatcatcatctcactctcctatcccatcatctatgtccaatatgagatctaggtcactttcacctttgattggatcagagactctaccttttcattctggaggacagtggtgtgagcaagttgagattgcagatgaaaacaatatgcttttggactatcaagaccataaaggagctgattcacatgcaggagttagatatattacagaggccctcattaaaaaacttactaaacaggataatttggctttgataaaatctctgaacctttcactttctaaagacggtggcaagaaatttaagtatattgagaatttggaaaaatgtgttaaacttgaagtactgaatctcagctataatctaatagggaagattgaaaagttggacaagctgttaaaattacgtgaactcaacttatcatataacaaaatcagcaaaattgaaggcatagaaaatatgtgtaatctgcaaaagcttaaccttgcaggaaatgaaattgagcatattccagtatggttagggaagaagttaaaatctttgcgagtcctcaatttgaaaggcaacaagatatcatcgctccaagatataagcaagttgaaaccgcttcaagatttgatttctctgatcctagttgaaaatccagttgtgacccttcctcattacctccagtttaccattttccacctccgttcattggaaagtttggaaggtcagccagtaaccactcaggatagacaggaggcttttgagagattcagtttaggtaagattaaatttaaaaaat

SEQ ID NO: 360777 - DNA, 534 bp, Homo sapiens
tgactgatcaaacagaccctgatgcacataagtaaatgttgtactttatgtcaagtcatctgttgtgtaaagtattcattcatttgtttccaattagtatattgagaatttggaaaaatgtgttaaacttgaagtactgaatctcagctataatctaatagggaagattgaaaagttggacaagctgttaaaattacgtgaactcaacttatcatataacaaaatcaggtgagttatataacaaaatctttaggcagcattgcagatagctttgttagagaggtagattaatgttatccacattactgaaagaatgatttgacagaaacagaagatatttttatctttattcatcaatcaaatgaatgtctgtctcttcacatatggtaggtaactgtctttatgttttggcattactgaagtacagaataacatctagcattatcaaagagatatatttttgagcaccaaattgtatcttaatttcatttctgacaggaagttttcccagatattgtctgtgatttattacct

SEQ ID NO: 360778 - DNA, 1589 bp, Homo sapiens
ctggctgcaaaagaggcgggaaacgcctccgcgtcccttccaacagtaccggagagggagaggggcgtggctgagactagccccgaccacgcgcgcgcggcccctcggcaaccggcacaacacaacaaaatggctgccgcgccgctgggcccctgaggaaagagcccgaacttctcccgctctacctcagcctgcgggactgctcggctcggcttctaggcggttttgatgaacacctggctttattcttgcaatgaagaaaggttctcaacaaaaaatattctccaaagcaaagataccatcatcatctcactctcctatcccatcatctatgtccaatatgagatctaggtcactttcacctttgattggatcagagactctaccttttcattctggaggacagtggtgtgagcaagttgagattgcagatgaaaacaatatgcttttggactatcaagaccataaaggagctgattcacatgcaggagttagatatattacagaggccctcattaaaaaacttactaaacaggataatttggctttgataaaatctctgaacctttcactttctaaagacggtggcaagaaatttaagtatattgagaatttggaaaaatgtgttaaacttgaagtactgaatctcagctataatctaatagggaagattgaaaagttggacaagctgttaaaattacgtgaactcaacttatcatataacaaaatcagcaaaattgaaggcatagaaaatatgtgtaatctgcaaaagcttaaccttgcaggaaatgaaattgagcatattccagtatggttagggaagaagttaaaatctttgcgagtcctcaatttgaaaggcaacaagatatcatcgctccaagatataagcaagttgaaaccgcttcaagatttgatttctctgatcctagttgaaaatccagttgtgacccttcctcattacctccagtttaccattttccacctccgttcattggaaagtttggaaggtcagccagtaaccactcaggatagacaggaggcttttgagagattcagtttagaagaggtagaaagactggaaagagacctagaaaaaaagatgatagaaactgaagagcttaagagcaaacaaacaaggttccttgaggaaattaaaaatcaagataaattgaataaatcattaaaagaggaggccatgttacagaaacagagctgtgaggaactcaagagtgacttaaacacaaaaaatgaattgctaaaacagaagaccatagaattaacacgagcatgtcagaagcaatatgagctggaacaggaattggccttttataaaattgatgctaaatttgagccactaaattattatccatcagagtatgctgaaattgataaagccccagatgaaagcccttacattggcaaatccagatacaagagaaatatgtttgccacagagagttatattattgacagtgctcaggcagtacagatcaagaagatggagccagatgaacaacttagaaatgatcacatgaacttgagaggccacacaccactggacacgcaactggaagacaaagaaaaaaaaa

SEQ ID NO: 360779 - DNA, 824 bp, Homo sapiens
caaggtccactgatcattgcatcagttcaactaggaagtctgaagaatgccttcattcactaatgggaaaagcatgatgatttcaagctgacctacagaactttgtgcatcacctacaacattggcaagggtggctgagaagaaagctctccaatacttgaaattattttcaagtcacttgcaaataatctgcttactgggaggaaggaaacagcagaacgcttctgagaggtctggtgtgttccaatcacctatagagagaaaccacaggactaaaaataaatgaataaataaaaatgcccaggagttacagcaagtatgcatctttttgttaaattttctttcatgatgacacaaaacaaggactaaaaatgtttgcaagaaaccacaaggtgatctaatcagaacttagctaaaattacaaatctgacaatgaataaaattccctacttaataaataattctagaaataagctgataataatcgccaaagctcagtagtcattcaaaatgggcaacagtaataattcatatacctaggcctatctttaagttccattattcaagaaggaaactagtattctcactttatttttttctgaatgaatctagaaaatactttatagataagaatatgtccactcttgcaaaagataccagtggcaagcttcagtgtgaaagagacaagtatccatgtgtcagatgacagagttgccactgatttattagcaaattgaacttttgctttaagagaaaaaaacttctcaaaatctgtatctgataaattaacccagtccttcatgaacaccatttcaaaaagacac

SEQ ID NO: 360780 - DNA, 618 bp, Homo sapiens
acttcttcagggtgaaggtcatggcggaaaatgttgcatggattttgccctccctgctgtcagaacaacagggttctggaagagtagagaacaggccgtggaacttgcctgtctaaagacatggcggcagggatttccttgagaggcagggacatgtggtggttactaatcattgtgaggtgtctgggatgtaatggatgggaaatctactaagaagtcaacttatgtaataattagaaaagctctagttctgaggacagagacctgttggagtcaccatagtgggaatttttgacctggcatccagttcagatacctggagcttcttgactgaggggagattggatcccttggggaagagtgaagccttcaatgctgccacaagtgtgatccgcccgcctcagcctcccaaagtgctgggattacaggcgtgagccaccatgcccggcctcttttttatatttaaaaaatatcattttatatattatcagggcgcctgttgacaagtgtggagaaactcctaatttaaatgtcacagacaatgtcctagtgttgactactacaatgttgatgctacactgttgtaattattaaactgattatttttcttatgtcaca

SEQ ID NO: 360781 - DNA, 705 bp, Homo sapiens
tccggcgccggggctcacttcctggtgcgggaaggggcagagattggtgcagccccggaggaagaaaaaagggtgaggagaagcagcggctgagcgggttggcatctggggcagcgggctcgctccaggccgtcgggggccgctcgccagcgtcgcccgctgtgttgggagcgcgggccgtgggcgtcgctcggccttgtccgcggcgtccccgctgccggccacggcgctcagcgcttgtgctctgtgttgcaggtctaccccgagccccggagcgagagcgagtgcctgagcaacatccgcgagttcctgcgcggctgcggggcttccctgcggctggaggtgagcgcgggcggccacgggccgagggaggggccgggaagacggggttgggcccggggtgggtgcttcgctccagccggacctcctgcctcctccgcgcccggatccgaccctccccggctgctcgagagtccgggatgtgtggaacggggcgttgcgggtttgggtaatggccgggaggtggcggcgcgcgggccacccccagggcagggtggagtctgcgtgtggaaccccagacattgctctcgttccagtgaggaagagtggttctggtcgctggtggtgcaggtgacacacattttcaacaaccgtttatcaggggtgtgaaccgatttcttggcacctgcctcagcatgaactctg

SEQ ID NO: 360782 - DNA, 534 bp, Homo sapiens
  misc_feature (74)..(74): n is a, c, g, or t
tggaagatgagaacatttgcagtgacaccaatggcaaaaacatacgtttccaaaatccaaacctgaagcacttnggaaggaatggctaaacaatctttcaaagcccaatgtcaagaagtccggaagaggaaagagcttgagctgcagatcctgacggaagccatccggaactgggagggcgatgacattaaaactctgggcaacgtcacttacatgtcccaggtcctgattcagtgtgccggaagtgaggaaaagaatgaaagatatcttctactcttcccaaatgttttgctaatgttgtctgccagtcctaggatgagtggctttatctatcaggtaaaacacaatttaaatttatattttattgtggatctgaggataatttcaaactggctttgaattttgtgttaaatattacgtgtatctatctgtgtatgtgctgtgtgtgtagtgctgtatattcagatatggacgtacagctcctgtttgtgtttcgttgtgactgcaagcatatcctatgttaatttcaaaaaa

SEQ ID NO: 360783 - DNA, 5123 bp, Homo sapiens
tccggcgccggggctcacttcctggtgcgggaaggggcagagattggtgcagccccggaggaagaaaaaagggtgaggagaagcagcggctgagcgggttggcatctggggcagcgggctcgctccaggccgtcgggggccgctcgccagcgtcgcccgctgtgttgggagcgcgggccgtgggcgtcgctcggccttgtccgcggcgtccccgctgccggccacggcgctcagcgcttgtgctctgtgttgcaggtctaccccgagccccggagcgagagcgagtgcctgagcaacatccgcgagttcctgcgcggctgcggggcttccctgcggctggagacgtttgatgcaaatgatttgtatcaggggcagaattttaacaaggtcctcagttccttagtgactctaaataaagtaacagcagacatcgggctggggagtgactccgtgtgtgcccggccctcgtctcaccgcataaagtcttttgactcccttggatcacagtctttgcacactcggacttcaaaactgttccagggccagtatcggagtttggacatgaccgataatagcaacaatcaactggtagtaagagcaaagtttaacttccagcagaccaatgaggacgagctttccttctcaaaaggagacgtcatccatgtcacccgtgtggaagagggaggctggtgggagggcacactcaacggccggaccggctggttccccagcaactacgtgcgcgaggtcaaggccagcgagaagcctgtgtctcccaaatcaggaacactgaagagccctcccaaaggatttgatacgactgccataaacaaaagctattacaatgtggtgctacagaatattttagaaacagaaaatgaatattctaaagaacttcagactgtgctttcaacgtacctacggccattgcagaccagtgagaagttaagttcagcaaacatttcatatttaatgggaaatctagaagaaatatgttctttccagcaaatgctcgtacagtctttagaagaatgcaccaagttgcccgaagctcagcagagagtcggaggctgctttttaaacctgatgccacagatgaaaaccctgtacctcacgtattgtgccaatcacccttctgcagtgaatgtcctcacggaacacagtgaggagttgggggagttcatggagaccaaaggtgccagcagccctgggattctcgtgctgaccacgggcctgagcaaacccttcatgcgcctggataaataccctacgctgctcaaagagctcgagagacacatggaggattatcatacagatagacaagatattcaaaaatccatggctgccttcaaaaacctttcagcccaatgtcaagaagtccggaagaggaaagagcttgagctgcagatcctgacggaagccatccggaactgggagggcgatgacattaaaactctgggcaacgtcacttacatgtcccaggtcctgattcagtgtgccggaagtgaggaaaagaatgaaagatatcttctactcttcccaaatgttttgctaatgttgtctgccagtcctaggatgagtggctttatctatcagggaaagcttccaacgacaggaatgacaatcacaaagcttgaggacagtgaaaatcatagaaatgcatttgaaatatcagggagcatgattgagcggatattagtgtcgtgcaacaaccagcaggatctgcaggaatgggtggagcacctacagaagcaaacgaaggtcacgtctgtgggaaaccccaccataaagcctcattcagtgccatctcataccctcccctcccacccggtcactccgtccagcaagcacgcagacagcaagcccgcgccgctgacgcccgcctaccacacgctgccccacccctcccaccacggcaccccgcacaccaccatcaactggggacccctggagcctccgaaaacacccaagccctggagcctgagctgcctgcggcccgcgcctcccctccggccctcagctgctctctgctacaaggaggatcttagtaagagccctaagaccatgaaaaagctgctgcccaagcgcaaacctgaacggaagccttcagatgaggagttcgcgtcccggaaaagcacagctgctttggaagaagatgctcagattctgaaagtcattgaagcttactgcaccagcgccaaaacaaggcaaacactcaattcaagttcacgcaaagaatctgctccacaagttttgcttccagaagaagagaaaattatagtggaagaaactaaaagtaatggtcagacagtgatagaagaaaagagtcttgtggataccgtatatgcattaaaggatgaagttcaagaattaagacaggacaacaaaaagatgaagaaatctctagaggaagaacagagagcccgcaaagacctggagaagctggtgaggaaagtcctgaagaacatgaatgatcctgcctgggatgagaccaatctataagggacgtcctcagttctttctgttgaagaccagttctgaggtgaagctgggcacccctgacccaagtcggggtgcactcaggaccacagggcagggctgggtggggcgccaccttgctctctgtatatagaaaagctggagcttattctgcgaatggagacgatcaaaccatgactgatgaatccagacaggagggattgactctgaggacctgagctacatcaatccactctgtgaacatctcagttacctcattctgcaataagttcagtgactgactaaaagtcttgtttttccagactttgaattgaatatataaatattatatatacatgtttcttgtaaatatcccattttgaatgcatacctgtggtggttctgtccgggctaatccccatgctagaatgtcctttccagctacgtgaataagaagtcccatgcccgcacccaccggaagcagaagcctggtggatgcctggttcgttccgcagcaccagggcctccaccgtgctgtggcagcaccccccatgtcggtatttctaaataaccttatttatacctgcagagatacacttcagtcccattcagaagtcttctcttaaagcagcattacagtcccagacctgcgggtttctgagggcaacttgctggctgacagactcagtcttgacctcaaggaaggcccatacggcactgccgcatccacctagaggtgtttgctcttgtccgctgtctgagtactgtgattctcagatgagtttgctgcgttttgggaggacacagacggttctgtataggctagttcagtaacaacaaaatacactgttttgtcttccctcaaagagagatcttactagaacctgtaaatagaatgtattatttattataagtcactgcagctgatgaaaacagatggaggccatgctgcaggctgatactgatgggtggagttttgtcatcaggccagcctcatcccgaggtctcctccaccattggccgtagccagcaggcttcagtgctcaccgaaagtaaaatcccctccttcagcaagaataaagcaatatacaccttaggttccactaagtaacataggcataagcagggaacgtttcccccactgtgttccagtgcagaggagacgaagcctgtcctcaccgcggctcgctgggcccaggctggctctggaaagcctgtgcggtcctgggcaggaagcccggcccgtggagcaggttttcgttctgcttcagcaataaataagggtgaccacagggactttgcttttggtttcctttcctgtgaaaaggttggttttaaagtgagatacacttttccgtagaacaagtgttctatctttaaaaacccaaattgcagcaccgtggattactggtctcagaacaactcattgcgcatcagatttgactctctgattttctgtctattggccaaattgccctttaactgcacctgaatcctttgtgtactgatgcctttgagctgggcaccttgggagagtgttgtgttgctgtttacggttcttccttgcccttgctaattacagtctctggtgcccagcaagcccctttggcttccttccgtgactggtcacgttgtctgcctgggctcagcgtggacctgccccatgctgcagaacctggcctcacctggacttttcactagaattgccagcttcctcaacttagcagatcattcactcatgcgggcacaagcaaagatcaacactttcttttttggtaagcttgagttttacaagttattttttggtgatgcgtaagacattgcagtgggaaaccattcaacttgagtttattggagtttgctgttgtagcaggttttaactcaggaacaactcttgtctgatctctccgcccctctgccgggaggcgacattaactgtcctctcggagccggtagcgttgctgtccgagtccccaggacggatctcctgcagacctgccttaatgctcagatcgaagtatttcacaagaatacttgtgtttttaacagcccttcccctggacggtgcggccatgagggcctcatgttacggcattgccttttctttctgtggatccagtatcttcctcggctttttagggagcaggaaaaatgcgtctgagagcaactctttttaaaaacctgccctgttgtatataactgtgtctgtttcaccgtgtgacctcccaagggggtgggaacttgatataaacgtttaaaggggccacgatttgcccgagggttactcctttgctctcaccttgtatggatgaggagatgaagccatttcttatcctgtagatgtgaagcactttcagttttcagcgatgttggaatgtagcatcagaagctcgttccttcacactcagtggcgtctgtgcttgtccacatgcgctgggcgtctgggaccttgaatgcctgccctggttgtgtggactccttaatgccaatcatttcttcacttctctgggacacccagggcgcctgttgacaagtgtggagaaactcctaatttaaatgtcacagacaatgtcctagtgttgactactacaatgttgatgctacactgttgtaattattaaactgattatttttcttatgtcaca

SEQ ID NO: 360784 - DNA, 4805 bp, Homo sapiens
tccggcgccggggctcacttcctggtgcgggaaggggcagagattggtgcagccccggaggaagaaaaaagggtctaccccgagccccggagcgagagcgagtgcctgagcaacatccgcgagttcctgcgcggctgcggggcttccctgcggctggagacgtttgatgcaaatgatttgtatcaggggcagaattttaacaaggtcctcagttccttagtgactctaaataaagtaacagcagacatcgggctggggagtgactccgtgtgtgcccggccctcgtctcaccgcataaagtcttttgactcccttggatcacagtctttgcacactcggacttcaaaactgttccagggccagtatcggagtttggacatgaccgataatagcaacaatcaatggttccccagcaactacgtgcgcgaggtcaaggccagcgagaagcctgtgtctcccaaatcaggaacactgaagagccctcccaaaggatttgatacgactgccataaacaaaagctattacaatgtggtgctacagaatattttagaaacagaaaatgaatattctaaagaacttcagactgtgctttcaacgtacctacggccattgcagaccagtgagaagttaagttcagcaaacatttcatatttaatgggaaatctagaagaaatatgttctttccagcaaatgctcgtacagtctttagaagaatgcaccaagttgcccgaagctcagcagagagtcggaggctgctttttaaacctgatgccacagatgaaaaccctgtacctcacgtattgtgccaatcacccttctgcagtgaatgtcctcacggaacacagtgaggagttgggggagttcatggagaccaaaggtgccagcagccctgggattctcgtgctgaccacgggcctgagcaaacccttcatgcgcctggataaataccctacgctgctcaaagagctcgagagacacatggaggattatcatacagatagacaagatattcaaaaatccatggctgccttcaaaaacctttcagcccaatgtcaagaagtccggaagaggaaagagcttgagctgcagatcctgacggaagccatccggaactgggagggcgatgacattaaaactctgggcaacgtcacttacatgtcccaggtcctgattcagtgtgccggaagtgaggaaaagaatgaaagatatcttctactcttcccaaatgttttgctaatgttgtctgccagtcctaggatgagtggctttatctatcagggaaagcttccaacgacaggaatgacaatcacaaagcttgaggacagtgaaaatcatagaaatgcatttgaaatatcagggagcatgattgagcggatattagtgtcgtgcaacaaccagcaggatctgcaggaatgggtggagcacctacagaagcaaacgaaggtcacgtctgtgggaaaccccaccataaagcctcattcagtgccatctcataccctcccctcccacccggtcactccgtccagcaagcacgcagacagcaagcccgcgccgctgacgcccgcctaccacacgctgccccacccctcccaccacggcaccccgcacaccaccatcaactggggacccctggagcctccgaaaacacccaagccctggagcctgagctgcctgcggcccgcgcctcccctccggccctcagctgctctctgctacaaggaggatcttagtaagagccctaagaccatgaaaaagctgctgcccaagcgcaaacctgaacggaagccttcagatgaggagttcgcgtcccggaaaagcacagctgctttggaagaagatgctcagattctgaaagtcattgaagcttactgcaccagcgccaaaacaaggcaaacactcaattcaagttcacgcaaagaatctgctccacaagttttgcttccagaagaagagaaaattatagtggaagaaactaaaagtaatggtcagacagtgatagaagaaaagagtcttgtggataccgtatatgcattaaaggatgaagttcaagaattaagacaggacaacaaaaagatgaagaaatctctagaggaagaacagagagcccgcaaagacctggagaagctggtgaggaaagtcctgaagaacatgaatgatcctgcctgggatgagaccaatctataagggacgtcctcagttctttctgttgaagaccagttctgaggtgaagctgggcacccctgacccaagtcggggtgcactcaggaccacagggcagggctgggtggggcgccaccttgctctctgtatatagaaaagctggagcttattctgcgaatggagacgatcaaaccatgactgatgaatccagacaggagggattgactctgaggacctgagctacatcaatccactctgtgaacatctcagttacctcattctgcaataagttcagtgactgactaaaagtcttgtttttccagactttgaattgaatatataaatattatatatacatgtttcttgtaaatatcccattttgaatgcatacctgtggtggttctgtccgggctaatccccatgctagaatgtcctttccagctacgtgaataagaagtcccatgcccgcacccaccggaagcagaagcctggtggatgcctggttcgttccgcagcaccagggcctccaccgtgctgtggcagcaccccccatgtcggtatttctaaataaccttatttatacctgcagagatacacttcagtcccattcagaagtcttctcttaaagcagcattacagtcccagacctgcgggtttctgagggcaacttgctggctgacagactcagtcttgacctcaaggaaggcccatacggcactgccgcatccacctagaggtgtttgctcttgtccgctgtctgagtactgtgattctcagatgagtttgctgcgttttgggaggacacagacggttctgtataggctagttcagtaacaacaaaatacactgttttgtcttccctcaaagagagatcttactagaacctgtaaatagaatgtattatttattataagtcactgcagctgatgaaaacagatggaggccatgctgcaggctgatactgatgggtggagttttgtcatcaggccagcctcatcccgaggtctcctccaccattggccgtagccagcaggcttcagtgctcaccgaaagtaaaatcccctccttcagcaagaataaagcaatatacaccttaggttccactaagtaacataggcataagcagggaacgtttcccccactgtgttccagtgcagaggagacgaagcctgtcctcaccgcggctcgctgggcccaggctggctctggaaagcctgtgcggtcctgggcaggaagcccggcccgtggagcaggttttcgttctgcttcagcaataaataagggtgaccacagggactttgcttttggtttcctttcctgtgaaaaggttggttttaaagtgagatacacttttccgtagaacaagtgttctatctttaaaaacccaaattgcagcaccgtggattactggtctcagaacaactcattgcgcatcagatttgactctctgattttctgtctattggccaaattgccctttaactgcacctgaatcctttgtgtactgatgcctttgagctgggcaccttgggagagtgttgtgttgctgtttacggttcttccttgcccttgctaattacagtctctggtgcccagcaagcccctttggcttccttccgtgactggtcacgttgtctgcctgggctcagcgtggacctgccccatgctgcagaacctggcctcacctggacttttcactagaattgccagcttcctcaacttagcagatcattcactcatgcgggcacaagcaaagatcaacactttcttttttggtaagcttgagttttacaagttattttttggtgatgcgtaagacattgcagtgggaaaccattcaacttgagtttattggagtttgctgttgtagcaggttttaactcaggaacaactcttgtctgatctctccgcccctctgccgggaggcgacattaactgtcctctcggagccggtagcgttgctgtccgagtccccaggacggatctcctgcagacctgccttaatgctcagatcgaagtatttcacaagaatacttgtgtttttaacagcccttcccctggacggtgcggccatgagggcctcatgttacggcattgccttttctttctgtggatccagtatcttcctcggctttttagggagcaggaaaaatgcgtctgagagcaactctttttaaaaacctgccctgttgtatataactgtgtctgtttcaccgtgtgacctcccaagggggtgggaacttgatataaacgtttaaaggggccacgatttgcccgagggttactcctttgctctcaccttgtatggatgaggagatgaagccatttcttatcctgtagatgtgaagcactttcagttttcagcgatgttggaatgtagcatcagaagctcgttccttcacactcagtggcgtctgtgcttgtccacatgcgctgggcgtctgggaccttgaatgcctgccctggttgtgtggactccttaatgccaatcatttcttcacttctctgggacacccagggcgcctgttgacaagtgtggagaaactcctaatttaaatgtcacagacaatgtcctagtgttgactactacaatgttgatgctacactgttgtaattattaaactgattatttttcttatgtcaca

SEQ ID NO: 360785 - DNA, 5199 bp, Homo sapiens
acggcggccgaggccggggggcggcggcgggcgcccgcaggttcccgagccgctcctgagaaggcgcctgacagcgggccggggcgcacggagaagcgggccgggccggacctgctgggccgcgccgagccaatcgccggcgccggccgctcgatgggcgaggcggcggcggcggcggcgggggccgcgggccgggccgccgctccgaggtgaaggcgcgcgcccctccccgcctgcctcccgggccgcagcgatgaattccgccgagcaaaccgttacgtggctcatcactctgggggtgctggagtcgcccaaaaaaaccatctcggacccggagggctttctgcaggcgtcgctgaaggatggggtggtcctctgcaggctgctggagcgcctgctccccgggaccatcgagaaaacgtttgatgcaaatgatttgtatcaggggcagaattttaacaaggtcctcagttccttagtgactctaaataaagtaacagcagacatcgggctggggagtgactccgtgtgtgcccggccctcgtctcaccgcataaagtcttttgactcccttggatcacagtctttgcacactcggacttcaaaactgttccagggccagtatcggagtttggacatgaccgataatagcaacaatcaactggtagtaagagcaaagtttaacttccagcagaccaatgaggacgagctttccttctcaaaaggagacgtcatccatgtcacccgtgtggaagagggaggctggtgggagggcacactcaacggccggaccggctggttccccagcaactacgtgcgcgaggtcaaggccagcgagaagcctgtgtctcccaaatcaggaacactgaagagccctcccaaaggatttgatacgactgccataaacaaaagctattacaatgtggtgctacagaatattttagaaacagaaaatgaatattctaaagaacttcagactgtgctttcaacgtacctacggccattgcagaccagtgagaagttaagttcagcaaacatttcatatttaatgggaaatctagaagaaatatgttctttccagcaaatgctcgtacagtctttagaagaatgcaccaagttgcccgaagctcagcagagagtcggaggctgctttttaaacctgatgccacagatgaaaaccctgtacctcacgtattgtgccaatcacccttctgcagtgaatgtcctcacggaacacagtgaggagttgggggagttcatggagaccaaaggtgccagcagccctgggattctcgtgctgaccacgggcctgagcaaacccttcatgcgcctggataaataccctacgctgctcaaagagctcgagagacacatggaggattatcatacagatagacaagatattcaaaaatccatggctgccttcaaaaacctttcagcccaatgtcaagaagtccggaagaggaaagagcttgagctgcagatcctgacggaagccatccggaactgggagggcgatgacattaaaactctgggcaacgtcacttacatgtcccaggtcctgattcagtgtgccggaagtgaggaaaagaatgaaagatatcttctactcttcccaaatgttttgctaatgttgtctgccagtcctaggatgagtggctttatctatcagggaaagcttccaacgacaggaatgacaatcacaaagcttgaggacagtgaaaatcatagaaatgcatttgaaatatcagggagcatgattgagcggatattagtgtcgtgcaacaaccagcaggatctgcaggaatgggtggagcacctacagaagcaaacgaaggtcacgtctgtgggaaaccccaccataaagcctcattcagtgccatctcataccctcccctcccacccggtcactccgtccagcaagcacgcagacagcaagcccgcgccgctgacgcccgcctaccacacgctgccccacccctcccaccacggcaccccgcacaccaccatcaactggggacccctggagcctccgaaaacacccaagccctggagcctgagctgcctgcggcccgcgcctcccctccggccctcagctgctctctgctacaaggaggatcttagtaagagccctaagaccatgaaaaagctgctgcccaagcgcaaacctgaacggaagccttcagatgaggagttcgcgtcccggaaaagcacagctgctttggaagaagatgctcagattctgaaagtcattgaagcttactgcaccagcgccaaaacaaggcaaacactcaattcaagttcacgcaaagaatctgctccacaagttttgcttccagaagaagagaaaattatagtggaagaaactaaaagtaatggtcagacagtgatagaagaaaagagtcttgtggataccgtatatgcattaaaggatgaagttcaagaattaagacaggacaacaaaaagatgaagaaatctctagaggaagaacagagagcccgcaaagacctggagaagctggtgaggaaagtcctgaagaacatgaatgatcctgcctgggatgagaccaatctataagggacgtcctcagttctttctgttgaagaccagttctgaggtgaagctgggcacccctgacccaagtcggggtgcactcaggaccacagggcagggctgggtggggcgccaccttgctctctgtatatagaaaagctggagcttattctgcgaatggagacgatcaaaccatgactgatgaatccagacaggagggattgactctgaggacctgagctacatcaatccactctgtgaacatctcagttacctcattctgcaataagttcagtgactgactaaaagtcttgtttttccagactttgaattgaatatataaatattatatatacatgtttcttgtaaatatcccattttgaatgcatacctgtggtggttctgtccgggctaatccccatgctagaatgtcctttccagctacgtgaataagaagtcccatgcccgcacccaccggaagcagaagcctggtggatgcctggttcgttccgcagcaccagggcctccaccgtgctgtggcagcaccccccatgtcggtatttctaaataaccttatttatacctgcagagatacacttcagtcccattcagaagtcttctcttaaagcagcattacagtcccagacctgcgggtttctgagggcaacttgctggctgacagactcagtcttgacctcaaggaaggcccatacggcactgccgcatccacctagaggtgtttgctcttgtccgctgtctgagtactgtgattctcagatgagtttgctgcgttttgggaggacacagacggttctgtataggctagttcagtaacaacaaaatacactgttttgtcttccctcaaagagagatcttactagaacctgtaaatagaatgtattatttattataagtcactgcagctgatgaaaacagatggaggccatgctgcaggctgatactgatgggtggagttttgtcatcaggccagcctcatcccgaggtctcctccaccattggccgtagccagcaggcttcagtgctcaccgaaagtaaaatcccctccttcagcaagaataaagcaatatacaccttaggttccactaagtaacataggcataagcagggaacgtttcccccactgtgttccagtgcagaggagacgaagcctgtcctcaccgcggctcgctgggcccaggctggctctggaaagcctgtgcggtcctgggcaggaagcccggcccgtggagcaggttttcgttctgcttcagcaataaataagggtgaccacagggactttgcttttggtttcctttcctgtgaaaaggttggttttaaagtgagatacacttttccgtagaacaagtgttctatctttaaaaacccaaattgcagcaccgtggattactggtctcagaacaactcattgcgcatcagatttgactctctgattttctgtctattggccaaattgccctttaactgcacctgaatcctttgtgtactgatgcctttgagctgggcaccttgggagagtgttgtgttgctgtttacggttcttccttgcccttgctaattacagtctctggtgcccagcaagcccctttggcttccttccgtgactggtcacgttgtctgcctgggctcagcgtggacctgccccatgctgcagaacctggcctcacctggacttttcactagaattgccagcttcctcaacttagcagatcattcactcatgcgggcacaagcaaagatcaacactttcttttttggtaagcttgagttttacaagttattttttggtgatgcgtaagacattgcagtgggaaaccattcaacttgagtttattggagtttgctgttgtagcaggttttaactcaggaacaactcttgtctgatctctccgcccctctgccgggaggcgacattaactgtcctctcggagccggtagcgttgctgtccgagtccccaggacggatctcctgcagacctgccttaatgctcagatcgaagtatttcacaagaatacttgtgtttttaacagcccttcccctggacggtgcggccatgagggcctcatgttacggcattgccttttctttctgtggatccagtatcttcctcggctttttagggagcaggaaaaatgcgtctgagagcaactctttttaaaaacctgccctgttgtatataactgtgtctgtttcaccgtgtgacctcccaagggggtgggaacttgatataaacgtttaaaggggccacgatttgcccgagggttactcctttgctctcaccttgtatggatgaggagatgaagccatttcttatcctgtagatgtgaagcactttcagttttcagcgatgttggaatgtagcatcagaagctcgttccttcacactcagtggcgtctgtgcttgtccacatgcgctgggcgtctgggaccttgaatgcctgccctggttgtgtggactccttaatgccaatcatttcttcacttctctgggacacccagggcgcctgttgacaagtgtggagaaactcctaatttaaatgtcacagacaatgtcctagtgttgactactacaatgttgatgctacactgttgtaattattaaactgattatttttcttatgtcaca

SEQ ID NO: 360786 - DNA, 4917 bp, Homo sapiens
atggtggaaagtgaggagaagcaaaaagacgactacttctttccccatttcccggtctggtctttttggggtctactacgtagaggtgcatcagccagcgctaccatggaggcaggaggcattcttttgctctcgtacgtttgatgcaaatgatttgtatcaggggcagaattttaacaaggtcctcagttccttagtgactctaaataaagtaacagcagacatcgggctggggagtgactccgtgtgtgcccggccctcgtctcaccgcataaagtcttttgactcccttggatcacagtctttgcacactcggacttcaaaactgttccagggccagtatcggagtttggacatgaccgataatagcaacaatcaactggtagtaagagcaaagtttaacttccagcagaccaatgaggacgagctttccttctcaaaaggagacgtcatccatgtcacccgtgtggaagagggaggctggtgggagggcacactcaacggccggaccggctggttccccagcaactacgtgcgcgaggtcaaggccagcgagaagcctgtgtctcccaaatcaggaacactgaagagccctcccaaaggatttgatacgactgccataaacaaaagctattacaatgtggtgctacagaatattttagaaacagaaaatgaatattctaaagaacttcagactgtgctttcaacgtacctacggccattgcagaccagtgagaagttaagttcagcaaacatttcatatttaatgggaaatctagaagaaatatgttctttccagcaaatgctcgtacagtctttagaagaatgcaccaagttgcccgaagctcagcagagagtcggaggctgctttttaaacctgatgccacagatgaaaaccctgtacctcacgtattgtgccaatcacccttctgcagtgaatgtcctcacggaacacagtgaggagttgggggagttcatggagaccaaaggtgccagcagccctgggattctcgtgctgaccacgggcctgagcaaacccttcatgcgcctggataaataccctacgctgctcaaagagctcgagagacacatggaggattatcatacagatagacaagatattcaaaaatccatggctgccttcaaaaacctttcagcccaatgtcaagaagtccggaagaggaaagagcttgagctgcagatcctgacggaagccatccggaactgggagggcgatgacattaaaactctgggcaacgtcacttacatgtcccaggtcctgattcagtgtgccggaagtgaggaaaagaatgaaagatatcttctactcttcccaaatgttttgctaatgttgtctgccagtcctaggatgagtggctttatctatcagggaaagcttccaacgacaggaatgacaatcacaaagcttgaggacagtgaaaatcatagaaatgcatttgaaatatcagggagcatgattgagcggatattagtgtcgtgcaacaaccagcaggatctgcaggaatgggtggagcacctacagaagcaaacgaaggtcacgtctgtgggaaaccccaccataaagcctcattcagtgccatctcataccctcccctcccacccggtcactccgtccagcaagcacgcagacagcaagcccgcgccgctgacgcccgcctaccacacgctgccccacccctcccaccacggcaccccgcacaccaccatcaactggggacccctggagcctccgaaaacacccaagccctggagcctgagctgcctgcggcccgcgcctcccctccggccctcagctgctctctgctacaaggaggatcttagtaagagccctaagaccatgaaaaagctgctgcccaagcgcaaacctgaacggaagccttcagatgaggagttcgcgtcccggaaaagcacagctgctttggaagaagatgctcagattctgaaagtcattgaagcttactgcaccagcgccaaaacaaggcaaacactcaattcaagttcacgcaaagaatctgctccacaagttttgcttccagaagaagagaaaattatagtggaagaaactaaaagtaatggtcagacagtgatagaagaaaagagtcttgtggataccgtatatgcattaaaggatgaagttcaagaattaagacaggacaacaaaaagatgaagaaatctctagaggaagaacagagagcccgcaaagacctggagaagctggtgaggaaagtcctgaagaacatgaatgatcctgcctgggatgagaccaatctataagggacgtcctcagttctttctgttgaagaccagttctgaggtgaagctgggcacccctgacccaagtcggggtgcactcaggaccacagggcagggctgggtggggcgccaccttgctctctgtatatagaaaagctggagcttattctgcgaatggagacgatcaaaccatgactgatgaatccagacaggagggattgactctgaggacctgagctacatcaatccactctgtgaacatctcagttacctcattctgcaataagttcagtgactgactaaaagtcttgtttttccagactttgaattgaatatataaatattatatatacatgtttcttgtaaatatcccattttgaatgcatacctgtggtggttctgtccgggctaatccccatgctagaatgtcctttccagctacgtgaataagaagtcccatgcccgcacccaccggaagcagaagcctggtggatgcctggttcgttccgcagcaccagggcctccaccgtgctgtggcagcaccccccatgtcggtatttctaaataaccttatttatacctgcagagatacacttcagtcccattcagaagtcttctcttaaagcagcattacagtcccagacctgcgggtttctgagggcaacttgctggctgacagactcagtcttgacctcaaggaaggcccatacggcactgccgcatccacctagaggtgtttgctcttgtccgctgtctgagtactgtgattctcagatgagtttgctgcgttttgggaggacacagacggttctgtataggctagttcagtaacaacaaaatacactgttttgtcttccctcaaagagagatcttactagaacctgtaaatagaatgtattatttattataagtcactgcagctgatgaaaacagatggaggccatgctgcaggctgatactgatgggtggagttttgtcatcaggccagcctcatcccgaggtctcctccaccattggccgtagccagcaggcttcagtgctcaccgaaagtaaaatcccctccttcagcaagaataaagcaatatacaccttaggttccactaagtaacataggcataagcagggaacgtttcccccactgtgttccagtgcagaggagacgaagcctgtcctcaccgcggctcgctgggcccaggctggctctggaaagcctgtgcggtcctgggcaggaagcccggcccgtggagcaggttttcgttctgcttcagcaataaataagggtgaccacagggactttgcttttggtttcctttcctgtgaaaaggttggttttaaagtgagatacacttttccgtagaacaagtgttctatctttaaaaacccaaattgcagcaccgtggattactggtctcagaacaactcattgcgcatcagatttgactctctgattttctgtctattggccaaattgccctttaactgcacctgaatcctttgtgtactgatgcctttgagctgggcaccttgggagagtgttgtgttgctgtttacggttcttccttgcccttgctaattacagtctctggtgcccagcaagcccctttggcttccttccgtgactggtcacgttgtctgcctgggctcagcgtggacctgccccatgctgcagaacctggcctcacctggacttttcactagaattgccagcttcctcaacttagcagatcattcactcatgcgggcacaagcaaagatcaacactttcttttttggtaagcttgagttttacaagttattttttggtgatgcgtaagacattgcagtgggaaaccattcaacttgagtttattggagtttgctgttgtagcaggttttaactcaggaacaactcttgtctgatctctccgcccctctgccgggaggcgacattaactgtcctctcggagccggtagcgttgctgtccgagtccccaggacggatctcctgcagacctgccttaatgctcagatcgaagtatttcacaagaatacttgtgtttttaacagcccttcccctggacggtgcggccatgagggcctcatgttacggcattgccttttctttctgtggatccagtatcttcctcggctttttagggagcaggaaaaatgcgtctgagagcaactctttttaaaaacctgccctgttgtatataactgtgtctgtttcaccgtgtgacctcccaagggggtgggaacttgatataaacgtttaaaggggccacgatttgcccgagggttactcctttgctctcaccttgtatggatgaggagatgaagccatttcttatcctgtagatgtgaagcactttcagttttcagcgatgttggaatgtagcatcagaagctcgttccttcacactcagtggcgtctgtgcttgtccacatgcgctgggcgtctgggaccttgaatgcctgccctggttgtgtggactccttaatgccaatcatttcttcacttctctgggacacccagggcgcctgttgacaagtgtggagaaactcctaatttaaatgtcacagacaatgtcctagtgttgactactacaatgttgatgctacactgttgtaattattaaactgattatttttcttatgtcaca

SEQ ID NO: 360787 - DNA, 4741 bp, Homo sapiens
tccggcgccggggctcacttcctggtgcgggaaggggcagagattggtgcagccccggaggaagaaaaaagggtctaccccgagccccggagcgagagcgagtgcctgagcaacatccgcgagttcctgcgcggctgcggggcttccctgcggctggagacgtttgatgcaaatgatttgtatcaggggcagaattttaacaaggtcctcagttccttagtgactctaaataaagtaacagcagacatcgggctggggagtgactccgtgtgtgcccggccctcgtctcaccgcataaagtcttttgactcccttggatcacagtctttgcacactcggacttcaaaactgttccagggccagtatcggagtttggacatgaccgataatagcaacaatcaactggtagtaagagcaaagtttaacttccagcagaccaatgaggacgagctttccttctcaaaaggagacgtcatccatgtcacccgtgtggaagagggaggctggtgggagggcacactcaacggccggaccggctggttccccagcaactacgtgcgcgaggtcaaggccagcgagaagcctgtgtctcccaaatcaggaacactgaagagccctcccaaaggatttgatacgactgccataaacaaaagctattacaatgtggtgctacagaatattttagaaacagaaaatgaatattctaaagaacttcagactgtgctttcaacgtacctacggccattgcagaccagtgagaagttaagttcagcaaacatttcatatttaatgggaaatctagaagaaatatgttctttccagcaaatgctcgtacagtctttagaagaatgcaccaagttgcccgaagctcagcagagagtcggaggctgctttttaaacctgatgccacagatgaaaaccctgtacctcacgtattgtgccaatcacccttctgcagtgaatgtcctcacggaacacaggcccaatgtcaagaagtccggaagaggaaagagcttgagctgcagatcctgacggaagccatccggaactgggagggcgatgacattaaaactctgggcaacgtcacttacatgtcccaggtcctgattcagtgtgccggaagtgaggaaaagaatgaaagatatcttctactcttcccaaatgttttgctaatgttgtctgccagtcctaggatgagtggctttatctatcagggaaagcttccaacgacaggaatgacaatcacaaagcttgaggacagtgaaaatcatagaaatgcatttgaaatatcagggagcatgattgagcggatattagtgtcgtgcaacaaccagcaggatctgcaggaatgggtggagcacctacagaagcaaacgaaggtcacgtctgtgggaaaccccaccataaagcctcattcagtgccatctcataccctcccctcccacccggtcactccgtccagcaagcacgcagacagcaagcccgcgccgctgacgcccgcctaccacacgctgccccacccctcccaccacggcaccccgcacaccaccatcaactggggacccctggagcctccgaaaacacccaagccctggagcctgagctgcctgcggcccgcgcctcccctccggccctcagctgctctctgctacaaggaggatcttagtaagagccctaagaccatgaaaaagctgctgcccaagcgcaaacctgaacggaagccttcagatgaggagttcgcgtcccggaaaagcacagctgctttggaagaagatgctcagattctgaaagtcattgaagcttactgcaccagcgccaaaacaaggcaaacactcaattcaagttcacgcaaagaatctgctccacaagttttgcttccagaagaagagaaaattatagtggaagaaactaaaagtaatggtcagacagtgatagaagaaaagagtcttgtggataccgtatatgcattaaaggatgaagttcaagaattaagacaggacaacaaaaagatgaagaaatctctagaggaagaacagagagcccgcaaagacctggagaagctggtgaggaaagtcctgaagaacatgaatgatcctgcctgggatgagaccaatctataagggacgtcctcagttctttctgttgaagaccagttctgaggtgaagctgggcacccctgacccaagtcggggtgcactcaggaccacagggcagggctgggtggggcgccaccttgctctctgtatatagaaaagctggagcttattctgcgaatggagacgatcaaaccatgactgatgaatccagacaggagggattgactctgaggacctgagctacatcaatccactctgtgaacatctcagttacctcattctgcaataagttcagtgactgactaaaagtcttgtttttccagactttgaattgaatatataaatattatatatacatgtttcttgtaaatatcccattttgaatgcatacctgtggtggttctgtccgggctaatccccatgctagaatgtcctttccagctacgtgaataagaagtcccatgcccgcacccaccggaagcagaagcctggtggatgcctggttcgttccgcagcaccagggcctccaccgtgctgtggcagcaccccccatgtcggtatttctaaataaccttatttatacctgcagagatacacttcagtcccattcagaagtcttctcttaaagcagcattacagtcccagacctgcgggtttctgagggcaacttgctggctgacagactcagtcttgacctcaaggaaggcccatacggcactgccgcatccacctagaggtgtttgctcttgtccgctgtctgagtactgtgattctcagatgagtttgctgcgttttgggaggacacagacggttctgtataggctagttcagtaacaacaaaatacactgttttgtcttccctcaaagagagatcttactagaacctgtaaatagaatgtattatttattataagtcactgcagctgatgaaaacagatggaggccatgctgcaggctgatactgatgggtggagttttgtcatcaggccagcctcatcccgaggtctcctccaccattggccgtagccagcaggcttcagtgctcaccgaaagtaaaatcccctccttcagcaagaataaagcaatatacaccttaggttccactaagtaacataggcataagcagggaacgtttcccccactgtgttccagtgcagaggagacgaagcctgtcctcaccgcggctcgctgggcccaggctggctctggaaagcctgtgcggtcctgggcaggaagcccggcccgtggagcaggttttcgttctgcttcagcaataaataagggtgaccacagggactttgcttttggtttcctttcctgtgaaaaggttggttttaaagtgagatacacttttccgtagaacaagtgttctatctttaaaaacccaaattgcagcaccgtggattactggtctcagaacaactcattgcgcatcagatttgactctctgattttctgtctattggccaaattgccctttaactgcacctgaatcctttgtgtactgatgcctttgagctgggcaccttgggagagtgttgtgttgctgtttacggttcttccttgcccttgctaattacagtctctggtgcccagcaagcccctttggcttccttccgtgactggtcacgttgtctgcctgggctcagcgtggacctgccccatgctgcagaacctggcctcacctggacttttcactagaattgccagcttcctcaacttagcagatcattcactcatgcgggcacaagcaaagatcaacactttcttttttggtaagcttgagttttacaagttattttttggtgatgcgtaagacattgcagtgggaaaccattcaacttgagtttattggagtttgctgttgtagcaggttttaactcaggaacaactcttgtctgatctctccgcccctctgccgggaggcgacattaactgtcctctcggagccggtagcgttgctgtccgagtccccaggacggatctcctgcagacctgccttaatgctcagatcgaagtatttcacaagaatacttgtgtttttaacagcccttcccctggacggtgcggccatgagggcctcatgttacggcattgccttttctttctgtggatccagtatcttcctcggctttttagggagcaggaaaaatgcgtctgagagcaactctttttaaaaacctgccctgttgtatataactgtgtctgtttcaccgtgtgacctcccaagggggtgggaacttgatataaacgtttaaaggggccacgatttgcccgagggttactcctttgctctcaccttgtatggatgaggagatgaagccatttcttatcctgtagatgtgaagcactttcagttttcagcgatgttggaatgtagcatcagaagctcgttccttcacactcagtggcgtctgtgcttgtccacatgcgctgggcgtctgggaccttgaatgcctgccctggttgtgtggactccttaatgccaatcatttcttcacttctctgggacacccagggcgcctgttgacaagtgtggagaaactcctaatttaaatgtcacagacaatgtcctagtgttgactactacaatgttgatgctacactgttgtaattattaaactgattatttttcttatgtcaca

SEQ ID NO: 360788 - DNA, 3895 bp, Homo sapiens
ttttctgcaaaaacatcatttaaaacaactgttatacacggtagttttttaaaaatcataatgtgtgatgtcttttgtcctggtgtctatgtttagtagcagctcatcagatacagtgtgtgtttgggcttgtcactctgtcccttgtcgccagttgagtttcttgcttacagtacagtattataatttattatttgagataaaaatttttgtattatacacacatctgctacaaatgagctttttttggttcacaaacacagttcctccaccaattctaaaatcatttaatattgactttaataatggtacctttttctagaaaagcactaattgtttttttttttgtgggggggggtcttttttagggaaagcttccaacgacaggaatgacaatcacaaagcttgaggacagtgaaaatcatagaaatgcatttgaaatatcagggagcatgattgagcggatattagtgtcgtgcaacaaccagcaggatctgcaggaatgggtggagcacctacagaagcaaacgaaggtcacgtctgtgggaaaccccaccataaagcctcattcagtgccatctcataccctcccctcccacccggtcactccgtccagcaagcacgcagacagcaagcccgcgccgctgacgcccgcctaccacacgctgccccacccctcccaccacggcaccccgcacaccaccatcaactggggacccctggagcctccgaaaacacccaagccctggagcctgagctgcctgcggcccgcgcctcccctccggccctcagctgctctctgctacaaggaggatcttagtaagagccctaagaccatgaaaaagctgctgcccaagcgcaaacctgaacggaagccttcagatgaggagttcgcgtcccggaaaagcacagctgctttggaagaagatgctcagattctgaaagtcattgaagcttactgcaccagcgccaaaacaaggcaaacactcaattcaagttcacgcaaagaatctgctccacaagttttgcttccagaagaagagaaaattatagtggaagaaactaaaagtaatggtcagacagtgatagaagaaaagagtcttgtggataccgtatatgcattaaaggatgaagttcaagaattaagacaggacaacaaaaagatgaagaaatctctagaggaagaacagagagcccgcaaagacctggagaagctggtgaggaaagtcctgaagaacatgaatgatcctgcctgggatgagaccaatctataagggacgtcctcagttctttctgttgaagaccagttctgaggtgaagctgggcacccctgacccaagtcggggtgcactcaggaccacagggcagggctgggtggggcgccaccttgctctctgtatatagaaaagctggagcttattctgcgaatggagacgatcaaaccatgactgatgaatccagacaggagggattgactctgaggacctgagctacatcaatccactctgtgaacatctcagttacctcattctgcaataagttcagtgactgactaaaagtcttgtttttccagactttgaattgaatatataaatattatatatacatgtttcttgtaaatatcccattttgaatgcatacctgtggtggttctgtccgggctaatccccatgctagaatgtcctttccagctacgtgaataagaagtcccatgcccgcacccaccggaagcagaagcctggtggatgcctggttcgttccgcagcaccagggcctccaccgtgctgtggcagcaccccccatgtcggtatttctaaataaccttatttatacctgcagagatacacttcagtcccattcagaagtcttctcttaaagcagcattacagtcccagacctgcgggtttctgagggcaacttgctggctgacagactcagtcttgacctcaaggaaggcccatacggcactgccgcatccacctagaggtgtttgctcttgtccgctgtctgagtactgtgattctcagatgagtttgctgcgttttgggaggacacagacggttctgtataggctagttcagtaacaacaaaatacactgttttgtcttccctcaaagagagatcttactagaacctgtaaatagaatgtattatttattataagtcactgcagctgatgaaaacagatggaggccatgctgcaggctgatactgatgggtggagttttgtcatcaggccagcctcatcccgaggtctcctccaccattggccgtagccagcaggcttcagtgctcaccgaaagtaaaatcccctccttcagcaagaataaagcaatatacaccttaggttccactaagtaacataggcataagcagggaacgtttcccccactgtgttccagtgcagaggagacgaagcctgtcctcaccgcggctcgctgggcccaggctggctctggaaagcctgtgcggtcctgggcaggaagcccggcccgtggagcaggttttcgttctgcttcagcaataaataagggtgaccacagggactttgcttttggtttcctttcctgtgaaaaggttggttttaaagtgagatacacttttccgtagaacaagtgttctatctttaaaaacccaaattgcagcaccgtggattactggtctcagaacaactcattgcgcatcagatttgactctctgattttctgtctattggccaaattgccctttaactgcacctgaatcctttgtgtactgatgcctttgagctgggcaccttgggagagtgttgtgttgctgtttacggttcttccttgcccttgctaattacagtctctggtgcccagcaagcccctttggcttccttccgtgactggtcacgttgtctgcctgggctcagcgtggacctgccccatgctgcagaacctggcctcacctggacttttcactagaattgccagcttcctcaacttagcagatcattcactcatgcgggcacaagcaaagatcaacactttcttttttggtaagcttgagttttacaagttattttttggtgatgcgtaagacattgcagtgggaaaccattcaacttgagtttattggagtttgctgttgtagcaggttttaactcaggaacaactcttgtctgatctctccgcccctctgccgggaggcgacattaactgtcctctcggagccggtagcgttgctgtccgagtccccaggacggatctcctgcagacctgccttaatgctcagatcgaagtatttcacaagaatacttgtgtttttaacagcccttcccctggacggtgcggccatgagggcctcatgttacggcattgccttttctttctgtggatccagtatcttcctcggctttttagggagcaggaaaaatgcgtctgagagcaactctttttaaaaacctgccctgttgtatataactgtgtctgtttcaccgtgtgacctcccaagggggtgggaacttgatataaacgtttaaaggggccacgatttgcccgagggttactcctttgctctcaccttgtatggatgaggagatgaagccatttcttatcctgtagatgtgaagcactttcagttttcagcgatgttggaatgtagcatcagaagctcgttccttcacactcagtggcgtctgtgcttgtccacatgcgctgggcgtctgggaccttgaatgcctgccctggttgtgtggactccttaatgccaatcatttcttcacttctctgggacacccagggcgcctgttgacaagtgtggagaaactcctaatttaaatgtcacagacaatgtcctagtgttgactactacaatgttgatgctacactgttgtaattattaaactgattatttttcttatgtcaca

SEQ ID NO: 360789 - DNA, 3167 bp, Homo sapiens
  misc_feature (11)..(12): n is a, c, g, or t
  misc_feature (27)..(27): n is a, c, g, or t
aaggaatgatnncaaaactgaacaggnaatgaaaaagcacatggacaatctcaaacagtcaaatatatgtgtaactgaagttccagaaagacaggaaaaagaatagggcagaagaaatatttgaaaagaatcactaagagttttacaaaattggttcttaaaatgttaactcacatggtaaaaaatcttaggttatgccagtcaggatgaacacaaagaaaataacacctagaaaatgactgtaaaacaaggcaaacactcaattcaagttcacgcaaagaatctgctccacaagttttgcttccagaagaagagaaaattatagtggaagaaactaaaagtaatggtcagacagtgatagaagaaaagagtcttgtggataccgtatatgcattaaaggatgaagttcaagaattaagacaggacaacaaaaagatgaagaaatctctagaggaagaacagagagcccgcaaagacctggagaagctggtgaggaaagtcctgaagaacatgaatgatcctgcctgggatgagaccaatctataagggacgtcctcagttctttctgttgaagaccagttctgaggtgaagctgggcacccctgacccaagtcggggtgcactcaggaccacagggcagggctgggtggggcgccaccttgctctctgtatatagaaaagctggagcttattctgcgaatggagacgatcaaaccatgactgatgaatccagacaggagggattgactctgaggacctgagctacatcaatccactctgtgaacatctcagttacctcattctgcaataagttcagtgactgactaaaagtcttgtttttccagactttgaattgaatatataaatattatatatacatgtttcttgtaaatatcccattttgaatgcatacctgtggtggttctgtccgggctaatccccatgctagaatgtcctttccagctacgtgaataagaagtcccatgcccgcacccaccggaagcagaagcctggtggatgcctggttcgttccgcagcaccagggcctccaccgtgctgtggcagcaccccccatgtcggtatttctaaataaccttatttatacctgcagagatacacttcagtcccattcagaagtcttctcttaaagcagcattacagtcccagacctgcgggtttctgagggcaacttgctggctgacagactcagtcttgacctcaaggaaggcccatacggcactgccgcatccacctagaggtgtttgctcttgtccgctgtctgagtactgtgattctcagatgagtttgctgcgttttgggaggacacagacggttctgtataggctagttcagtaacaacaaaatacactgttttgtcttccctcaaagagagatcttactagaacctgtaaatagaatgtattatttattataagtcactgcagctgatgaaaacagatggaggccatgctgcaggctgatactgatgggtggagttttgtcatcaggccagcctcatcccgaggtctcctccaccattggccgtagccagcaggcttcagtgctcaccgaaagtaaaatcccctccttcagcaagaataaagcaatatacaccttaggttccactaagtaacataggcataagcagggaacgtttcccccactgtgttccagtgcagaggagacgaagcctgtcctcaccgcggctcgctgggcccaggctggctctggaaagcctgtgcggtcctgggcaggaagcccggcccgtggagcaggttttcgttctgcttcagcaataaataagggtgaccacagggactttgcttttggtttcctttcctgtgaaaaggttggttttaaagtgagatacacttttccgtagaacaagtgttctatctttaaaaacccaaattgcagcaccgtggattactggtctcagaacaactcattgcgcatcagatttgactctctgattttctgtctattggccaaattgccctttaactgcacctgaatcctttgtgtactgatgcctttgagctgggcaccttgggagagtgttgtgttgctgtttacggttcttccttgcccttgctaattacagtctctggtgcccagcaagcccctttggcttccttccgtgactggtcacgttgtctgcctgggctcagcgtggacctgccccatgctgcagaacctggcctcacctggacttttcactagaattgccagcttcctcaacttagcagatcattcactcatgcgggcacaagcaaagatcaacactttcttttttggtaagcttgagttttacaagttattttttggtgatgcgtaagacattgcagtgggaaaccattcaacttgagtttattggagtttgctgttgtagcaggttttaactcaggaacaactcttgtctgatctctccgcccctctgccgggaggcgacattaactgtcctctcggagccggtagcgttgctgtccgagtccccaggacggatctcctgcagacctgccttaatgctcagatcgaagtatttcacaagaatacttgtgtttttaacagcccttcccctggacggtgcggccatgagggcctcatgttacggcattgccttttctttctgtggatccagtatcttcctcggctttttagggagcaggaaaaatgcgtctgagagcaactctttttaaaaacctgccctgttgtatataactgtgtctgtttcaccgtgtgacctcccaagggggtgggaacttgatataaacgtttaaaggggccacgatttgcccgagggttactcctttgctctcaccttgtatggatgaggagatgaagccatttcttatcctgtagatgtgaagcactttcagttttcagcgatgttggaatgtagcatcagaagctcgttccttcacactcagtggcgtctgtgcttgtccacatgcgctgggcgtctgggaccttgaatgcctgccctggttgtgtggactccttaatgccaatcatttcttcacttctctgggacacccagggcgcctgttgacaagtgtggagaaactcctaatttaaatgtcacagacaatgtcctagtgttgactactacaatgttgatgctacactgttgtaattattaaactgattatttttcttatgtcaca

SEQ ID NO: 360790 - DNA, 3476 bp, Homo sapiens
aacaatttttaattagccacataaatggcacctttcccaaatgatgtcctaaatgagactatttgttaattgaatgtggaatagaattgattaattgccacatgtctatagaataatcttttggacatgggtgtgatttgtaaaagatttcttaaatgagggctttagagcaatatctttttttaaaaaagcagtttgaaacattgtatattaggtttaattagataataatcgatctagttttattctaagggttttgctaagttcgttattgtgaaacccagccgtatataaggacatcaccttttgcttttgttccatgttttggttgtggctcttcctgtcgttctcctcctcaccccctgcctgtcgcgcctgtccctccgcccgcccgtcttagcatggcaaggcactgacctgatgcataatcacgtcttggctgatgatgaccaaccaagcctagactccctggggcgtcgcagtagcctttctcgtttggagccttcagacctctcggaagactctgactatgacagtatatggacagcccatagttacagaatgggttctacatctcgttcacgcaaagaatctgctccacaagttttgcttccagaagaagagaaaattatagtggaagaaactaaaagtaatggtcagacagtgatagaagaaaagagtcttgtggataccgtatatgcattaaaggatgaagttcaagaattaagacaggacaacaaaaagatgaagaaatctctagaggaagaacagagagcccgcaaagacctggagaagctggtgaggaaagtcctgaagaacatgaatgatcctgcctgggatgagaccaatctataagggacgtcctcagttctttctgttgaagaccagttctgaggtgaagctgggcacccctgacccaagtcggggtgcactcaggaccacagggcagggctgggtggggcgccaccttgctctctgtatatagaaaagctggagcttattctgcgaatggagacgatcaaaccatgactgatgaatccagacaggagggattgactctgaggacctgagctacatcaatccactctgtgaacatctcagttacctcattctgcaataagttcagtgactgactaaaagtcttgtttttccagactttgaattgaatatataaatattatatatacatgtttcttgtaaatatcccattttgaatgcatacctgtggtggttctgtccgggctaatccccatgctagaatgtcctttccagctacgtgaataagaagtcccatgcccgcacccaccggaagcagaagcctggtggatgcctggttcgttccgcagcaccagggcctccaccgtgctgtggcagcaccccccatgtcggtatttctaaataaccttatttatacctgcagagatacacttcagtcccattcagaagtcttctcttaaagcagcattacagtcccagacctgcgggtttctgagggcaacttgctggctgacagactcagtcttgacctcaaggaaggcccatacggcactgccgcatccacctagaggtgtttgctcttgtccgctgtctgagtactgtgattctcagatgagtttgctgcgttttgggaggacacagacggttctgtataggctagttcagtaacaacaaaatacactgttttgtcttccctcaaagagagatcttactagaacctgtaaatagaatgtattatttattataagtcactgcagctgatgaaaacagatggaggccatgctgcaggctgatactgatgggtggagttttgtcatcaggccagcctcatcccgaggtctcctccaccattggccgtagccagcaggcttcagtgctcaccgaaagtaaaatcccctccttcagcaagaataaagcaatatacaccttaggttccactaagtaacataggcataagcagggaacgtttcccccactgtgttccagtgcagaggagacgaagcctgtcctcaccgcggctcgctgggcccaggctggctctggaaagcctgtgcggtcctgggcaggaagcccggcccgtggagcaggttttcgttctgcttcagcaataaataagggtgaccacagggactttgcttttggtttcctttcctgtgaaaaggttggttttaaagtgagatacacttttccgtagaacaagtgttctatctttaaaaacccaaattgcagcaccgtggattactggtctcagaacaactcattgcgcatcagatttgactctctgattttctgtctattggccaaattgccctttaactgcacctgaatcctttgtgtactgatgcctttgagctgggcaccttgggagagtgttgtgttgctgtttacggttcttccttgcccttgctaattacagtctctggtgcccagcaagcccctttggcttccttccgtgactggtcacgttgtctgcctgggctcagcgtggacctgccccatgctgcagaacctggcctcacctggacttttcactagaattgccagcttcctcaacttagcagatcattcactcatgcgggcacaagcaaagatcaacactttcttttttggtaagcttgagttttacaagttattttttggtgatgcgtaagacattgcagtgggaaaccattcaacttgagtttattggagtttgctgttgtagcaggttttaactcaggaacaactcttgtctgatctctccgcccctctgccgggaggcgacattaactgtcctctcggagccggtagcgttgctgtccgagtccccaggacggatctcctgcagacctgccttaatgctcagatcgaagtatttcacaagaatacttgtgtttttaacagcccttcccctggacggtgcggccatgagggcctcatgttacggcattgccttttctttctgtggatccagtatcttcctcggctttttagggagcaggaaaaatgcgtctgagagcaactctttttaaaaacctgccctgttgtatataactgtgtctgtttcaccgtgtgacctcccaagggggtgggaacttgatataaacgtttaaaggggccacgatttgcccgagggttactcctttgctctcaccttgtatggatgaggagatgaagccatttcttatcctgtagatgtgaagcactttcagttttcagcgatgttggaatgtagcatcagaagctcgttccttcacactcagtggcgtctgtgcttgtccacatgcgctgggcgtctgggaccttgaatgcctgccctggttgtgtggactccttaatgccaatcatttcttcacttctctgggacacccagggcgcctgttgacaagtgtggagaaactcctaatttaaatgtcacagacaatgtcctagtgttgactactacaatgttgatgctacactgttgtaattattaaactgattatttttcttatgtcaca

SEQ ID NO: 360791 - DNA, 3232 bp, Homo sapiens
ttttctgcaaaaacatcatttaaaacaactgttatacacggtagttttttaaaaatcataatgtgtgatgtcttttgtcctggtgtctatgtttagtagcagctcatcagatacagtgtgtgtttgggcttgtcactctgtcccttgtcgccagttgagtttcttgcttacagtacagtattataatttattatttgagataaaaatttttgtattatacacacatctgctacaaatgagctttttttggttcacaaacacagttcctccaccaattctaaaatcatttaatattgactttaataatggtacctttttctagaaaagcactaattgtttttttttttgtgggggggggtcttttttagggaaagcttccaacgacaggaatgacaatcacaaagcttgaggacagtgaaaatcatagaaatgcatttgaaatatcagggagcatgattgagcggatattagtgtcgtgcaacaaccagcaggatctgcaggaatgggtggagcacctacagaagcaaacgaaggtcacgtctgtgggaaaccccaccataaagcctcattcagtgccatctcataccctcagctgctctctgctacaaggaggatcttagtaagagccctaagaccatgaaaaagctgctgcccaagcgcaaacctgaacggaagccttcagatgaggagttcgcgtcccggaaaagcacagctgctttggaagaagatgctcagattctgaaagtcattgaagcttactgcgaatggagacgatcaaaccatgactgatgaatccagacaggagggattgactctgaggacctgagctacatcaatccactctgtgaacatctcagttacctcattctgcaataagttcagtgactgactaaaagtcttgtttttccagactttgaattgaatatataaatattatatatacatgtttcttgtaaatatcccattttgaatgcatacctgtggtggttctgtccgggctaatccccatgctagaatgtcctttccagctacgtgaataagaagtcccatgcccgcacccaccggaagcagaagcctggtggatgcctggttcgttccgcagcaccagggcctccaccgtgctgtggcagcaccccccatgtcggtatttctaaataaccttatttatacctgcagagatacacttcagtcccattcagaagtcttctcttaaagcagcattacagtcccagacctgcgggtttctgagggcaacttgctggctgacagactcagtcttgacctcaaggaaggcccatacggcactgccgcatccacctagaggtgtttgctcttgtccgctgtctgagtactgtgattctcagatgagtttgctgcgttttgggaggacacagacggttctgtataggctagttcagtaacaacaaaatacactgttttgtcttccctcaaagagagatcttactagaacctgtaaatagaatgtattatttattataagtcactgcagctgatgaaaacagatggaggccatgctgcaggctgatactgatgggtggagttttgtcatcaggccagcctcatcccgaggtctcctccaccattggccgtagccagcaggcttcagtgctcaccgaaagtaaaatcccctccttcagcaagaataaagcaatatacaccttaggttccactaagtaacataggcataagcagggaacgtttcccccactgtgttccagtgcagaggagacgaagcctgtcctcaccgcggctcgctgggcccaggctggctctggaaagcctgtgcggtcctgggcaggaagcccggcccgtggagcaggttttcgttctgcttcagcaataaataagggtgaccacagggactttgcttttggtttcctttcctgtgaaaaggttggttttaaagtgagatacacttttccgtagaacaagtgttctatctttaaaaacccaaattgcagcaccgtggattactggtctcagaacaactcattgcgcatcagatttgactctctgattttctgtctattggccaaattgccctttaactgcacctgaatcctttgtgtactgatgcctttgagctgggcaccttgggagagtgttgtgttgctgtttacggttcttccttgcccttgctaattacagtctctggtgcccagcaagcccctttggcttccttccgtgactggtcacgttgtctgcctgggctcagcgtggacctgccccatgctgcagaacctggcctcacctggacttttcactagaattgccagcttcctcaacttagcagatcattcactcatgcgggcacaagcaaagatcaacactttcttttttggtaagcttgagttttacaagttattttttggtgatgcgtaagacattgcagtgggaaaccattcaacttgagtttattggagtttgctgttgtagcaggttttaactcaggaacaactcttgtctgatctctccgcccctctgccgggaggcgacattaactgtcctctcggagccggtagcgttgctgtccgagtccccaggacggatctcctgcagacctgccttaatgctcagatcgaagtatttcacaagaatacttgtgtttttaacagcccttcccctggacggtgcggccatgagggcctcatgttacggcattgccttttctttctgtggatccagtatcttcctcggctttttagggagcaggaaaaatgcgtctgagagcaactctttttaaaaacctgccctgttgtatataactgtgtctgtttcaccgtgtgacctcccaagggggtgggaacttgatataaacgtttaaaggggccacgatttgcccgagggttactcctttgctctcaccttgtatggatgaggagatgaagccatttcttatcctgtagatgtgaagcactttcagttttcagcgatgttggaatgtagcatcagaagctcgttccttcacactcagtggcgtctgtgcttgtccacatgcgctgggcgtctgggaccttgaatgcctgccctggttgtgtggactccttaatgccaatcatttcttcacttctctgggacacccagggcgcctgttgacaagtgtggagaaactcctaatttaaatgtcacagacaatgtcctagtgttgactactacaatgttgatgctacactgttgtaattattaaactgattatttttcttatgtcaca

SEQ ID NO: 360792 - DNA, 5175 bp, Homo sapiens
acggcggccgaggccggggggcggcggcgggcgcccgcaggttcccgagccgctcctgagaaggcgcctgacagcgggccggggcgcacggagaagcgggccgggccggacctgctgggccgcgccgagccaatcgccggcgccggccgctcgatgggcgaggcggcggcggcggcggcgggggccgcgggccgggccgccgctccgaggtgaaggcgcgcgcccctccccgcctgcctcccgggccgcagcgatgaattccgccgagcaaaccgttacgtggctcatcactctgggggtgctggagtcgcccaaaaaaaccatctcggacccggagggctttctgcaggcgtcgctgaaggatggggtggtcctctgcaggctgctggagcgcctgctccccgggaccatcgagaaagtctaccccgagccccggagcgagagcgagtgcctgagcaacatccgcgagttcctgcgcggctgcggggcttccctgcggctggagacgtttgatgcaaatgatttgtatcaggggcagaattttaacaaggtcctcagttccttagtgactctaaataaagtaacagcagacatcgggctggggagtgactccgtgtgtgcccggccctcgtctcaccgcataaagtcttttgactcccttggatcacagtctttgcacactcggacttcaaaactgttccagggccagtatcggagtttggacatgaccgataatagcaacaatcaatggttccccagcaactacgtgcgcgaggtcaaggccagcgagaagcctgtgtctcccaaatcaggaacactgaagagccctcccaaaggatttgatacgactgccataaacaaaagctattacaatgtggtgctacagaatattttagaaacagaaaatgaatattctaaagaacttcagactgtgctttcaacgtacctacggccattgcagaccagtgagaagttaagttcagcaaacatttcatatttaatgggaaatctagaagaaatatgttctttccagcaaatgctcgtacagtctttagaagaatgcaccaagttgcccgaagctcagcagagagtcggaggctgctttttaaacctgatgccacagatgaaaaccctgtacctcacgtattgtgccaatcacccttctgcagtgaatgtcctcacggaacacagtgaggagttgggggagttcatggagaccaaaggtgccagcagccctgggattctcgtgctgaccacgggcctgagcaaacccttcatgcgcctggataaataccctacgctgctcaaagagctcgagagacacatggaggattatcatacagatagacaagatattcaaaaatccatggctgccttcaaaaacctttcagcccaatgtcaagaagtccggaagaggaaagagcttgagctgcagatcctgacggaagccatccggaactgggagggcgatgacattaaaactctgggcaacgtcacttacatgtcccaggtcctgattcagtgtgccggaagtgaggaaaagaatgaaagatatcttctactcttcccaaatgttttgctaatgttgtctgccagtcctaggatgagtggctttatctatcagggaaagcttccaacgacaggaatgacaatcacaaagcttgaggacagtgaaaatcatagaaatgcatttgaaatatcagggagcatgattgagcggatattagtgtcgtgcaacaaccagcaggatctgcaggaatgggtggagcacctacagaagcaaacgaaggtcacgtctgtgggaaaccccaccataaagcctcattcagtgccatctcataccctcccctcccacccggtcactccgtccagcaagcacgcagacagcaagcccgcgccgctgacgcccgcctaccacacgctgccccacccctcccaccacggcaccccgcacaccaccatcaactggggacccctggagcctccgaaaacacccaagccctggagcctgagctgcctgcggcccgcgcctcccctccggccctcagctgctctctgctacaaggaggatcttagtaagagccctaagaccatgaaaaagctgctgcccaagcgcaaacctgaacggaagccttcagatgaggagttcgcgtcccggaaaagcacagctgctttggaagaagatgctcagattctgaaagtcattgaagcttactgcaccagcgccaaaacaaggcaaacactcaattcaagttcacgcaaagaatctgctccacaagttttgcttccagaagaagagaaaattatagtggaagaaactaaaagtaatggtcagacagtgatagaagaaaagagtcttgtggataccgtatatgcattaaaggatgaagttcaagaattaagacaggacaacaaaaagatgaagaaatctctagaggaagaacagagagcccgcaaagacctggagaagctggtgaggaaagtcctgaagaacatgaatgatcctgcctgggatgagaccaatctataagggacgtcctcagttctttctgttgaagaccagttctgaggtgaagctgggcacccctgacccaagtcggggtgcactcaggaccacagggcagggctgggtggggcgccaccttgctctctgtatatagaaaagctggagcttattctgcgaatggagacgatcaaaccatgactgatgaatccagacaggagggattgactctgaggacctgagctacatcaatccactctgtgaacatctcagttacctcattctgcaataagttcagtgactgactaaaagtcttgtttttccagactttgaattgaatatataaatattatatatacatgtttcttgtaaatatcccattttgaatgcatacctgtggtggttctgtccgggctaatccccatgctagaatgtcctttccagctacgtgaataagaagtcccatgcccgcacccaccggaagcagaagcctggtggatgcctggttcgttccgcagcaccagggcctccaccgtgctgtggcagcaccccccatgtcggtatttctaaataaccttatttatacctgcagagatacacttcagtcccattcagaagtcttctcttaaagcagcattacagtcccagacctgcgggtttctgagggcaacttgctggctgacagactcagtcttgacctcaaggaaggcccatacggcactgccgcatccacctagaggtgtttgctcttgtccgctgtctgagtactgtgattctcagatgagtttgctgcgttttgggaggacacagacggttctgtataggctagttcagtaacaacaaaatacactgttttgtcttccctcaaagagagatcttactagaacctgtaaatagaatgtattatttattataagtcactgcagctgatgaaaacagatggaggccatgctgcaggctgatactgatgggtggagttttgtcatcaggccagcctcatcccgaggtctcctccaccattggccgtagccagcaggcttcagtgctcaccgaaagtaaaatcccctccttcagcaagaataaagcaatatacaccttaggttccactaagtaacataggcataagcagggaacgtttcccccactgtgttccagtgcagaggagacgaagcctgtcctcaccgcggctcgctgggcccaggctggctctggaaagcctgtgcggtcctgggcaggaagcccggcccgtggagcaggttttcgttctgcttcagcaataaataagggtgaccacagggactttgcttttggtttcctttcctgtgaaaaggttggttttaaagtgagatacacttttccgtagaacaagtgttctatctttaaaaacccaaattgcagcaccgtggattactggtctcagaacaactcattgcgcatcagatttgactctctgattttctgtctattggccaaattgccctttaactgcacctgaatcctttgtgtactgatgcctttgagctgggcaccttgggagagtgttgtgttgctgtttacggttcttccttgcccttgctaattacagtctctggtgcccagcaagcccctttggcttccttccgtgactggtcacgttgtctgcctgggctcagcgtggacctgccccatgctgcagaacctggcctcacctggacttttcactagaattgccagcttcctcaacttagcagatcattcactcatgcgggcacaagcaaagatcaacactttcttttttggtaagcttgagttttacaagttattttttggtgatgcgtaagacattgcagtgggaaaccattcaacttgagtttattggagtttgctgttgtagcaggttttaactcaggaacaactcttgtctgatctctccgcccctctgccgggaggcgacattaactgtcctctcggagccggtagcgttgctgtccgagtccccaggacggatctcctgcagacctgccttaatgctcagatcgaagtatttcacaagaatacttgtgtttttaacagcccttcccctggacggtgcggccatgagggcctcatgttacggcattgccttttctttctgtggatccagtatcttcctcggctttttagggagcaggaaaaatgcgtctgagagcaactctttttaaaaacctgccctgttgtatataactgtgtctgtttcaccgtgtgacctcccaagggggtgggaacttgatataaacgtttaaaggggccacgatttgcccgagggttactcctttgctctcaccttgtatggatgaggagatgaagccatttcttatcctgtagatgtgaagcactttcagttttcagcgatgttggaatgtagcatcagaagctcgttccttcacactcagtggcgtctgtgcttgtccacatgcgctgggcgtctgggaccttgaatgcctgccctggttgtgtggactccttaatgccaatcatttcttcacttctctgggacacccagggcgcctgttgacaagtgtggagaaactcctaatttaaatgtcacagacaatgtcctagtgttgactactacaatgttgatgctacactgttgtaattattaaactgattatttttcttatgtcacaaaaaaaaaaaataaaacaagtcat

SEQ ID NO: 360793 - DNA, 528 bp, Homo sapiens
  misc_feature (16)..(16): n is a, c, g, or t
gccacagcgtgaggangggtgaagtgacacgtgtgcttcatagatgaagcatctttttaaaaacctgccctgttgtatataactgtgtctgtttcaccgtgtgacctcccaagggggtgggaacttgatataaacgtttaaaggggccacgatttgcccgagggttactcctttgctctcaccttgtatggatgaggagatgaagccatttcttatcctgtagatgtgaagcactttcagttttcagcgatgttggaatgtagcatcagaagctcgttccttcacactcagtggcgtctgtgcttgtccacatgcgctgggcgtctgggaccttgaatgcctgccctggttgtgtggactccttaatgccaatcatttcttcacttctctgggacacccagggcgcctgttgacaagtgtggagaaactcctaatttaaatgtcacagacaatgtcctagtgttgactactacaatgttgatgctacactgttgtaattattaaactgattatttttcttatgtcaca

SEQ ID NO: 360794 - DNA, 2582 bp, Homo sapiens
acggcggccgaggccggggggcggcggcgggcgcccgcaggttcccgagccgctcctgagaaggcgcctgacagcgggccggggcgcacggagaagcgggccgggccggacctgctgggccgcgccgagccaatcgccggcgccggccgctcgatgggcgaggcggcggcggcggcggcgggggccgcgggccgggccgccgctccgaggtgaaggcgcgcgcccctccccgcctgcctcccgggccgcagcgatgaattccgccgagcaaaccgttacgtggctcatcactctgggggtgctggagtcgcccaaaaaaaccatctcggacccggagggctttctgcaggcgtcgctgaaggatggggtggtcctctgcaggctgctggagcgcctgctccccgggaccatcgagaaagtctaccccgagccccggagcgagagcgagtgcctgagcaacatccgcgagttcctgcgcggctgcggggcttccctgcggctggagacgtttgatgcaaatgatttgtatcaggggcagaattttaacaaggtcctcagttccttagtgactctaaataaagtaacagcagacatcgggctggggagtgactccgtgtgtgcccggccctcgtctcaccgcataaagtcttttgactcccttggatcacagtctttgcacactcggacttcaaaactgttccagggccagtatcggagtttggacatgaccgataatagcaacaatcaatggttccccagcaactacgtgcgcgaggtcaaggccagcgagaagcctgtgtctcccaaatcaggaacactgaagagccctcccaaaggatttgatacgactgccataaacaaaagctattacaatgtggtgctacagaatattttagaaacagaaaatgaatattctaaagaacttcagactgtgctttcaacgtacctacggccattgcagaccagtgagaagttaagttcagcaaacatttcatatttaatgggaaatctagaagaaatatgttctttccagcaaatgctcgtacagtctttagaagaatgcaccaagttgcccgaagctcagcagagagtcggaggctgctttttaaacctgatgccacagatgaaaaccctgtacctcacgtattgtgccaatcacccttctgcagtgaatgtcctcacggaacacagtgaggagttgggggagttcatggagaccaaaggtgccagcagccctgggattctcgtgctgaccacgggcctgagcaaacccttcatgcgcctggataaataccctacgctgctcaaagagctcgagagacacatggaggattatcatacagatagacaagatattcaaaaatccatggctgccttcaaaaacctttcagcccaatgtcaagaagtccggaagaggaaagagcttgagctgcagatcctgacggaagccatccggaactgggagggcgatgacattaaaactctgggcaacgtcacttacatgtcccaggtcctgattcagtgtgccggaagtgaggaaaagaatgaaagatatcttctactcttcccaaatgttttgctaatgttgtctgccagtcctaggatgagtggctttatctatcagggaaagcttccaacgacaggaatgacaatcacaaagcttgaggacagtgaaaatcatagaaatgcatttgaaatatcagggagcatgattgagcggatattagtgtcgtgcaacaaccagcaggatctgcaggaatgggtggagcacctacagaagcaaacgaaggtcacgtctgtgggaaaccccaccataaagcctcattcagtgccatctcataccctcccctcccacccggtcactccgtccagcaagcacgcagacagcaagcccgcgccgctgacgcccgcctaccacacgctgccccacccctcccaccacggcaccccgcacaccaccatcaactggggacccctggagcctccgaaaacacccaagccctggagcctgagctgcctgcggcccgcgcctcccctccggccctcagctgctctctgctacaaggaggatcttagtaagagccctaagaccatgaaaaagctgctgcccaagcgcaaacctgaacggaagccttcagatgaggagttcgcgtcccggaaaagcacagctgctttggaagaagatgctcagattctgaaagtcattgaagcttactgcaccagcgccaaaacaaggcaaacactcaattcaacatggcaaggcactgacctgatgcataatcacgtcttggctgatgatgaccaaccaagcctagactccctggggcgtcgcagtagcctttctcgtttggagccttcagacctctcggaagactctgactatgacagtatatggacagcccatagttacagaatgggttctacatctcgtaagagctgttgctcatatatctctcaccagaactaatgcacttctgagcttttcttaacaaatgcttgttgtatcgcagcctgcttttcttagatgttttcttgctgttccttgtctcttttatgtgatattttaacaacttttgagagtg

SEQ ID NO: 360795 - DNA, 1822 bp, Homo sapiens
acggcggccgaggccggggggcggcggcgggcgcccgcaggttcccgagccgctcctgagaaggcgcctgacagcgggccggggcgcacggagaagcgggccgggccggacctgctgggccgcgccgagccaatcgccggcgccggccgctcgatgggcgaggcggcggcggcggcggcgggggccgcgggccgggccgccgctccgaggtgaaggcgcgcgcccctccccgcctgcctcccgggccgcagcgatgaattccgccgagcaaaccgttacgtggctcatcactctgggggtgctggagtcgcccaaaaaaaccatctcggacccggagggctttctgcaggcgtcgctgaaggatggggtggtcctctgcaggctgctggagcgcctgctccccgggaccatcgagaaagtctaccccgagccccggagcgagagcgagtgcctgagcaacatccgcgagttcctgcgcggctgcggggcttccctgcggctggagacgtttgatgcaaatgatttgtatcaggggcagaattttaacaaggtcctcagttccttagtgactctaaataaagtaacagcagacatcgggctggggagtgactccgtgtgtgcccggccctcgtctcaccgcataaagtcttttgactcccttggatcacagtctttgcacactcggacttcaaaactgttccagggccagtatcggagtttggacatgaccgataatagcaacaatcaatggttccccagcaactacgtgcgcgaggtcaaggccagcgagaagcctgtgtctcccaaatcaggaacactgaagagccctcccaaaggatttgatacgactgccataaacaaaagctattacaatgtggtgctacagaatattttagaaacagaaaatgaatattctaaagaacttcagactgtgctttcaacgtacctacggccattgcagaccagtgagaagttaagttcagcaaacatttcatatttaatgggaaatctagaagaaatatgttctttccagcaaatgctcgtacagtctttagaagaatgcaccaagttgcccgaagctcagcagagagtcggaggctgctttttaaacctgatgccacagatgaaaaccctgtacctcacgtattgtgccaatcacccttctgcagtgaatgtcctcacggaacacagtgaggagttgggggagttcatggagaccaaaggtgccagcagccctgggattctcgtgctgaccacgggcctgagcaaacccttcatgcgcctggataaataccctacgctgctcaaagagctcgagagacacatggaggattatcatacagatagacaagatattcaaaaatccatggctgccttcaaaaacctttcagcccaatgtcaagaagtccggaagaggaaagagcttgagctgcagatcctgacggaagccatccggaactgggagggcgatgacattaaaactctgggcaacgtcacttacatgtcccaggtcctgattcagtgtgccggaagtgaggaaaagaatgaaagatatcttctactcttcccaaatgttttgctaatgttgtctgccagtcctaggatgagtggctttatctatcaggtaaaacacaatttaaatttatattttattgtggatctgaggataatttcaaactggctttgaattttgtgttaaatattacgtgtatctatctgtgtatgtgctgtgtgtgtagtgctgtatattcagatatggacgtacagctcctgtttgtgtttcgttgtgactgcaagcatatcctatgttaatttcaaaaaa

SEQ ID NO: 360796 - DNA, 293 bp, Homo sapiens
atcaggaacactgaagagccctcccaaaggatttgatacgactgccataaacaaaagctattacaatgtggtgagtaattgcagaacatttttaaactaactggtttttgactgcctgtaaaactcagcaatgtagaatgtagtgtaaagtacctagaataggaagaaggaaataaagttcattcatctgccacacaaatgtaaccaccattaaggttttggtctgtttccttctaatctctgtatttttgtaattgtatgtttttgttttaatatcatgtatatggaaatgt

SEQ ID NO: 360797 - DNA, 638 bp, Homo sapiens
acggcggccgaggccggggggcggcggcgggcgcccgcaggttcccgagccgctcctgagaaggcgcctgacagcgggccggggcgcacggagaagcgggccgggccggacctgctgggccgcgccgagccaatcgccggcgccggccgctcgatgggcgaggcggcggcggcggcggcgggggccgcgggccgggccgccgctccgaggtgaaggcgcgcgcccctccccgcctgcctcccgggccgcagcgatgaattccgccgagcaaaccgttacgtggctcatcactctgggggtgctggagtcgcccaaaaaaaccatctcggacccggagggctttctgcaggcgtcgctgaaggatggggtggtcctctgcaggctgctggagcgcctgctccccgggaccatcgagaaatcctgcaggcactgcttctcccttccggctggtggttcccaggctggagcgtgtgaaccctgacccgaatctctggaagtgattaaagtttgttttcatcgcccacaagccggccagcagggccgaggaggcaggagagtttctaaaaacgatgtctccctgtagctcaaaatactaaaatcttattcccagggtgtttcttcggggggtggggtggggg

SEQ ID NO: 360798 - DNA, 5151 bp, Homo sapiens
acggcggccgaggccggggggcggcggcgggcgcccgcaggttcccgagccgctcctgagaaggcgcctgacagcgggccggggcgcacggagaagcgggccgggccggacctgctgggccgcgccgagccaatcgccggcgccggccgctcgatgggcgaggcggcggcggcggcggcgggggccgcgggccgggccgccgctccgaggtgaaggcgcgcgcccctccccgcctgcctcccgggccgcagcgatgaattccgccgagcaaaccgttacgtggctcatcactctgggggtgctggagtcgcccaaaaaaaccatctcggacccggagggctttctgcaggcgtcgctgaaggatggggtggtcctctgcaggctgctggagcgcctgctccccgggaccatcgagaaagtctaccccgagccccggagcgagagcgagtgcctgagcaacatccgcgagttcctgcgcggctgcggggcttccctgcggctggagacgtttgatgcaaatgatttgtatcaggggcagaattttaacaaggtcctcagttccttagtgactctaaataaagtaacagcagacatcgggctggggagtgactccgtgtgtgcccggccctcgtctcaccgcataaagtcttttgactcccttggatcacagtctttgcacactcggacttcaaaactgttccagggccagtatcggagtttggacatgaccgataatagcaacaatcaatggttccccagcaactacgtgcgcgaggtcaaggccagcgagaagcctgtgtctcccaaatcaggaacactgaagagccctcccaaaggatttgatacgactgccataaacaaaagctattacaatgtggtgctacagaatattttagaaacagaaaatgaatattctaaagaacttcagactgtgctttcaacgtacctacggccattgcagaccagtgagaagttaagttcagcaaacatttcatatttaatgggaaatctagaagaaatatgttctttccagcaaatgctcgtacagtctttagaagaatgcaccaagttgcccgaagctcagcagagagtcggaggctgctttttaaacctgatgccacagatgaaaaccctgtacctcacgtattgtgccaatcacccttctgcagtgaatgtcctcacggaacacagtgaggagttgggggagttcatggagaccaaaggtgccagcagccctgggattctcgtgctgaccacgggcctgagcaaacccttcatgcgcctggataaataccctacgctgctcaaagagctcgagagacacatggaggattatcatacagatagacaagatattcaaaaatccatggctgccttcaaaaacctttcagcccaatgtcaagaagtccggaagaggaaagagcttgagctgcagatcctgacggaagccatccggaactgggagggcgatgacattaaaactctgggcaacgtcacttacatgtcccaggtcctgattcagtgtgccggaagtgaggaaaagaatgaaagatatcttctactcttcccaaatgttttgctaatgttgtctgccagtcctaggatgagtggctttatctatcagggaaagcttccaacgacaggaatgacaatcacaaagcttgaggacagtgaaaatcatagaaatgcatttgaaatatcagggagcatgattgagcggatattagtgtcgtgcaacaaccagcaggatctgcaggaatgggtggagcacctacagaagcaaacgaaggtcacgtctgtgggaaaccccaccataaagcctcattcagtgccatctcataccctcccctcccacccggtcactccgtccagcaagcacgcagacagcaagcccgcgccgctgacgcccgcctaccacacgctgccccacccctcccaccacggcaccccgcacaccaccatcaactggggacccctggagcctccgaaaacacccaagccctggagcctgagctgcctgcggcccgcgcctcccctccggccctcagctgctctctgctacaaggaggatcttagtaagagccctaagaccatgaaaaagctgctgcccaagcgcaaacctgaacggaagccttcagatgaggagttcgcgtcccggaaaagcacagctgctttggaagaagatgctcagattctgaaagtcattgaagcttactgcaccagcgccaaaacaaggcaaacactcaattcaagttcacgcaaagaatctgctccacaagttttgcttccagaagaagagaaaattatagtggaagaaactaaaagtaatggtcagacagtgatagaagaaaagagtcttgtggataccgtatatgcattaaaggatgaagttcaagaattaagacaggacaacaaaaagatgaagaaatctctagaggaagaacagagagcccgcaaagacctggagaagctggtgaggaaagtcctgaagaacatgaatgatcctgcctgggatgagaccaatctataagggacgtcctcagttctttctgttgaagaccagttctgaggtgaagctgggcacccctgacccaagtcggggtgcactcaggaccacagggcagggctgggtggggcgccaccttgctctctgtatatagaaaagctggagcttattctgcgaatggagacgatcaaaccatgactgatgaatccagacaggagggattgactctgaggacctgagctacatcaatccactctgtgaacatctcagttacctcattctgcaataagttcagtgactgactaaaagtcttgtttttccagactttgaattgaatatataaatattatatatacatgtttcttgtaaatatcccattttgaatgcatacctgtggtggttctgtccgggctaatccccatgctagaatgtcctttccagctacgtgaataagaagtcccatgcccgcacccaccggaagcagaagcctggtggatgcctggttcgttccgcagcaccagggcctccaccgtgctgtggcagcaccccccatgtcggtatttctaaataaccttatttatacctgcagagatacacttcagtcccattcagaagtcttctcttaaagcagcattacagtcccagacctgcgggtttctgagggcaacttgctggctgacagactcagtcttgacctcaaggaaggcccatacggcactgccgcatccacctagaggtgtttgctcttgtccgctgtctgagtactgtgattctcagatgagtttgctgcgttttgggaggacacagacggttctgtataggctagttcagtaacaacaaaatacactgttttgtcttccctcaaagagagatcttactagaacctgtaaatagaatgtattatttattataagtcactgcagctgatgaaaacagatggaggccatgctgcaggctgatactgatgggtggagttttgtcatcaggccagcctcatcccgaggtctcctccaccattggccgtagccagcaggcttcagtgctcaccgaaagtaaaatcccctccttcagcaagaataaagcaatatacaccttaggttccactaagtaacataggcataagcagggaacgtttcccccactgtgttccagtgcagaggagacgaagcctgtcctcaccgcggctcgctgggcccaggctggctctggaaagcctgtgcggtcctgggcaggaagcccggcccgtggagcaggttttcgttctgcttcagcaataaataagggtgaccacagggactttgcttttggtttcctttcctgtgaaaaggttggttttaaagtgagatacacttttccgtagaacaagtgttctatctttaaaaacccaaattgcagcaccgtggattactggtctcagaacaactcattgcgcatcagatttgactctctgattttctgtctattggccaaattgccctttaactgcacctgaatcctttgtgtactgatgcctttgagctgggcaccttgggagagtgttgtgttgctgtttacggttcttccttgcccttgctaattacagtctctggtgcccagcaagcccctttggcttccttccgtgactggtcacgttgtctgcctgggctcagcgtggacctgccccatgctgcagaacctggcctcacctggacttttcactagaattgccagcttcctcaacttagcagatcattcactcatgcgggcacaagcaaagatcaacactttcttttttggtaagcttgagttttacaagttattttttggtgatgcgtaagacattgcagtgggaaaccattcaacttgagtttattggagtttgctgttgtagcaggttttaactcaggaacaactcttgtctgatctctccgcccctctgccgggaggcgacattaactgtcctctcggagccggtagcgttgctgtccgagtccccaggacggatctcctgcagacctgccttaatgctcagatcgaagtatttcacaagaatacttgtgtttttaacagcccttcccctggacggtgcggccatgagggcctcatgttacggcattgccttttctttctgtggatccagtatcttcctcggctttttagggagcaggaaaaatgcgtctgagagcaactctttttaaaaacctgccctgttgtatataactgtgtctgtttcaccgtgtgacctcccaagggggtgggaacttgatataaacgtttaaaggggccacgatttgcccgagggttactcctttgctctcaccttgtatggatgaggagatgaagccatttcttatcctgtagatgtgaagcactttcagttttcagcgatgttggaatgtagcatcagaagctcgttccttcacactcagtggcgtctgtgcttgtccacatgcgctgggcgtctgggaccttgaatgcctgccctggttgtgtggactccttaatgccaatcatttcttcacttctctgggacacccagggcgcctgttgacaagtgtggagaaactcctaatttaaatgtcacagacaatgtcctagtgttgactactacaatgttgatgctacactgttgtaattattaaactgattatttttcttatgtcaca

SEQ ID NO: 360799 - DNA, 4940 bp, Homo sapiens
tccggcgccggggctcacttcctggtgcgggaaggggcagagattggtgcagccccggaggaagaaaaaagggtctaccccgagccccggagcgagagcgagtgcctgagcaacatccgcgagttcctgcgcggctgcggggcttccctgcggctggagacgtttgatgcaaatgatttgtatcaggggcagaattttaacaaggtcctcagttccttagtgactctaaataaagtaacagcagacatcgggctggggagtgactccgtgtgtgcccggccctcgtctcaccgcataaagtcttttgactcccttggatcacagtctttgcacactcggacttcaaaactgttccagggccagtatcggagtttggacatgaccgataatagcaacaatcaactggtagtaagagcaaagtttaacttccagcagaccaatgaggacgagctttccttctcaaaaggagacgtcatccatgtcacccgtgtggaagagggaggctggtgggagggcacactcaacggccggaccggctggttccccagcaactacgtgcgcgaggtcaaggccagcgagaagcctgtgtctcccaaatcaggaacactgaagagccctcccaaaggatttgatacgactgccataaacaaaagctattacaatgtggtgctacagaatattttagaaacagaaaatgaatattctaaagaacttcagactgtgctttcaacgtacctacggccattgcagaccagtgagaagttaagttcagcaaacatttcatatttaatgggaaatctagaagaaatatgttctttccagcaaatgctcgtacagtctttagaagaatgcaccaagttgcccgaagctcagcagagagtcggaggctgctttttaaacctgatgccacagatgaaaaccctgtacctcacgtattgtgccaatcacccttctgcagtgaatgtcctcacggaacacagtgaggagttgggggagttcatggagaccaaaggtgccagcagccctgggattctcgtgctgaccacgggcctgagcaaacccttcatgcgcctggataaataccctacgctgctcaaagagctcgagagacacatggaggattatcatacagatagacaagatattcaaaaatccatggctgccttcaaaaacctttcagcccaatgtcaagaagtccggaagaggaaagagcttgagctgcagatcctgacggaagccatccggaactgggagggcgatgacattaaaactctgggcaacgtcacttacatgtcccaggtcctgattcagtgtgccggaagtgaggaaaagaatgaaagatatcttctactcttcccaaatgttttgctaatgttgtctgccagtcctaggatgagtggctttatctatcagggaaagcttccaacgacaggaatgacaatcacaaagcttgaggacagtgaaaatcatagaaatgcatttgaaatatcagggagcatgattgagcggatattagtgtcgtgcaacaaccagcaggatctgcaggaatgggtggagcacctacagaagcaaacgaaggtcacgtctgtgggaaaccccaccataaagcctcattcagtgccatctcataccctcccctcccacccggtcactccgtccagcaagcacgcagacagcaagcccgcgccgctgacgcccgcctaccacacgctgccccacccctcccaccacggcaccccgcacaccaccatcaactggggacccctggagcctccgaaaacacccaagccctggagcctgagctgcctgcggcccgcgcctcccctccggccctcagctgctctctgctacaaggaggatcttagtaagagccctaagaccatgaaaaagctgctgcccaagcgcaaacctgaacggaagccttcagatgaggagttcgcgtcccggaaaagcacagctgctttggaagaagatgctcagattctgaaagtcattgaagcttactgcaccagcgccaaaacaaggcaaacactcaattcaagttcacgcaaagaatctgctccacaagttttgcttccagaagaagagaaaattatagtggaagaaactaaaagtaatggtcagacagtgatagaagaaaagagtcttgtggataccgtatatgcattaaaggatgaagttcaagaattaagacaggacaacaaaaagatgaagaaatctctagaggaagaacagagagcccgcaaagacctggagaagctggtgaggaaagtcctgaagaacatgaatgatcctgcctgggatgagaccaatctataagggacgtcctcagttctttctgttgaagaccagttctgaggtgaagctgggcacccctgacccaagtcggggtgcactcaggaccacagggcagggctgggtggggcgccaccttgctctctgtatatagaaaagctggagcttattctgcgaatggagacgatcaaaccatgactgatgaatccagacaggagggattgactctgaggacctgagctacatcaatccactctgtgaacatctcagttacctcattctgcaataagttcagtgactgactaaaagtcttgtttttccagactttgaattgaatatataaatattatatatacatgtttcttgtaaatatcccattttgaatgcatacctgtggtggttctgtccgggctaatccccatgctagaatgtcctttccagctacgtgaataagaagtcccatgcccgcacccaccggaagcagaagcctggtggatgcctggttcgttccgcagcaccagggcctccaccgtgctgtggcagcaccccccatgtcggtatttctaaataaccttatttatacctgcagagatacacttcagtcccattcagaagtcttctcttaaagcagcattacagtcccagacctgcgggtttctgagggcaacttgctggctgacagactcagtcttgacctcaaggaaggcccatacggcactgccgcatccacctagaggtgtttgctcttgtccgctgtctgagtactgtgattctcagatgagtttgctgcgttttgggaggacacagacggttctgtataggctagttcagtaacaacaaaatacactgttttgtcttccctcaaagagagatcttactagaacctgtaaatagaatgtattatttattataagtcactgcagctgatgaaaacagatggaggccatgctgcaggctgatactgatgggtggagttttgtcatcaggccagcctcatcccgaggtctcctccaccattggccgtagccagcaggcttcagtgctcaccgaaagtaaaatcccctccttcagcaagaataaagcaatatacaccttaggttccactaagtaacataggcataagcagggaacgtttcccccactgtgttccagtgcagaggagacgaagcctgtcctcaccgcggctcgctgggcccaggctggctctggaaagcctgtgcggtcctgggcaggaagcccggcccgtggagcaggttttcgttctgcttcagcaataaataagggtgaccacagggactttgcttttggtttcctttcctgtgaaaaggttggttttaaagtgagatacacttttccgtagaacaagtgttctatctttaaaaacccaaattgcagcaccgtggattactggtctcagaacaactcattgcgcatcagatttgactctctgattttctgtctattggccaaattgccctttaactgcacctgaatcctttgtgtactgatgcctttgagctgggcaccttgggagagtgttgtgttgctgtttacggttcttccttgcccttgctaattacagtctctggtgcccagcaagcccctttggcttccttccgtgactggtcacgttgtctgcctgggctcagcgtggacctgccccatgctgcagaacctggcctcacctggacttttcactagaattgccagcttcctcaacttagcagatcattcactcatgcgggcacaagcaaagatcaacactttcttttttggtaagcttgagttttacaagttattttttggtgatgcgtaagacattgcagtgggaaaccattcaacttgagtttattggagtttgctgttgtagcaggttttaactcaggaacaactcttgtctgatctctccgcccctctgccgggaggcgacattaactgtcctctcggagccggtagcgttgctgtccgagtccccaggacggatctcctgcagacctgccttaatgctcagatcgaagtatttcacaagaatacttgtgtttttaacagcccttcccctggacggtgcggccatgagggcctcatgttacggcattgccttttctttctgtggatccagtatcttcctcggctttttagggagcaggaaaaatgcgtctgagagcaactctttttaaaaacctgccctgttgtatataactgtgtctgtttcaccgtgtgacctcccaagggggtgggaacttgatataaacgtttaaaggggccacgatttgcccgagggttactcctttgctctcaccttgtatggatgaggagatgaagccatttcttatcctgtagatgtgaagcactttcagttttcagcgatgttggaatgtagcatcagaagctcgttccttcacactcagtggcgtctgtgcttgtccacatgcgctgggcgtctgggaccttgaatgcctgccctggttgtgtggactccttaatgccaatcatttcttcacttctctgggacacccagggcgcctgttgacaagtgtggagaaactcctaatttaaatgtcacagacaatgtcctagtgttgactactacaatgttgatgctacactgttgtaattattaaactgattatttttcttatgtcaca

SEQ ID NO: 360800 - DNA, 5328 bp, Homo sapiens
acggcggccgaggccggggggcggcggcgggcgcccgcaggttcccgagccgctcctgagaaggcgcctgacagcgggccggggcgcacggagaagcgggccgggccggacctgctgggccgcgccgagccaatcgccggcgccggccgctcgatgggcgaggcggcggcggcggcggcgggggccgcgggccgggccgccgctccgaggtgaaggcgcgcgcccctccccgcctgcctcccgggccgcagcgatgaattccgccgagcaaaccgttacgtggctcatcactctgggggtgctggagtcgcccaaaaaaaccatctcggacccggagggctttctgcaggcgtcgctgaaggatggggtggtcctctgcaggctgctggagcgcctgctccccgggaccatcgagaaagtctaccccgagccccggagcgagagcgagtgcctgagcaacatccgcgagttcctgcgcggctgcggggcttccctgcggctggagacgtttgatgcaaatgatttgtatcaggggcagaattttaacaaggtcctcagttccttagtgactctaaataaagtaacagcagacatcgggctggggagtgactccgtgtgtgcccggccctcgtctcaccgcataaagtcttttgactcccttggatcacagtctttgcacactcggacttcaaaactgttccagggccagtatcggagtttggacatgaccgataatagcaacaatcaatggttccccagcaactacgtgcgcgaggtcaaggccagcgagaagcctgtgtctcccaaatcaggaacactgaagagccctcccaaaggatttgatacgactgccataaacaaaagctattacaatgtggtgctacagaatattttagaaacagaaaatgaatattctaaagaacttcagactgtgctttcaacgtacctacggccattgcagaccagtgagaagttaagttcagcaaacatttcatatttaatgggaaatctagaagaaatatgttctttccagcaaatgctcgtacagtctttagaagaatgcaccaagttgcccgaagctcagcagagagtcggaggctgctttttaaacctgatgccacagatgaaaaccctgtacctcacgtattgtgccaatcacccttctgcagtgaatgtcctcacggaacacagtgaggagttgggggagttcatggagaccaaaggtgccagcagccctgggattctcgtgctgaccacgggcctgagcaaacccttcatgcgcctggataaataccctacgctgctcaaagagctcgagagacacatggaggattatcatacagatagacaagatattcaaaaatccatggctgccttcaaaaacctttcagcccaatgtcaagaagtccggaagaggaaagagcttgagctgcagatcctgacggaagccatccggaactgggagggcgatgacattaaaactctgggcaacgtcacttacatgtcccaggtcctgattcagtgtgccggaagtgaggaaaagaatgaaagatatcttctactcttcccaaatgttttgctaatgttgtctgccagtcctaggatgagtggctttatctatcagggaaagcttccaacgacaggaatgacaatcacaaagcttgaggacagtgaaaatcatagaaatgcatttgaaatatcagggagcatgattgagcggatattagtgtcgtgcaacaaccagcaggatctgcaggaatgggtggagcacctacagaagcaaacgaaggtcacgtctgtgggaaaccccaccataaagcctcattcagtgccatctcataccctcccctcccacccggtcactccgtccagcaagcacgcagacagcaagcccgcgccgctgacgcccgcctaccacacgctgccccacccctcccaccacggcaccccgcacaccaccatcaactggggacccctggagcctccgaaaacacccaagccctggagcctgagctgcctgcggcccgcgcctcccctccggccctcagctgctctctgctacaaggaggatcttagtaagagccctaagaccatgaaaaagctgctgcccaagcgcaaacctgaacggaagccttcagatgaggagttcgcgtcccggaaaagcacagctgctttggaagaagatgctcagattctgaaagtcattgaagcttactgcaccagcgccaaaacaaggcaaacactcaattcaacatggcaaggcactgacctgatgcataatcacgtcttggctgatgatgaccaaccaagcctagactccctggggcgtcgcagtagcctttctcgtttggagccttcagacctctcggaagactctgactatgacagtatatggacagcccatagttacagaatgggttctacatctcgttcacgcaaagaatctgctccacaagttttgcttccagaagaagagaaaattatagtggaagaaactaaaagtaatggtcagacagtgatagaagaaaagagtcttgtggataccgtatatgcattaaaggatgaagttcaagaattaagacaggacaacaaaaagatgaagaaatctctagaggaagaacagagagcccgcaaagacctggagaagctggtgaggaaagtcctgaagaacatgaatgatcctgcctgggatgagaccaatctataagggacgtcctcagttctttctgttgaagaccagttctgaggtgaagctgggcacccctgacccaagtcggggtgcactcaggaccacagggcagggctgggtggggcgccaccttgctctctgtatatagaaaagctggagcttattctgcgaatggagacgatcaaaccatgactgatgaatccagacaggagggattgactctgaggacctgagctacatcaatccactctgtgaacatctcagttacctcattctgcaataagttcagtgactgactaaaagtcttgtttttccagactttgaattgaatatataaatattatatatacatgtttcttgtaaatatcccattttgaatgcatacctgtggtggttctgtccgggctaatccccatgctagaatgtcctttccagctacgtgaataagaagtcccatgcccgcacccaccggaagcagaagcctggtggatgcctggttcgttccgcagcaccagggcctccaccgtgctgtggcagcaccccccatgtcggtatttctaaataaccttatttatacctgcagagatacacttcagtcccattcagaagtcttctcttaaagcagcattacagtcccagacctgcgggtttctgagggcaacttgctggctgacagactcagtcttgacctcaaggaaggcccatacggcactgccgcatccacctagaggtgtttgctcttgtccgctgtctgagtactgtgattctcagatgagtttgctgcgttttgggaggacacagacggttctgtataggctagttcagtaacaacaaaatacactgttttgtcttccctcaaagagagatcttactagaacctgtaaatagaatgtattatttattataagtcactgcagctgatgaaaacagatggaggccatgctgcaggctgatactgatgggtggagttttgtcatcaggccagcctcatcccgaggtctcctccaccattggccgtagccagcaggcttcagtgctcaccgaaagtaaaatcccctccttcagcaagaataaagcaatatacaccttaggttccactaagtaacataggcataagcagggaacgtttcccccactgtgttccagtgcagaggagacgaagcctgtcctcaccgcggctcgctgggcccaggctggctctggaaagcctgtgcggtcctgggcaggaagcccggcccgtggagcaggttttcgttctgcttcagcaataaataagggtgaccacagggactttgcttttggtttcctttcctgtgaaaaggttggttttaaagtgagatacacttttccgtagaacaagtgttctatctttaaaaacccaaattgcagcaccgtggattactggtctcagaacaactcattgcgcatcagatttgactctctgattttctgtctattggccaaattgccctttaactgcacctgaatcctttgtgtactgatgcctttgagctgggcaccttgggagagtgttgtgttgctgtttacggttcttccttgcccttgctaattacagtctctggtgcccagcaagcccctttggcttccttccgtgactggtcacgttgtctgcctgggctcagcgtggacctgccccatgctgcagaacctggcctcacctggacttttcactagaattgccagcttcctcaacttagcagatcattcactcatgcgggcacaagcaaagatcaacactttcttttttggtaagcttgagttttacaagttattttttggtgatgcgtaagacattgcagtgggaaaccattcaacttgagtttattggagtttgctgttgtagcaggttttaactcaggaacaactcttgtctgatctctccgcccctctgccgggaggcgacattaactgtcctctcggagccggtagcgttgctgtccgagtccccaggacggatctcctgcagacctgccttaatgctcagatcgaagtatttcacaagaatacttgtgtttttaacagcccttcccctggacggtgcggccatgagggcctcatgttacggcattgccttttctttctgtggatccagtatcttcctcggctttttagggagcaggaaaaatgcgtctgagagcaactctttttaaaaacctgccctgttgtatataactgtgtctgtttcaccgtgtgacctcccaagggggtgggaacttgatataaacgtttaaaggggccacgatttgcccgagggttactcctttgctctcaccttgtatggatgaggagatgaagccatttcttatcctgtagatgtgaagcactttcagttttcagcgatgttggaatgtagcatcagaagctcgttccttcacactcagtggcgtctgtgcttgtccacatgcgctgggcgtctgggaccttgaatgcctgccctggttgtgtggactccttaatgccaatcatttcttcacttctctgggacacccagggcgcctgttgacaagtgtggagaaactcctaatttaaatgtcacagacaatgtcctagtgttgactactacaatgttgatgctacactgttgtaattattaaactgattatttttcttatgtcaca

SEQ ID NO: 360801 - DNA, 4073 bp, Homo sapiens
aaactcacccccatcaccttccgccttttggagtccccagggtctgtcatttccatggtcatgtccatgtgtacccattgtttagctcccaagaaaagacttttaaagataattttaaaaaccaagctttgtttcctctgtttccagcctggttcattccatagcacatctcatcttctgagtcttggtctcgcgtttagcattcgtgatggtttatgtcgttggggtgatgcagaaaccagcctttttttgatatcggtatttaacacgtgcttgacagttgacaccttacctgctctgttgggacttgctttgctcactttgttttttgccgtcgtcttctgtgcttgtttgaaaagctgtttgaagaggtaaggggtgggccattccgttgtgaacactctgagctggtgtgcatgtggcccctgcacagcagccctggccgagcttggctgtgctcctggcactcagagtcaggtagctgagcactcgctcccttttcttctccctgaaacttcaaatattttcttaaagcaattattttttacttatctgtcatttaatgacaaccttagtttcctcctctctttccagttagctgtgccaggggataggtctgtcctagggagcagctgccccctcctctcctcctccctcaggagcgtgcaggatgtctgtgcacaccagcgccagcctgcctcctggtgacacctctcatcacaggactaacaggacccaaatgacacgaggggttttattagaattaaaaaaaaaaaattagccaatgactaatactgaaaatgccctattgatttttaaaaattaacgttcagaagctggtaaagaaaaatcaaagtaggaaaaggcgagaagctcttatcagtggctataataatttggggttttatacctttacagcagcctttctgatatgccagtgaaaatgattggctttagagtatgttagcattttcttttgtctttccctaggatcttagtaagagccctaagaccatgaaaaagctgctgcccaagcgcaaacctgaacggaagccttcagatgaggagttcgcgtcccggaaaagcacagctgctttggaagaagatgctcagattctgaaagtcattgaagcttactgcaccagcgccaaaacaaggcaaacactcaattcaagttcacgcaaagaatctgctccacaagttttgcttccagaagaagagaaaattatagtggaagaaactaaaagtaatggtcagacagtgatagaagaaaagagtcttgtggataccgtatatgcattaaaggatgaagttcaagaattaagacaggacaacaaaaagatgaagaaatctctagaggaagaacagagagcccgcaaagacctggagaagctggtgaggaaagtcctgaagaacatgaatgatcctgcctgggatgagaccaatctataagggacgtcctcagttctttctgttgaagaccagttctgaggtgaagctgggcacccctgacccaagtcggggtgcactcaggaccacagggcagggctgggtggggcgccaccttgctctctgtatatagaaaagctggagcttattctgcgaatggagacgatcaaaccatgactgatgaatccagacaggagggattgactctgaggacctgagctacatcaatccactctgtgaacatctcagttacctcattctgcaataagttcagtgactgactaaaagtcttgtttttccagactttgaattgaatatataaatattatatatacatgtttcttgtaaatatcccattttgaatgcatacctgtggtggttctgtccgggctaatccccatgctagaatgtcctttccagctacgtgaataagaagtcccatgcccgcacccaccggaagcagaagcctggtggatgcctggttcgttccgcagcaccagggcctccaccgtgctgtggcagcaccccccatgtcggtatttctaaataaccttatttatacctgcagagatacacttcagtcccattcagaagtcttctcttaaagcagcattacagtcccagacctgcgggtttctgagggcaacttgctggctgacagactcagtcttgacctcaaggaaggcccatacggcactgccgcatccacctagaggtgtttgctcttgtccgctgtctgagtactgtgattctcagatgagtttgctgcgttttgggaggacacagacggttctgtataggctagttcagtaacaacaaaatacactgttttgtcttccctcaaagagagatcttactagaacctgtaaatagaatgtattatttattataagtcactgcagctgatgaaaacagatggaggccatgctgcaggctgatactgatgggtggagttttgtcatcaggccagcctcatcccgaggtctcctccaccattggccgtagccagcaggcttcagtgctcaccgaaagtaaaatcccctccttcagcaagaataaagcaatatacaccttaggttccactaagtaacataggcataagcagggaacgtttcccccactgtgttccagtgcagaggagacgaagcctgtcctcaccgcggctcgctgggcccaggctggctctggaaagcctgtgcggtcctgggcaggaagcccggcccgtggagcaggttttcgttctgcttcagcaataaataagggtgaccacagggactttgcttttggtttcctttcctgtgaaaaggttggttttaaagtgagatacacttttccgtagaacaagtgttctatctttaaaaacccaaattgcagcaccgtggattactggtctcagaacaactcattgcgcatcagatttgactctctgattttctgtctattggccaaattgccctttaactgcacctgaatcctttgtgtactgatgcctttgagctgggcaccttgggagagtgttgtgttgctgtttacggttcttccttgcccttgctaattacagtctctggtgcccagcaagcccctttggcttccttccgtgactggtcacgttgtctgcctgggctcagcgtggacctgccccatgctgcagaacctggcctcacctggacttttcactagaattgccagcttcctcaacttagcagatcattcactcatgcgggcacaagcaaagatcaacactttcttttttggtaagcttgagttttacaagttattttttggtgatgcgtaagacattgcagtgggaaaccattcaacttgagtttattggagtttgctgttgtagcaggttttaactcaggaacaactcttgtctgatctctccgcccctctgccgggaggcgacattaactgtcctctcggagccggtagcgttgctgtccgagtccccaggacggatctcctgcagacctgccttaatgctcagatcgaagtatttcacaagaatacttgtgtttttaacagcccttcccctggacggtgcggccatgagggcctcatgttacggcattgccttttctttctgtggatccagtatcttcctcggctttttagggagcaggaaaaatgcgtctgagagcaactctttttaaaaacctgccctgttgtatataactgtgtctgtttcaccgtgtgacctcccaagggggtgggaacttgatataaacgtttaaaggggccacgatttgcccgagggttactcctttgctctcaccttgtatggatgaggagatgaagccatttcttatcctgtagatgtgaagcactttcagttttcagcgatgttggaatgtagcatcagaagctcgttccttcacactcagtggcgtctgtgcttgtccacatgcgctgggcgtctgggaccttgaatgcctgccctggttgtgtggactccttaatgccaatcatttcttcacttctctgggacacccagggcgcctgttgacaagtgtggagaaactcctaatttaaatgtcacagacaatgtcctagtgttgactactacaatgttgatgctacactgttgtaattattaaactgattatttttcttatgtcaca

SEQ ID NO: 360802 - DNA, 3619 bp, Homo sapiens
taaatgttactccgtagctaataaatgtggctagtggatgtcttttgagtgctggggccccagctagagctgcccctcctgtctggggcagacgccgtgaggagccccacgctcggcccaggtggcgcgagctagtgtttggccccaaaaactgactgctgagagccagagatacgaatgaaatgataaatcctgaggtttatttcacatggagtgtttaaagagcagaaggaagtgcgtgataagtgccctttcgcggtgagcacgcgagtctcatgttctctgcccttcccgctctgtgcccttggcagctcccctcccacccggtcactccgtccagcaagcacgcagacagcaagcccgcgccgctgacgcccgcctaccacacgctgccccacccctcccaccacggcaccccgcacaccaccatcaactggggacccctggagcctccgaaaacacccaagccctggagcctgagctgcctgcggcccgcgcctcccctccggccctcagctgctctctgctacaaggaggatcttagtaagagccctaagaccatgaaaaagctgctgcccaagcgcaaacctgaacggaagccttcagatgaggagttcgcgtcccggaaaagcacagctgctttggaagaagatgctcagattctgaaagtcattgaagcttactgcaccagcgccaaaacaaggcaaacactcaattcaagttcacgcaaagaatctgctccacaagttttgcttccagaagaagagaaaattatagtggaagaaactaaaagtaatggtcagacagtgatagaagaaaagagtcttgtggataccgtatatgcattaaaggatgaagttcaagaattaagacaggacaacaaaaagatgaagaaatctctagaggaagaacagagagcccgcaaagacctggagaagctggtgaggaaagtcctgaagaacatgaatgatcctgcctgggatgagaccaatctataagggacgtcctcagttctttctgttgaagaccagttctgaggtgaagctgggcacccctgacccaagtcggggtgcactcaggaccacagggcagggctgggtggggcgccaccttgctctctgtatatagaaaagctggagcttattctgcgaatggagacgatcaaaccatgactgatgaatccagacaggagggattgactctgaggacctgagctacatcaatccactctgtgaacatctcagttacctcattctgcaataagttcagtgactgactaaaagtcttgtttttccagactttgaattgaatatataaatattatatatacatgtttcttgtaaatatcccattttgaatgcatacctgtggtggttctgtccgggctaatccccatgctagaatgtcctttccagctacgtgaataagaagtcccatgcccgcacccaccggaagcagaagcctggtggatgcctggttcgttccgcagcaccagggcctccaccgtgctgtggcagcaccccccatgtcggtatttctaaataaccttatttatacctgcagagatacacttcagtcccattcagaagtcttctcttaaagcagcattacagtcccagacctgcgggtttctgagggcaacttgctggctgacagactcagtcttgacctcaaggaaggcccatacggcactgccgcatccacctagaggtgtttgctcttgtccgctgtctgagtactgtgattctcagatgagtttgctgcgttttgggaggacacagacggttctgtataggctagttcagtaacaacaaaatacactgttttgtcttccctcaaagagagatcttactagaacctgtaaatagaatgtattatttattataagtcactgcagctgatgaaaacagatggaggccatgctgcaggctgatactgatgggtggagttttgtcatcaggccagcctcatcccgaggtctcctccaccattggccgtagccagcaggcttcagtgctcaccgaaagtaaaatcccctccttcagcaagaataaagcaatatacaccttaggttccactaagtaacataggcataagcagggaacgtttcccccactgtgttccagtgcagaggagacgaagcctgtcctcaccgcggctcgctgggcccaggctggctctggaaagcctgtgcggtcctgggcaggaagcccggcccgtggagcaggttttcgttctgcttcagcaataaataagggtgaccacagggactttgcttttggtttcctttcctgtgaaaaggttggttttaaagtgagatacacttttccgtagaacaagtgttctatctttaaaaacccaaattgcagcaccgtggattactggtctcagaacaactcattgcgcatcagatttgactctctgattttctgtctattggccaaattgccctttaactgcacctgaatcctttgtgtactgatgcctttgagctgggcaccttgggagagtgttgtgttgctgtttacggttcttccttgcccttgctaattacagtctctggtgcccagcaagcccctttggcttccttccgtgactggtcacgttgtctgcctgggctcagcgtggacctgccccatgctgcagaacctggcctcacctggacttttcactagaattgccagcttcctcaacttagcagatcattcactcatgcgggcacaagcaaagatcaacactttcttttttggtaagcttgagttttacaagttattttttggtgatgcgtaagacattgcagtgggaaaccattcaacttgagtttattggagtttgctgttgtagcaggttttaactcaggaacaactcttgtctgatctctccgcccctctgccgggaggcgacattaactgtcctctcggagccggtagcgttgctgtccgagtccccaggacggatctcctgcagacctgccttaatgctcagatcgaagtatttcacaagaatacttgtgtttttaacagcccttcccctggacggtgcggccatgagggcctcatgttacggcattgccttttctttctgtggatccagtatcttcctcggctttttagggagcaggaaaaatgcgtctgagagcaactctttttaaaaacctgccctgttgtatataactgtgtctgtttcaccgtgtgacctcccaagggggtgggaacttgatataaacgtttaaaggggccacgatttgcccgagggttactcctttgctctcaccttgtatggatgaggagatgaagccatttcttatcctgtagatgtgaagcactttcagttttcagcgatgttggaatgtagcatcagaagctcgttccttcacactcagtggcgtctgtgcttgtccacatgcgctgggcgtctgggaccttgaatgcctgccctggttgtgtggactccttaatgccaatcatttcttcacttctctgggacacccagggcgcctgttgacaagtgtggagaaactcctaatttaaatgtcacagacaatgtcctagtgttgactactacaatgttgatgctacactgttgtaattattaaactgattatttttcttatgtcaca

SEQ ID NO: 360803 - DNA, 3848 bp, Homo sapiens
acggcggccgaggccggggggcggcggcgggcgcccgcaggttcccgagccgctcctgagaaggcgcctgacagcgggccggggcgcacggagaagcgggccgggccggacctgctgggccgcgccgagccaatcgccggcgccggccgctcgatgggcgaggcggcggcggcggcggcgggggccgcgggccgggccgccgctccgaggtgaaggcgcgcgcccctccccgcctgcctcccgggccgcagcgatgaattccgccgagcaaaccgttacgtggctcatcactctgggggtgctggagtcgcccaaaaaaaccatctcggacccggagggctttctgcaggcgtcgctgaaggatggggtggtcctctgcaggctgctggagcgcctgctccccgggaccatcgagaaagtctaccccgagccccggagcgagagcgagtgcctgagcaacatccgcgagttcctgcgcggctgcggggcttccctgcggctggagacgtttgatgcaaatgatttgtatcaggggcagaattttaacaaggtcctcagttccttagtgactctaaataaagtaacagcagacatcgggctggggagtgactccgtgtgtgcccggccctcgtctcaccgcataaagtcttttgactcccttggatcacagtctttgcacactcggacttcaaaactgttccagggccagtatcggagtttggacatgaccgataatagcaacaatcaatggttccccagcaactacgtgcgcgaggtcaaggccagcgagaagcctgtgtctcccaaatcaggaacactgaagagccctcccaaaggatttgatacgactgccataaacaaaagctattacaatgtggtgctacagaatattttagaaacagaaaatgaatattctaaagaacttcagactgtgctttcaacgtacctacggccattgcagaccagtgagaagttaagttcagcaaacatttcatatttaatgggaaatctagaagaaatatgttctttccagcaaatgctcgtacagtctttagaagaatgcaccaagttgcccgaagctcagcagagagtcggaggctgctttttaaacctgatgccacagatgaaaaccctgtacctcacgtattgtgccaatcacccttctgcagtgaatgtcctcacggaacacagtgaggagttgggggagttcatggagaccaaaggtgccagcagccctgggattctcgtgctgaccacgggcctgagcaaacccttcatgcgcctggataaataccctacgctgctcaaagagctcgagagacacatggaggattatcatacagatagacaagatattcaaaaatccatggctgccttcaaaaacctttcagcccaatgtcaagaagtccggaagaggaaagagcttgagctgcagatcctgacggaagccatccggaactgggagggcgatgacattaaaactctgggcaacgtcacttacatgtcccaggtcctgattcagtgtgccggaagtgaggaaaagaatgaaagatatcttctactcttcccaaatgttttgctaatgttgtctgccagtcctaggatgagtggctttatctatcagggaaagcttccaacgacaggaatgacaatcacaaagcttgaggacagtgaaaatcatagaaatgcatttgaaatatcagggagcatgattgagcggatattagtgtcgtgcaacaaccagcaggatctgcaggaatgggtggagcacctacagaagcaaacgaaggtcacgtctgtgggaaaccccaccataaagcctcattcagtgccatctcataccgtaaggacttggtgcttctcctccttccagactccaggcgtggcatcccgtggctgagctgtcagcaagtgatcagttgctttaaaacctaatcaatatttggataaaaagtgcaaaacacttgcttcacatttctctgcagatctttggccctcttcgtgcagtagtgaattgttttccaatgagtgttctcgagaaacaaccctgaattgtgcctcctcacgcacagttcagaggtgcttgggtgggaagctgcttctgctccgtgtggccctagaagactgatttaggggagttttacactcaactatagatgatttttctgagaattttaactgtttattatgcttcatttaagaaaacaaaaaataaatgattatgatgatgaaaagggccagactcatgttgaaggcattaaaagaatttatgacacactgttgattttaagaaattgaggtgtcttttacttagaaaagctcaacaagtctttggatatttagagacttttttttttttttttttttttttttttacaacttttcagaatagatgaacactgaagcttcagtgtttaaacctctcctggtgttttgtgctcaagaagttggtatcgggttgttttaacagtcgtcatctttatcaagtaatacggaaaaactgggcagagcttttaaagaatgaatgacgatgacacaggcgttttctgcttacagatttcctcacatccttattaggctattaggatcagctctgtcgtgtgctcagttttcatgttttcttcttcatgtgaaggttgtagctcaagaaggattgctgtactctgatattctcatcagagtttcagagtccatctgatttctttcagcagtaaagattgtaactactcattggcttttagctagcatttcatttttaatggctctaccattttaaaattctccattctttcatggagatcagtttatcccagggacgtgtgtgtacacgtgtgtttataaagaacagtggatgagctgcttcactcaggttttcaacagcagcctgaaactctacttcatacaattttatatcaagtcagcttttctctgtggccagaccctccgtcttagtgtttctttcactggtggctgggaaggcatcccttcagcggggaaggcactgtgcctcatgtttaaaatgttctgcattctcctacagagtttcttgtgtgggatgatgtattctgtgatccaactctgaccagctgaaatcattttctaattttagcataaagcatacttcctttgactttttcaagaaaggagaaacaaaaccagacactgctttgacgttgttgctagaagggatgtcttacataattttatccatctatacattatttcctatgaaaagatgaccttacagtggcttcatagcatgacctgcatctcacacaattccctcccccatgcagggactagaatgtgatcgttgcaggaagttgatggcttctattcttgaaattgtggcattagctgctgtgtggccgtccctctcagcctgtgttttgaaggtcgcgcacttcctcagaatgccggccccactccgtttccagttcacagcgccacacagcttgttctcccattaaatgcaccttactattgttggctaatttgaggtcattattggctgattttgagaatgacttatttaacttttctcatttaactgtcattgtgatggaatattttgggttttccaggaatataaaatgcattaatggcacaccgctctaagaagttaatttttgattaactttgttttgattaaagttgagttttctaagaacataattggttttaataccagggtttggcagtgttcagtaaagagccagatggtaaacgttctctgctttacaggttcaggcctcttgcagctgtactctgcccttggaacacaacagcagttttagacaggcacaggcctgcctgtgtgccaggaaaacttttttaaaaaacaaaac

SEQ ID NO: 360804 - DNA, 2818 bp, Homo sapiens
acggcggccgaggccggggggcggcggcgggcgcccgcaggttcccgagccgctcctgagaaggcgcctgacagcgggccggggcgcacggagaagcgggccgggccggacctgctgggccgcgccgagccaatcgccggcgccggccgctcgatgggcgaggcggcggcggcggcggcgggggccgcgggccgggccgccgctccgaggtgaaggcgcgcgcccctccccgcctgcctcccgggccgcagcgatgaattccgccgagcaaaccgttacgtggctcatcactctgggggtgctggagtcgcccaaaaaaaccatctcggacccggagggctttctgcaggcgtcgctgaaggatggggtggtcctctgcaggctgctggagcgcctgctccccgggaccatcgagaaagtctaccccgagccccggagcgagagcgagtgcctgagcaacatccgcgagttcctgcgcggctgcggggcttccctgcggctggagacgtttgatgcaaatgatttgtatcaggggcagaattttaacaaggtcctcagttccttagtgactctaaataaagtaacagcagacatcgggctggggagtgactccgtgtgtgcccggccctcgtctcaccgcataaagtcttttgactcccttggatcacagtctttgcacactcggacttcaaaactgttccagggccagtatcggagtttggacatgaccgataatagcaacaatcaatggttccccagcaactacgtgcgcgaggtcaaggccagcgagaagcctgtgtctcccaaatcaggaacactgaagagccctcccaaaggatttgatacgactgccataaacaaaagctattacaatgtggtgctacagaatattttagaaacagaaaatgaatattctaaagaacttcagactgtgctttcaacgtacctacggccattgcagaccagtgagaagttaagttcagcaaacatttcatatttaatgggaaatctagaagaaatatgttctttccagcaaatgctcgtacagtctttagaagaatgcaccaagttgcccgaagctcagcagagagtcggaggctgctttttaaacctgatgccacagatgaaaaccctgtacctcacgtattgtgccaatcacccttctgcagtgaatgtcctcacggaacacagtgaggagttgggggagttcatggagaccaaaggtgccagcagccctgggattctcgtgctgaccacgggcctgagcaaacccttcatgcgcctggataaataccctacgctgctcaaagagctcgagagacacatggaggattatcatacagatagacaagatattcaaaaatccatggctgccttcaaaaacctttcagcccaatgtcaagaagtccggaagaggaaagagcttgagctgcagatcctgacggaagccatccggaactgggagggcgatgacattaaaactctgggcaacgtcacttacatgtcccaggtcctgattcagtgtgccggaagtgaggaaaagaatgaaagatatcttctactcttcccaaatgttttgctaatgttgtctgccagtcctaggatgagtggctttatctatcagggaaagcttccaacgacaggaatgacaatcacaaagcttgaggacagtgaaaatcatagaaatgcatttgaaatatcagggagcatgattgagcggatattagtgtcgtgcaacaaccagcaggatctgcaggaatgggtggagcacctacagaagcaaacgaaggtcacgtctgtgggaaaccccaccataaagcctcattcagtgccatctcataccgtaaggacttggtgcttctcctccttccagactccaggcgtggcatcccgtggctgagctgtcagcaagtgatcagttgctttaaaacctaatcaatatttggataaaaagtgcaaaacacttgcttcacatttctctgcagatctttggccctcttcgtgcagtagtgaattgttttccaatgagtgttctcgagaaacaaccctgaattgtgcctcctcacgcacagttcagaggtgcttgggtgggaagctgcttctgctccgtgtggccctagaagactgatttaggggagttttacactcaactatagatgatttttctgagaattttaactgtttattatgcttcatttaagaaaacaaaaaataaatgattatgatgatgaaaagggccagactcatgttgaaggcattaaaagaatttatgacacactgttgattttaagaaattgaggtgtcttttacttagaaaagctcaacaagtctttggatatttagagacttttttttttttttttttttttttttttacaacttttcagaatagatgaacactgaagcttcagtgtttaaacctctcctggtgttttgtgctcaagaagttggtatcgggttgttttaacagtcgtcatctttatcaagtaatacggaaaaactgggcagagcttttaaagaatgaatgacgatgacacaggcgttttctgcttacagatttcctcacatccttattaggctattaggatcagctctgtcgtgtgctcagttttcatgttttcttcttcatgtgaaggttgtagctcaagaaggattgctcaggcactcgctctcgctccggggctcggggtagacctgcaacacagagcacaagcgctgagcgccgtggccggcagcggggacgcctcggacaaggccgagcgacgcccacggcccgcgctcccaacacagcgggcgacgctggcgagcggcccccgac

SEQ ID NO: 360805 - DNA, 749 bp, Homo sapiens
tcaagtccaggtgtaagaaggagacagtcaaatggagcacaagataggcccaaggatttgggatgctcaagttgtgggtcagaggctgatgatacaaacaggaatcgggaagacacaaagtaatatggagcagggctggacagcagtatagctctagaagactgacagtcaccagcacacccatgggaaaggagaggtcagagagggccaatggacctgctgggtaaacaatcaggatttgaagattcaaaacaaataaagaagatgattgtaaatactgaactagagttcacagagaagctgtgcagtgcactggaataaatactacattctggcttcaactctgttcctgactactcttaggctgttatgcaaatcattttctctgtataagccccagtttcttcctaggataacttcctccattacagaggcttttgtgaagctcaagtgaaaaaatgtatgtggacatgctttggaaattacaaaatgcctaataaaggtgagaagttggtattattttgctcaccgaagacattggaaataaagtgatcgtgaaaaaatgtcaagatgcccctgatatttttaagtactcattcacctgtctgcctccactaatgggttatatgctcttagattatcgagatgtcaatgtgttctctgtatactccttgtaactatctcattagctgattccttgtggtctactaagtattaaagcaatcaataaaataattgcaaacaacctt

SEQ ID NO: 360806 - DNA, 431 bp, Homo sapiens
  misc_feature (42)..(42): n is a, c, g, or t
  misc_feature (56)..(56): n is a, c, g, or t
agcgacggggcctcccccccgcccccccccccccaatcttanacgagccacgggtnactgcaagaccgccttttctcagcggagaaaacccctttgccactgtgaaactccgtccgactgtgacgaatgatcgctcagcacccatcattcgatgagaggacagccaaggactctcccgggcctctccggttctcccttgcggaatgatgggcgcatcctgtctgccacgtgctgacggtcgggaagcttcagtggagaggcctaactctaatgtcgcctgcttaagcaaatcatgcttctctgtttcacgtagttgggttgacaagtttctgcctttaagataaatgagtaatagtctaatgaccagctcagccatttaaaatattttcttcctattctgttcaagaaacagtaaacttggtttcaatctt

SEQ ID NO: 360807 - DNA, 304 bp, Homo sapiens
cgacgcagttccccttagcgccagatggggctccctgagccctgtggctgaagtggggaactgctggggtgtgggtgacacctggcctttggcgttctgccttggggaggtttctggttttgttacggggtggaagaataggacctgggggtctcggatgcaacctgcagaccccgtggctcacccaaccccaggttctgcctcccagaccagaacgggcatggcctggtccttggcaccgaggtgcctgctctgtaaatatcaagggattacaactttaataataaagcagaacttgaaaaca

SEQ ID NO: 360808 - DNA, 3684 bp, Homo sapiens
ctcctctcctggcccttctacgcctcccctgttccttctcctccccgtcccttctcctcttccctgaccctcagagctctggagaccaccccccatcccctgaccagctacacattttacaactagtgcacttaagttggggaggggtctgttgtgcgtcggtggggcccacgtcctcctcacaacttcttggaatcagtgacccgtgctgtcctggctgccgggcttaagccctccgggaccaaagacacaagctcgagtttcctctaagaaaagaaagcgcccaagaatgtgggggtgaaactcccctgtaattaggatcgccagaatgttatggaacagttcaatcctgggctgcgaaatttaataaacctggggaaaaattatgagaaagctgtaaacgctatgatcctggcaggaaaagcctactacgatggagtggccaagatcggtgagattgccactgggtcccccgtgtcaactgaactgggacatgtcctcatagagatttcaagtacccacaagaaactcaacgagagtcttgatgaaaattttaaaaaattccacaaagagattatccatgagctggagaagaagatagaacttgacgtgaaatatatgaacgcaactctaaaaagataccaaacagaacacaagaataaattagagtctttggagaaatcccaagctgagttgaagaagatcagaaggaaaagccaaggaagccgaaacgcactcaaatatgaacacaaagaaattgagtatgtggagaccgttacttctcgtcagagtgaaatccagaaattcattgcagatggttgcaaagaggctctgcttgaagagaagaggcgcttctgctttctggttgataagcactgtggctttgcaaaccacatacattattatcacttacagtctgcagaactactgaattccaagctgcctcggtggcaggagacctgtgttgatgccatcaaagtgccagagaaaatcatgaatatgatcgaagaaataaagaccccagcctctacccccgtgtctggaactcctcaggcttcacccatgatcgagagaagcaatgtggttaggaaagattacgacaccctttctaaatgctcaccaaagatgccccccgctccttcaggcagagcatataccagtcccttgatcgatatgtttaataacccagccacggctgccccgaattcacaaagggtaaataattcaacaggtacttccgaagatcccagtttacagcgatcagtttcggttgcaacgggactgaacatgatgaagaagcagaaagtgaagaccatcttcccgcacactgcgggctccaacaagaccttactcagctttgcacagggagatgtcatcacgctgctcatccccgaggagaaggatggctggctctatggagaacacgacgtgtccaaggcgaggggttggttcccgtcgtcgtacacgaagttgctggaagaaaatgagacagaagcagtgaccgtgcccacgccaagccccacaccagtgagaagcatcagcaccgtgaacttgtctgagaatagcagtgttgtcatccccccacccgactacttggaatgcttatccatgggggcagctgccgacaggagagcagattcggccaggacgacatccacctttaaggccccagcgtccaagcccgagaccgcggctcctaacgatgccaacgggactgcaaagccgccttttctcagcggagaaaacccctttgccactgtgaaactccgtccgactgtgacgaatgatcgctcagcacccatcattcgatgagaggacagccaaggactctcccgggcctctccggttctcccttgcggaatgatgggcgcatcctgtctgccacgtgctgacggtcgggaagcttcagtggagaggcctaactctaatgtcgcctgcttaagcaaatcatgcttctctgtttcacgtagttgggttgacaagtttctgcctttaagataaatgagtaatagtctaatgaccagctcagccatttaaaatattttcttcctattctgttcaagaaacagtaaacttggtttcaatctttactgtattttttaaatgaattttttccttaataacagccagaataagggatagtctatgctttcaggactggctttctgcacctgatatgaatgagaccagttttattttataaagcatgtgctcttaatagcattatgtctaaagaagatatcacgtaagtttgcatcttagcatgcaaatcataattttaagcaatataaattatgaaaatactatataaatgtaatttaacttaaaatgtttaagtgtagagcttccagagatggagaaacccccaccctccctccaaccacgccagagctgtagagtgctaagacgctttgcctgcccttatcacagccacacgtagcactcgacgaaatctgcctccgagagctccttttcttggtagttaggagtcgccaacggattcgctgcacacggcccatccaggacacaggcctgggcgtcggagtcacggctccttgtgttctcactcagctagttggccaaagctgcatccattaccagtacactcaaactgctcggggtcctggtttctccgtgtttgaatcaggtacagactctcaaaggatacgtgtaaagccaggatgacctctggtgcctggagaagggcgggtttttcagcctagcagccatgatgccctcggaacctggccctatggtatggatgtgaggactacgcactggctgccctgagcccggggctggaaatcatctttggctgccaaggatctggacctattttggagtggagagtcatggttaaaattcccagcccggcccaggtacgggaatcccagcattttgtgaggccgaggcagggggatcacctgaggtcaggagtctctactaaaaatacaaaaattagacaggtgtggtggtgggcgccactcaggaggctgaggcaggagaatcacttgaacccgggaggcagaggttgcagtgagccagatcatgctgctgcactccagcccggccgctcaccgtgtgtgttgctgggtgctggggctgtgacttatcccctctcctttagccttgccataagtgtagtatcctatgaggctgagattgggaaaggttacatgcaggtaagccagtggacgtggccgatgcttcaggctccttccagccaggtccagcagtgttaccatctgcttctcctgggaggacaaaccaggcacccccaccatgaaggggctgcaggcaccatgaactatgttaacaaccccagtctgtactacagaaagggctgcagccacatgagaattcagtccacacaagccccatggccgtgttccccacttcagccacagggctcagggagccccatctggcgctaaggggaactgctggggtgtgggtgacacctggcctttggcgttctgccttggggaggtttctggttttgttacggggtggaagaataggacctgggggtctcggatgcaacctgcagaccccgtggctcacccaaccccaggttctgcctcccagaccagaacgggcatggcctggtccttggcaccgaggtgcctgctctgtaaatatcaagggattacaactttaataataaagcagaacttgaaaaca

SEQ ID NO: 360809 - DNA, 3361 bp, Homo sapiens
aggtggggccgcccggcccgcccagcttcctctggcggcgtccggccgcttctcctctgctcctcgaagaaggccagggcggcgctgccgcaagttttgacattttcgcagcggagacgcgcgcgggcactctcgggccgacggctgcggcggcggccgaccctccagagccccttagtcgcgccccggccctcccgctgcccggagtccggcggccacgaggcccagccgcgtcctcccgcgcttgctcgcccggcggccgcagccatgtcccgggggcccgaggaggtgaaccggctcacggagagcacctaccggaatgttatggaacagttcaatcctgggctgcgaaatttaataaacctggggaaaaattatgagaaagctgtaaacgctatgatcctggcaggaaaagcctactacgatggagtggccaagatcggtgagattgccactgggtcccccgtgtcaactgaactgggacatgtcctcatagagatttcaagtacccacaagaaactcaacgagagtcttgatgaaaattttaaaaaattccacaaagagattatccatgagctggagaagaagatagaacttgacgtgaaatatatgaacgcaactctaaaaagataccaaacagaacacaagaataaattagagtctttggagaaatcccaagctgagttgaagaagatcagaaggaaaagccaaggaagccgaaacgcactcaaatatgaacacaaagaaattgagtatgtggagaccgttacttctcgtcagagtgaaatccagaaattcattgcagatggttgcaaagaggctctgcttgaagagaagaggcgcttctgctttctggttgataagcactgtggctttgcaaaccacatacattattatcacttacagtctgcagaactactgaattccaagctgcctcggtggcaggagacctgtgttgatgccatcaaagtgccagagaaaatcatgaatatgatcgaagaaataaagaccccagcctctacccccgtgtctggaactcctcaggcttcacccatgatcgagagaagcaatgtggttaggaaagattacgacaccctttctaaatgctcaccaaagatgccccccgctccttcaggcagagcatataccagtcccttgatcgatatgtttaataacccagccacggctgccccgaattcacaaagggtaaataattcaacaggtacttccgaagatcccagtttacagcgatcagtttcggttgcaacgggactgaacatgatgaagaagcagaaagtgaagaccatcttcccgcacactgcgggctccaacaagaccttactcagctttgcacagggagatgtcatcacgctgctcatccccgaggagaaggatggctggctctatggagaacacgacgtgtccaaggcgaggggttggttcccgtcgtcgtacacgaagttgctggaagaaaatgagacagaagcagtgaccgtgcccacgccaagccccacaccagtgagaagcatcagcaccgtgaacttgtctgagaatagcagtgttgtcatccccccacccgactacttggaatgcttatccatgggggcagctgccgacaggagagcagattcggccaggacgacatccacctttaaggccccagcgtccaagcccgagaccgcggctcctaacgatgccaacgggactgcaaagccgccttttctcagcggagaaaacccctttgccactgtgaaactccgtccgactgtgacgaatgatcgctcagcacccatcattcgatgagaggacagccaaggactctcccgggcctctccggttctcccttgcggaatgatgggcgcatcctgtctgccacgtgctgacggtcgggaagcttcagtggagaggcctaactctaatgtcgcctgcttaagcaaatcatgcttctctgtttcacgtagttgggttgacaagtttctgcctttaagataaatgagtaatagtctaatgaccagctcagccatttaaaatattttcttcctattctgttcaagaaacagtaaacttggtttcaatctttactgtattttttaaatgaattttttccttaataacagccagaataagggatagtctatgctttcaggactggctttctgcacctgatatgaatgagaccagttttattttataaagcatgtgctcttaatagcattatgtctaaagaagatatcacgtaagtttgcatcttagcatgcaaatcataattttaagcaatataaattatgaaaatactatataaatgtaatttaacttaaaatgtttaagtgtagagcttccagagatggagaaacccccaccctccctccaaccacgccagagctgtagagtgctaagacgctttgcctgcccttatcacagccacacgtagcactcgacgaaatctgcctccgagagctccttttcttggtagttaggagtcgccaacggattcgctgcacacggcccatccaggacacaggcctgggcgtcggagtcacggctccttgtgttctcactcagctagttggccaaagctgcatccattaccagtacactcaaactgctcggggtcctggtttctccgtgtttgaatcaggtacagactctcaaaggatacgtgtaaagccaggatgacctctggtgcctggagaagggcgggtttttcagcctagcagccatgatgccctcggaacctggccctatggtatggatgtgaggactacgcactggctgccctgagcccggggctggaaatcatctttggctgccaaggatctggacctattttggagtggagagtcatggttaaaattcccagcccggcccaggtacgggaatcccagcattttgtgaggccgaggcagggggatcacctgaggtcaggagtctctactaaaaatacaaaaattagacaggtgtggtggtgggcgccactcaggaggctgaggcaggagaatcacttgaacccgggaggcagaggttgcagtgagccagatcatgctgctgcactccagcccggccgctcaccgtgtgtgttgctgggtgctggggctgtgacttatcccctctcctttagccttgccataagtgtagtatcctatgaggctgagattgggaaaggttacatgcaggttttgttacggggtggaagaataggacctgggggtctcggatgcaacctgcagaccccgtggctcacccaaccccaggttctgcctcccagaccagaacgggcatggcctggtccttggcaccgaggtgcctgctctgtaaatatcaagggattacaactttaataataaagcagaacttgaaaaca

SEQ ID NO: 360810 - DNA, 2079 bp, Homo sapiens
aggtggggccgcccggcccgcccagcttcctctggcggcgtccggccgcttctcctctgctcctcgaagaaggccagggcggcgctgccgcaagttttgacattttcgcagcggagacgcgcgcgggcactctcgggccgacggctgcggcggcggccgaccctccagagccccttagtcgcgccccggccctcccgctgcccggagtccggcggccacgaggcccagccgcgtcctcccgcgcttgctcgcccggcggccgcagccatgtcccgggggcccgaggaggtgaaccggctcacggagagcacctaccggaatgttatggaacagttcaatcctgggctgcgaaatttaataaacctggggaaaaattatgagaaagctgtaaacgctatgatcctggcaggaaaagcctactacgatggagtggccaagatcggtgagattgccactgggtcccccgtgtcaactgaactgggacatgtcctcatagagatttcaagtacccacaagaaactcaacgagagtcttgatgaaaattttaaaaaattccacaaagagattatccatgagctggagaagaagatagaacttgacgtgaaatatatgaacgcaactctaaaaagataccaaacagaacacaagaataaattagagtctttggagaaatcccaagctgagttgaagaagatcagaaggaaaagccaaggaagccgaaacgcactcaaatatgaacacaaagaaattgagtatgtggagaccgttacttctcgtcagagtgaaatccagaaattcattgcagatggttgcaaagaggctctgcttgaagagaagaggcgcttctgctttctggttgataagcactgtggctttgcaaaccacatacattattatcacttacagtctgcagaactactgaattccaagctgcctcggtggcaggagacctgtgttgatgccatcaaagtgccagagaaaatcatgaatatgatcgaagaaataaagaccccagcctctacccccgtgtctggaactcctcaggcttcacccatgatcgagagaagcaatgtggttaggaaagattacgacaccctttctaaatgctcaccaaagatgccccccgctccttcaggcagagcatataccagtcccttgatcgatatgtttaataacccagccacggctgccccgaattcacaaagggtaaataattcaacaggtacttccgaagatcccagtttacagcgatcagtttcggttgcaacgggactgaacatgatgaagaagcagaaagtgaagaccatcttcccgcacactgcgggctccaacaagaccttactcagctttgcacagggagatgtcatcacgctgctcatccccgaggagaaggatggctggctctatggagaacacgacgtgtccaaggcgaggggttggttcccgtcgtcgtacacgaagttgctggaagaaaatgagacagaagcagtgaccgtgcccacgccaagccccacaccagtgagaagcatcagcaccgtgaacttgtctgagaatagcagtgttgtcatccccccacccgactacttggaatgcttatccatgggggcagctgccgacaggagagcagattcggccaggacgacatccacctttaaggccccagcgtccaagcccgagaccgcggctcctaacgatgccaacgggactgcaaagccgccttttctcagcggagaaaacccctttgccactgtgaaactccgtccgactgtgacgaatgatcgctcagcacccatcattcgatgagaggacagccaaggactctcccgggcctctccggttctcccttgcggaatgatgggcgcatcctgtctgccacgtgctgacggtcgggaagcttcagtggagaggcctaactctaatgtcgcctgcttaagcaaatcatgcttctctgtttcacgtagttgggttgacaagtttctgcctttaagataaatgagtaatagtctaatgaccagctcagccatttaaaatattttcttcctattctgttcaagaaacagtaaacttggtttcaatctt

SEQ ID NO: 360811 - DNA, 2487 bp, Homo sapiens
cacctgtaatcccagctactcaggaggctgaagcagaagaatcacttaaacctagaaggcagaggttgcagtgagctgacatcatgtcattgcactccagcctgggtgacagagtgagactctgtcgcaaaaaaatttaaaaaatacagtgttttgtattgatatatgtactgtgtgtgtctgtgtgtgtgagatcaagatcaggttttgattggtgatgtactattactgttgtccttggtcagggacacagaggatgtttggggtttggtggtgagacattatctaacacgtgctgtgtcctttttgggtttgagcccccccacaccagtgagaagcatcagcaccgtgaacttgtctgagaatagcagtgttgtcatccccccacccgactacttggaatgcttatccatgggggcagctgccgacaggagagcagattcggccaggacgacatccacctttaaggccccagcgtccaagcccgagaccgcggctcctaacgatgccaacgggactgcaaagccgccttttctcagcggagaaaacccctttgccactgtgaaactccgtccgactgtgacgaatgatcgctcagcacccatcattcgatgagaggacagccaaggactctcccgggcctctccggttctcccttgcggaatgatgggcgcatcctgtctgccacgtgctgacggtcgggaagcttcagtggagaggcctaactctaatgtcgcctgcttaagcaaatcatgcttctctgtttcacgtagttgggttgacaagtttctgcctttaagataaatgagtaatagtctaatgaccagctcagccatttaaaatattttcttcctattctgttcaagaaacagtaaacttggtttcaatctttactgtattttttaaatgaattttttccttaataacagccagaataagggatagtctatgctttcaggactggctttctgcacctgatatgaatgagaccagttttattttataaagcatgtgctcttaatagcattatgtctaaagaagatatcacgtaagtttgcatcttagcatgcaaatcataattttaagcaatataaattatgaaaatactatataaatgtaatttaacttaaaatgtttaagtgtagagcttccagagatggagaaacccccaccctccctccaaccacgccagagctgtagagtgctaagacgctttgcctgcccttatcacagccacacgtagcactcgacgaaatctgcctccgagagctccttttcttggtagttaggagtcgccaacggattcgctgcacacggcccatccaggacacaggcctgggcgtcggagtcacggctccttgtgttctcactcagctagttggccaaagctgcatccattaccagtacactcaaactgctcggggtcctggtttctccgtgtttgaatcaggtacagactctcaaaggatacgtgtaaagccaggatgacctctggtgcctggagaagggcgggtttttcagcctagcagccatgatgccctcggaacctggccctatggtatggatgtgaggactacgcactggctgccctgagcccggggctggaaatcatctttggctgccaaggatctggacctattttggagtggagagtcatggttaaaattcccagcccggcccaggtacgggaatcccagcattttgtgaggccgaggcagggggatcacctgaggtcaggagtctctactaaaaatacaaaaattagacaggtgtggtggtgggcgccactcaggaggctgaggcaggagaatcacttgaacccgggaggcagaggttgcagtgagccagatcatgctgctgcactccagcccggccgctcaccgtgtgtgttgctgggtgctggggctgtgacttatcccctctcctttagccttgccataagtgtagtatcctatgaggctgagattgggaaaggttacatgcaggtaagccagtggacgtggccgatgcttcaggctccttccagccaggtccagcagtgttaccatctgcttctcctgggaggacaaaccaggcacccccaccatgaaggggctgcaggcaccatgaactatgttaacaaccccagtctgtactacagaaagggctgcagccacatgagaattcagtccacacaagccccatggccgtgttccccacttcagccacagggctcagggagccccatctggcgctaaggggaactgctggggtgtgggtgacacctggcctttggcgttctgccttggggaggtttctggttttgttacggggtggaagaataggacctgggggtctcggatgcaacctgcagaccccgtggctcacccaaccccaggttctgcctcccagaccagaacgggcatggcctggtccttggcaccgaggtgcctgctctgtaaatatcaagggattacaactttaataataaagcagaacttgaaaaca

SEQ ID NO: 360812 - DNA, 1546 bp, Homo sapiens
aggtggggccgcccggcccgcccagcttcctctggcggcgtccggccgcttctcctctgctcctcgaagaaggccagggcggcgctgccgcaagttttgacattttcgcagcggagacgcgcgcgggcactctcgggccgacggctgcggcggcggccgaccctccagagccccttagtcgcgccccggccctcccgctgcccggagtccggcggccacgaggcccagccgcgtcctcccgcgcttgctcgcccggcggccgcagccatgtcccgggggcccgaggaggtgaaccggctcacggagagcacctaccggaatgttatggaacagttcaatcctgggctgcgaaatttaataaacctggggaaaaattatgagaaagctgtaaacgctatgatcctggcaggaaaagcctactacgatggagtggccaagatcggtgagattgccactgggtcccccgtgtcaactgaactgggacatgtcctcatagagatttcaagtacccacaagaaactcaacgagagtcttgatgaaaattttaaaaaattccacaaagagattatccatgagctggagaagaagatagaacttgacgtgaaatatatgaacgcaactctaaaaagataccaaacagaacacaagaataaattagagtctttggagaaatcccaagctgagttgaagaagatcagaaggaaaagccaaggaagccgaaacgcactcaaatatgaacacaaagaaattgagtatgtggagaccgttacttctcgtcagagtgaaatccagaaattcattgcagatggttgcaaagaggctctgcttgaagagaagaggcgcttctgctttctggttgataagcactgtggctttgcaaaccacatacattattatcacttacagtctgcagaactactgaattccaagctgcctcggtggcaggagacctgtgttgatgccatcaaagtgccagagaaaatcatgaatatgatcgaagaaataaagaccccagcctctacccccgtgtctggaactcctcaggcttcacccatgatcgagagaagcaatgtggttaggaaagattacgacaccctttctaaatgctcaccaaagatgccccccgctccttcaggcagagcatataccagtcccttgatcgatatgtttaataacccagccacggctgccccgaattcacaaagggtaaataattcaacaggtacttccgaagatcccagtttacagcgatcagtttcggttgcaacgggactgaacatgatgaagaagcagaaagtgaagaccatcttcccgcacactgcgggctccaacaagaccttactcagctttgcacagggagatgtcatcacgctgctcatccccgaggagaaggatggctggctctatggagaacacgacgtgtccaaggcgaggggttggttcccgtcgtcgtacacgaagttgctggaagaaaatgagacagaagcagtgaccgtgcccacgccaagcttgcgccccacaccagcgtgaagcatgagcaccggga

SEQ ID NO: 360813 - DNA, 2467 bp, Homo sapiens
aggtggggccgcccggcccgcccagcttcctctggcggcgtccggccgcttctcctctgctcctcgaagaaggccagggcggcgctgccgcaagttttgacattttcgcagcggagacgcgcgcgggcactctcgggccgacggctgcggcggcggccgaccctccagagccccttagtcgcgccccggccctcccgctgcccggagtccggcggccacgaggcccagccgcgtcctcccgcgcttgctcgcccggcggccgcagccatgtcccgggggcccgaggaggtgaaccggctcacggagagcacctaccggaatgttatggaacagttcaatcctgggctgcgaaatttaataaacctggggaaaaattatgagaaagctgtaaacgctatgatcctggcaggaaaagcctactacgatggagtggccaagatcggtgagattgccactgggtcccccgtgtcaactgaactggaacgatgccaacgggactgcaaagccgccttttctcagcggagaaaacccctttgccactgtgaaactccgtccgactgtgacgaatgatcgctcagcacccatcattcgatgagaggacagccaaggactctcccgggcctctccggttctcccttgcggaatgatgggcgcatcctgtctgccacgtgctgacggtcgggaagcttcagtggagaggcctaactctaatgtcgcctgcttaagcaaatcatgcttctctgtttcacgtagttgggttgacaagtttctgcctttaagataaatgagtaatagtctaatgaccagctcagccatttaaaatattttcttcctattctgttcaagaaacagtaaacttggtttcaatctttactgtattttttaaatgaattttttccttaataacagccagaataagggatagtctatgctttcaggactggctttctgcacctgatatgaatgagaccagttttattttataaagcatgtgctcttaatagcattatgtctaaagaagatatcacgtaagtttgcatcttagcatgcaaatcataattttaagcaatataaattatgaaaatactatataaatgtaatttaacttaaaatgtttaagtgtagagcttccagagatggagaaacccccaccctccctccaaccacgccagagctgtagagtgctaagacgctttgcctgcccttatcacagccacacgtagcactcgacgaaatctgcctccgagagctccttttcttggtagttaggagtcgccaacggattcgctgcacacggcccatccaggacacaggcctgggcgtcggagtcacggctccttgtgttctcactcagctagttggccaaagctgcatccattaccagtacactcaaactgctcggggtcctggtttctccgtgtttgaatcaggtacagactctcaaaggatacgtgtaaagccaggatgacctctggtgcctggagaagggcgggtttttcagcctagcagccatgatgccctcggaacctggccctatggtatggatgtgaggactacgcactggctgccctgagcccggggctggaaatcatctttggctgccaaggatctggacctattttggagtggagagtcatggttaaaattcccagcccggcccaggtacgggaatcccagcattttgtgaggccgaggcagggggatcacctgaggtcaggagtctctactaaaaatacaaaaattagacaggtgtggtggtgggcgccactcaggaggctgaggcaggagaatcacttgaacccgggaggcagaggttgcagtgagccagatcatgctgctgcactccagcccggccgctcaccgtgtgtgttgctgggtgctggggctgtgacttatcccctctcctttagccttgccataagtgtagtatcctatgaggctgagattgggaaaggttacatgcaggtaagccagtggacgtggccgatgcttcaggctccttccagccaggtccagcagtgttaccatctgcttctcctgggaggacaaaccaggcacccccaccatgaaggggctgcaggcaccatgaactatgttaacaaccccagtctgtactacagaaagggctgcagccacatgagaattcagtccacacaagccccatggccgtgttccccacttcagccacagggctcagggagccccatctggcgctaaggggaactgctggggtgtgggtgacacctggcctttggcgttctgccttggggaggtttctggttttgttacggggtggaagaataggacctgggggtctcggatgcaacctgcagaccccgtggctcacccaaccccaggttctgcctcccagaccagaacgggcatggcctggtccttggcaccgaggtgcctgctctgtaaatatcaagggattacaactttaataataaagcagaacttgaaaaca

SEQ ID NO: 360814 - DNA, 2027 bp, Homo sapiens
  misc_feature (42)..(42): n is a, c, g, or t
  misc_feature (56)..(56): n is a, c, g, or t
agcgacggggcctcccccccgcccccccccccccaatcttanacgagccacgggtnactgcaagaccgccttttctcagcggagaaaacccctttgccactgtgaaactccgtccgactgtgacgaatgatcgctcagcacccatcattcgatgagaggacagccaaggactctcccgggcctctccggttctcccttgcggaatgatgggcgcatcctgtctgccacgtgctgacggtcgggaagcttcagtggagaggcctaactctaatgtcgcctgcttaagcaaatcatgcttctctgtttcacgtagttgggttgacaagtttctgcctttaagataaatgagtaatagtctaatgaccagctcagccatttaaaatattttcttcctattctgttcaagaaacagtaaacttggtttcaatctttactgtattttttaaatgaattttttccttaataacagccagaataagggatagtctatgctttcaggactggctttctgcacctgatatgaatgagaccagttttattttataaagcatgtgctcttaatagcattatgtctaaagaagatatcacgtaagtttgcatcttagcatgcaaatcataattttaagcaatataaattatgaaaatactatataaatgtaatttaacttaaaatgtttaagtgtagagcttccagagatggagaaacccccaccctccctccaaccacgccagagctgtagagtgctaagacgctttgcctgcccttatcacagccacacgtagcactcgacgaaatctgcctccgagagctccttttcttggtagttaggagtcgccaacggattcgctgcacacggcccatccaggacacaggcctgggcgtcggagtcacggctccttgtgttctcactcagctagttggccaaagctgcatccattaccagtacactcaaactgctcggggtcctggtttctccgtgtttgaatcaggtacagactctcaaaggatacgtgtaaagccaggatgacctctggtgcctggagaagggcgggtttttcagcctagcagccatgatgccctcggaacctggccctatggtatggatgtgaggactacgcactggctgccctgagcccggggctggaaatcatctttggctgccaaggatctggacctattttggagtggagagtcatggttaaaattcccagcccggcccaggtacgggaatcccagcattttgtgaggccgaggcagggggatcacctgaggtcaggagtctctactaaaaatacaaaaattagacaggtgtggtggtgggcgccactcaggaggctgaggcaggagaatcacttgaacccgggaggcagaggttgcagtgagccagatcatgctgctgcactccagcccggccgctcaccgtgtgtgttgctgggtgctggggctgtgacttatcccctctcctttagccttgccataagtgtagtatcctatgaggctgagattgggaaaggttacatgcaggtaagccagtggacgtggccgatgcttcaggctccttccagccaggtccagcagtgttaccatctgcttctcctgggaggacaaaccaggcacccccaccatgaaggggctgcaggcaccatgaactatgttaacaaccccagtctgtactacagaaagggctgcagccacatgagaattcagtccacacaagccccatggccgtgttccccacttcagccacagggctcagggagccccatctggcgctaaggggaactgctggggtgtgggtgacacctggcctttggcgttctgccttggggaggtttctggttttgttacggggtggaagaataggacctgggggtctcggatgcaacctgcagaccccgtggctcacccaaccccaggttctgcctcccagaccagaacgggcatggcctggtccttggcaccgaggtgcctgctctgtaaatatcaagggattacaactttaataataaagcagaacttgaaaaca

SEQ ID NO: 360815 - DNA, 1235 bp, Homo sapiens
cccctgggtgtgctatcggacgaggctgggtcattaggagtcgccaacggattcgctgcacacggcccatccaggacacaggcctgggcgtcggagtcacggctccttgtgttctcactcagctagttggccaaagctgcatccattaccagtacactcaaactgctcggggtcctggtttctccgtgtttgaatcaggtacagactctcaaaggatacgtgtaaagccaggatgacctctggtgcctggagaagggcgggtttttcagcctagcagccatgatgccctcggaacctggccctatggtatggatgtgaggactacgcactggctgccctgagcccggggctggaaatcatctttggctgccaaggatctggacctattttggagtggagagtcatggttaaaattcccagcccggcccaggtacgggaatcccagcattttgtgaggccgaggcagggggatcacctgaggtcaggagtctctactaaaaatacaaaaattagacaggtgtggtggtgggcgccactcaggaggctgaggcaggagaatcacttgaacccgggaggcagaggttgcagtgagccagatcatgctgctgcactccagcccggccgctcaccgtgtgtgttgctgggtgctggggctgtgacttatcccctctcctttagccttgccataagtgtagtatcctatgaggctgagattgggaaaggttacatgcaggtaagccagtggacgtggccgatgcttcaggctccttccagccaggtccagcagtgttaccatctgcttctcctgggaggacaaaccaggcacccccaccatgaaggggctgcaggcaccatgaactatgttaacaaccccagtctgtactacagaaagggctgcagccacatgagaattcagtccacacaagccccatggccgtgttccccacttcagccacagggctcagggagccccatctggcgctaaggggaactgctggggtgtgggtgacacctggcctttggcgttctgccttggggaggtttctggttttgttacggggtggaagaataggacctgggggtctcggatgcaacctgcagaccccgtggctcacccaaccccaggttctgcctcccagaccagaacgggcatggcctggtccttggcaccgaggtgcctgctctgtaaatatcaagggattacaactttaataataaagcagaacttgaaaaca

SEQ ID NO: 360816 - DNA, 318 bp, Homo sapiens
cagaggatgtttggggtttggtggtgagacattatctaacacgtgctgtgtcctttttgggtttgagcccccccacaccagtgagaagcatcagcaccgtgaacttgtctgagaatagcagtgttgtcatccccccacccgactacttggaatgcttatccatgggggcagctgccgacaggagagcagattcggccaggacgacatccacctttaaggccccagcgtccaagcccgagaccgcggctcctgtgagtaaagccgcagcagggcgtcctgggtcctggactcgccatccccgactgggaggcgcaggtc

SEQ ID NO: 360817 - DNA, 3675 bp, Homo sapiens
aggtggggccgcccggcccgcccagcttcctctggcggcgtccggccgcttctcctctgctcctcgaagaaggccagggcggcgctgccgcaagttttgacattttcgcagcggagacgcgcgcgggcactctcgggccgacggctgcggcggcggccgaccctccagagccccttagtcgcgccccggccctcccgctgcccggagtccggcggccacgaggcccagccgcgtcctcccgcgcttgctcgcccggcggccgcagccatgtcccgggggcccgaggaggtgaaccggctcacggagagcacctaccggaatgttatggaacagttcaatcctgggctgcgaaatttaataaacctggggaaaaattatgagaaagctgtaaacgctatgatcctggcaggaaaagcctactacgatggagtggccaagatcggtgagattgccactgggtcccccgtgtcaactgaactgggacatgtcctcatagagatttcaagtacccacaagaaactcaacgagagtcttgatgaaaattttaaaaaattccacaaagagattatccatgagctggagaagaagatagaacttgacgtgaaatatatgaacgcaactctaaaaagataccaaacagaacacaagaataaattagagtctttggagaaatcccaagctgagttgaagaagatcagaaggaaaagccaaggaagccgaaacgcactcaaatatgaacacaaagaaattgagtatgtggagaccgttacttctcgtcagagtgaaatccagaaattcattgcagatggttgcaaagaggctctgcttgaagagaagaggcgcttctgctttctggttgataagcactgtggctttgcaaaccacatacattattatcacttacagtctgcagaactactgaattccaagctgcctcggtggcaggagacctgtgttgatgccatcaaagtgccagagaaaatcatgaatatgatcgaagaaataaagaccccagcctctacccccgtgtctggaactcctcaggcttcacccatgatcgagagaagcaatgtggttaggaaagattacgacaccctttctaaatgctcaccaaagatgccccccgctccttcaggcagagcatataccagtcccttgatcgatatgtttaataacccagccacggctgccccgaattcacaaagggtaaataattcaacaggtacttccgaagatcccagtttacagcgatcagtttcggttgcaacgggactgaacatgatgaagaagcagaaagtgaagaccatcttcccgcacactgcgggctccaacaagaccttactcagctttgcacagggagatgtcatcacgctgctcatccccgaggagaaggatggctggctctatggagaacacgacgtgtccaaggcgaggggttggttcccgtcgtcgtacacgaagttgctggaagaaaatgagacagaagcagtgaccgtgcccacgccaagccccacaccagtgagaagcatcagcaccgtgaacttgtctgagaatagcagtgttgtcatccccccacccgactacttggaatgcttatccatgggggcagctgccgacaggagagcagattcggccaggacgacatccacctttaaggccccagcgtccaagcccgagaccgcggctcctaacgatgccaacgggactgcaaagccgccttttctcagcggagaaaacccctttgccactgtgaaactccgtccgactgtgacgaatgatcgctcagcacccatcattcgatgagaggacagccaaggactctcccgggcctctccggttctcccttgcggaatgatgggcgcatcctgtctgccacgtgctgacggtcgggaagcttcagtggagaggcctaactctaatgtcgcctgcttaagcaaatcatgcttctctgtttcacgtagttgggttgacaagtttctgcctttaagataaatgagtaatagtctaatgaccagctcagccatttaaaatattttcttcctattctgttcaagaaacagtaaacttggtttcaatctttactgtattttttaaatgaattttttccttaataacagccagaataagggatagtctatgctttcaggactggctttctgcacctgatatgaatgagaccagttttattttataaagcatgtgctcttaatagcattatgtctaaagaagatatcacgtaagtttgcatcttagcatgcaaatcataattttaagcaatataaattatgaaaatactatataaatgtaatttaacttaaaatgtttaagtgtagagcttccagagatggagaaacccccaccctccctccaaccacgccagagctgtagagtgctaagacgctttgcctgcccttatcacagccacacgtagcactcgacgaaatctgcctccgagagctccttttcttggtagttaggagtcgccaacggattcgctgcacacggcccatccaggacacaggcctgggcgtcggagtcacggctccttgtgttctcactcagctagttggccaaagctgcatccattaccagtacactcaaactgctcggggtcctggtttctccgtgtttgaatcaggtacagactctcaaaggatacgtgtaaagccaggatgacctctggtgcctggagaagggcgggtttttcagcctagcagccatgatgccctcggaacctggccctatggtatggatgtgaggactacgcactggctgccctgagcccggggctggaaatcatctttggctgccaaggatctggacctattttggagtggagagtcatggttaaaattcccagcccggcccaggtacgggaatcccagcattttgtgaggccgaggcagggggatcacctgaggtcaggagtctctactaaaaatacaaaaattagacaggtgtggtggtgggcgccactcaggaggctgaggcaggagaatcacttgaacccgggaggcagaggttgcagtgagccagatcatgctgctgcactccagcccggccgctcaccgtgtgtgttgctgggtgctggggctgtgacttatcccctctcctttagccttgccataagtgtagtatcctatgaggctgagattgggaaaggttacatgcaggtaagccagtggacgtggccgatgcttcaggctccttccagccaggtccagcagtgttaccatctgcttctcctgggaggacaaaccaggcacccccaccatgaaggggctgcaggcaccatgaactatgttaacaaccccagtctgtactacagaaagggctgcagccacatgagaattcagtccacacaagccccatggccgtgttccccacttcagccacagggctcagggagccccatctggcgctaaggggaactgctggggtgtgggtgacacctggcctttggcgttctgccttggggaggtttctggttttgttacggggtggaagaataggacctgggggtctcggatgcaacctgcagaccccgtggctcacccaaccccaggttctgcctcccagaccagaacgggcatggcctggtccttggcaccgaggtgcctgctctgtaaatatcaagggattacaactttaataataaagcagaacttgaaaaca

SEQ ID NO: 360818 - DNA, 3316 bp, Homo sapiens
ctcctctcctggcccttctacgcctcccctgttccttctcctccccgtcccttctcctcttccctgaccctcagagctctggagaccaccccccatcccctgaccagctacacattttacaactagtgcacttaagttggggaggggtctgttgtgcgtcggtggggcccacgtcctcctcacaacttcttggaatcagtgacccgtgctgtcctggctgccgggcttaagccctccgggaccaaagacacaagctcgagtttcctctaagaaaagaaagcgcccaagaatgtgggggtgaaactcccctgtaattaggatcgccagaatgttatggaacagttcaatcctgggctgcgaaatttaataaacctggggaaaaattatgagaaagctgtaaacgctatgatcctggcaggaaaagcctactacgatggagtggccaagatcggtgagattgccactgggtcccccgtgtcaactgaactgggacatgtcctcatagagatttcaagtacccacaagaaactcaacgagagtcttgatgaaaattttaaaaaattccacaaagagattatccatgagctggagaagaagatagaacttgacgtgaaatatatgaacgcaactctaaaaagataccaaacagaacacaagaataaattagagtctttggagaaatcccaagctgagttgaagaagatcagaaggaaaagccaaggaagccgaaacgcactcaaatatgaacacaaagaaattgagtatgtggagaccgttacttctcgtcagagtgaaatccagaaattcattgcagatggttgcaaagaggctctgcttgaagagaagaggcgcttctgctttctggttgataagcactgtggctttgcaaaccacatacattattatcacttacagtctgcagaactactgaattccaagctgcctcggtggcaggagacctgtgttgatgccatcaaagtgccagagaaaatcatgaatatgatcgaagaaataaagaccccagcctctacccccgtgtctggaactcctcaggcttcacccatgatcgagagaagcaatgtggttaggaaagattacgacaccctttctaaatgctcaccaaagatgccccccgctccttcaggcagagcatataccagtcccttgatcgatatgtttaataacccagccacggctgccccgaattcacaaagggtaaataattcaacaggtacttccgaagatcccagtttacagcgatcagtttcggttgcaacgggactgaacatgatgaagaagcagaaagtgaagaccatcttcccgcacactgcgggctccaacaagaccttactcagctttgcacagggagatgtcatcacgctgctcatccccgaggagaaggatggctggctctatggagaacacgacgtgtccaaggcgaggggttggttcccgtcgtcgtacacgaagttgctggaagaaaatgagacagaagcagtgaccgtgcccacgccaaggtgctgacggtcgggaagcttcagtggagaggcctaactctaatgtcgcctgcttaagcaaatcatgcttctctgtttcacgtagttgggttgacaagtttctgcctttaagataaatgagtaatagtctaatgaccagctcagccatttaaaatattttcttcctattctgttcaagaaacagtaaacttggtttcaatctttactgtattttttaaatgaattttttccttaataacagccagaataagggatagtctatgctttcaggactggctttctgcacctgatatgaatgagaccagttttattttataaagcatgtgctcttaatagcattatgtctaaagaagatatcacgtaagtttgcatcttagcatgcaaatcataattttaagcaatataaattatgaaaatactatataaatgtaatttaacttaaaatgtttaagtgtagagcttccagagatggagaaacccccaccctccctccaaccacgccagagctgtagagtgctaagacgctttgcctgcccttatcacagccacacgtagcactcgacgaaatctgcctccgagagctccttttcttggtagttaggagtcgccaacggattcgctgcacacggcccatccaggacacaggcctgggcgtcggagtcacggctccttgtgttctcactcagctagttggccaaagctgcatccattaccagtacactcaaactgctcggggtcctggtttctccgtgtttgaatcaggtacagactctcaaaggatacgtgtaaagccaggatgacctctggtgcctggagaagggcgggtttttcagcctagcagccatgatgccctcggaacctggccctatggtatggatgtgaggactacgcactggctgccctgagcccggggctggaaatcatctttggctgccaaggatctggacctattttggagtggagagtcatggttaaaattcccagcccggcccaggtacgggaatcccagcattttgtgaggccgaggcagggggatcacctgaggtcaggagtctctactaaaaatacaaaaattagacaggtgtggtggtgggcgccactcaggaggctgaggcaggagaatcacttgaacccgggaggcagaggttgcagtgagccagatcatgctgctgcactccagcccggccgctcaccgtgtgtgttgctgggtgctggggctgtgacttatcccctctcctttagccttgccataagtgtagtatcctatgaggctgagattgggaaaggttacatgcaggtaagccagtggacgtggccgatgcttcaggctccttccagccaggtccagcagtgttaccatctgcttctcctgggaggacaaaccaggcacccccaccatgaaggggctgcaggcaccatgaactatgttaacaaccccagtctgtactacagaaagggctgcagccacatgagaattcagtccacacaagccccatggccgtgttccccacttcagccacagggctcagggagccccatctggcgctaaggggaactgctggggtgtgggtgacacctggcctttggcgttctgccttggggaggtttctggttttgttacggggtggaagaataggacctgggggtctcggatgcaacctgcagaccccgtggctcacccaaccccaggttctgcctcccagaccagaacgggcatggcctggtccttggcaccgaggtgcctgctctgtaaatatcaagggattacaactttaataataaagcagaacttgaaaaca

SEQ ID NO: 360819 - DNA, 2505 bp, Homo sapiens
aggtggggccgcccggcccgcccagcttcctctggcggcgtccggccgcttctcctctgctcctcgaagaaggccagggcggcgctgccgcaagttttgacattttcgcagcggagacgcgcgcgggcactctcgggccgacggctgcggcggcggccgaccctccagagccccttagtcgcgccccggccctcccgctgcccggagtccggcggccacgaggcccagccgcgtcctcccgcgcttgctcgcccggcggccgcagccatgtcccgggggcccgaggaggtgaaccggctcacggagagcacctaccggaatgttatggaacagttcaatcctgggctgcgaaatttaataaacctggggaaaaattatgagaaagctgtaaacgctatgatcctggcaggaaaagcctactacgatggagtggccaagatcggtgagattgccactgggtcccccgtgtcaactgaactgggacatgtcctcatagagatttcaagtacccacaagaaactcaacgagagtcttgatgaaaattttaaaaaattccacaaagagattatccatgagctggagaagaagatagaacttgacgtgaaatatatgaacgcaactctaaaaagataccaaacagaacacaagaataaattagagtctttggagaaatcccaagctgagttgaagaagatcagaaggaaaagccaaggaagccgaaacgcactcaaatatgaacacaaagaaattgagtatgtggagaccgttacttctcgtcagagtgaaatccagaaattcattgcagatggttgcaaagaggctctgcttgaagagaagaggcgcttctgctttctggttgataagcactgtggctttgcaaaccacatacattattatcacttacagtctgcagaactactgaattccaagctgcctcggtggcaggagacctgtgttgatgccatcaaagtgccagagaaaatcatgaatatgatcgaagaaataaagaccccagcctctacccccgtgtctggaactcctcaggcttcacccatgatcgagagaagcaatgtggttaggaaagattacgacaccctttctaaatgctcaccaaagatgccccccgctccttcaggcagagcatataccagtcccttgatcgatatgtttaataacccagccacggctgccccgaattcacaaagggtaaataattcaacaggtacttccgaagatcccagtttacagcgatcagtttcggttgcaacgggactgaacatgatgaagaagcagaaagtgaagaccatcttcccgcacactgcgggctccaacaagaccttactcagctttgcacagggagatgtcatcacgctgctcatccccgaggagaaggatggctggctctatggagaacacgacgtgtccaaggcgaggggttggttcccgtcgtcgtacacgaagttgctggaagaaaatgagacagaagcagtgaccgtgcccacgccaagccccacaccagtgagaagcatcagcaccgtgaacttgtctgagaatagcagtgttgtcatccccccacccgactacttggaatgcttatccatgggggcagctgccgacaggagagcagattcggccaggacgacatccacctttaaggccccagcgtccaagcccgagaccgcggctcctaacgatgccaacgggactgcaaagccgccttttctcagcggagaaaacccctttgccactgtgaaactccgtccgactgtgacgaatgatcgctcagcacccatcattcgatgagaggacagccaaggactctcccgggcctctccggttctcccttgcggaatgatgggcgcatcctgtctgccacgtgctgacggtcgggaagcttcagtggagaggcctaactctaatgtcgcctgcttaagcaaatcatgcttctctgtttcacgtagttgggttgacaagtttctgcctttaagataaatgagtaatagtctaatgaccagctcagccatttaaaatattttcttcctattctgttcaagaaacagtaaacttggtttcaatcttaaaagaaaaaaaaagaaaaaaaaaaaacaaaagaaaaagaaacaacacaaaacaaagaaccgaaacaaaaaagaaaaaaaacaaaaaaacaaaaatatgaggagggagacacgagccagacaagaaaaaagaggagaaagaagacaacggaggagggagggaggaggggcacacaaagaagtaaacagcacgcagagcgtcaacagcaacgaaacaaagaaaaaaaaagagagaaacaaacaagagagagaggaataaaacaacaaagaaaaaaaaagaacggacgaggataaaagagagagcgacatggaaagaaaacaacaaaagggagagagaaacgcgggagcacataaaggggacagaaacacacgcgggaccaaacaagaaaaggagagaaaaaaaaaaagcaccgcgagcgagaggaga

SEQ ID NO: 360820 - DNA, 2293 bp, Homo sapiens
tggttcagtcggtccatgaggtgtggaccctcgaggtgtgcagcagcacactgcgtccatccggacttctcggactcgcggcggtttggacactcgggcgtgtgcatgcacacgcggaaggtccatccccacaccagtgagaagcatcagcaccgtgaacttgtctgagaatagcagtgttgtcatccccccacccgactacttggaatgcttatccatgggggcagctgccgacaggagagcagattcggccaggacgacatccacctttaaggccccagcgtccaagcccgagaccgcggctcctaacgatgccaacgggactgcaaagccgccttttctcagcggagaaaacccctttgccactgtgaaactccgtccgactgtgacgaatgatcgctcagcacccatcattcgatgagaggacagccaaggactctcccgggcctctccggttctcccttgcggaatgatgggcgcatcctgtctgccacgtgctgacggtcgggaagcttcagtggagaggcctaactctaatgtcgcctgcttaagcaaatcatgcttctctgtttcacgtagttgggttgacaagtttctgcctttaagataaatgagtaatagtctaatgaccagctcagccatttaaaatattttcttcctattctgttcaagaaacagtaaacttggtttcaatctttactgtattttttaaatgaattttttccttaataacagccagaataagggatagtctatgctttcaggactggctttctgcacctgatatgaatgagaccagttttattttataaagcatgtgctcttaatagcattatgtctaaagaagatatcacgtaagtttgcatcttagcatgcaaatcataattttaagcaatataaattatgaaaatactatataaatgtaatttaacttaaaatgtttaagtgtagagcttccagagatggagaaacccccaccctccctccaaccacgccagagctgtagagtgctaagacgctttgcctgcccttatcacagccacacgtagcactcgacgaaatctgcctccgagagctccttttcttggtagttaggagtcgccaacggattcgctgcacacggcccatccaggacacaggcctgggcgtcggagtcacggctccttgtgttctcactcagctagttggccaaagctgcatccattaccagtacactcaaactgctcggggtcctggtttctccgtgtttgaatcaggtacagactctcaaaggatacgtgtaaagccaggatgacctctggtgcctggagaagggcgggtttttcagcctagcagccatgatgccctcggaacctggccctatggtatggatgtgaggactacgcactggctgccctgagcccggggctggaaatcatctttggctgccaaggatctggacctattttggagtggagagtcatggttaaaattcccagcccggcccaggtacgggaatcccagcattttgtgaggccgaggcagggggatcacctgaggtcaggagtctctactaaaaatacaaaaattagacaggtgtggtggtgggcgccactcaggaggctgaggcaggagaatcacttgaacccgggaggcagaggttgcagtgagccagatcatgctgctgcactccagcccggccgctcaccgtgtgtgttgctgggtgctggggctgtgacttatcccctctcctttagccttgccataagtgtagtatcctatgaggctgagattgggaaaggttacatgcaggtaagccagtggacgtggccgatgcttcaggctccttccagccaggtccagcagtgttaccatctgcttctcctgggaggacaaaccaggcacccccaccatgaaggggctgcaggcaccatgaactatgttaacaaccccagtctgtactacagaaagggctgcagccacatgagaattcagtccacacaagccccatggccgtgttccccacttcagccacagggctcagggagccccatctggcgctaaggggaactgctggggtgtgggtgacacctggcctttggcgttctgccttggggaggtttctggttttgttacggggtggaagaataggacctgggggtctcggatgcaacctgcagaccccgtggctcacccaaccccaggttctgcctcccagaccagaacgggcatggcctggtccttggcaccgaggtgcctgctctgtaaatatcaagggattacaactttaataataaagcagaacttgaaaaca

SEQ ID NO: 360821 - DNA, 1493 bp, Homo sapiens
aggtggggccgcccggcccgcccagcttcctctggcggcgtccggccgcttctcctctgctcctcgaagaaggccagggcggcgctgccgcaagttttgacattttcgcagcggagacgcgcgcgggcactctcgggccgacggctgcggcggcggccgaccctccagagccccttagtcgcgccccggccctcccgctgcccggagtccggcggccacgaggcccagccgcgtcctcccgcgcttgctcgcccggcggccgcagccatgtcccgggggcccgaggaggtgaaccggctcacggagagcacctaccggaatgttatggaacagttcaatcctgggctgcgaaatttaataaacctggggaaaaattatgagaaagctgtaaacgctatgatcctggcaggaaaagcctactacgatggagtggccaagatcggtgagattgccactgggtcccccgtgtcaactgaactgggacatgtcctcatagagatttcaagtacccacaagaaactcaacgagagtcttgatgaaaattttaaaaaattccacaaagagattatccatgagctggagaagaagatagaacttgacgtgaaatatatgaacgcaactctaaaaagataccaaacagaacacaagaataaattagagtctttggagaaatcccaagctgagttgaagaagatcagaaggaaaagccaaggaagccgaaacgcactcaaatatgaacacaaagaaattgagtatgtggagaccgttacttctcgtcagagtgaaatccagaaattcattgcagatggttgcaaagaggctctgcttgaagagaagaggcgcttctgctttctggttgataagcactgtggctttgcaaaccacatacattattatcacttacagtctgcagaactactgaattccaagctgcctcggtggcaggagacctgtgttgatgccatcaaagtgccagagaaaatcatgaatatgatcgaagaaataaagaccccagcctctacccccgtgtctggaactcctcaggcttcacccatgatcgagagaagcaatgtggttaggaaagattacgacaccctttctaaatgctcaccaaagatgccccccgctccttcaggcagagcatataccagtcccttgatcgatatgtttaataacccagccacggctgccccgaattcacaaagggtaaataattcaacaggtacttccgaagatcccagtttacagcgatcagtttcggttgcaacgggactgaacatgatgaagaagcagaaagtgaagaccatcttcccgcacactgcgggctccaacaagaccttactcagctttgcacagggagatgtcatcacgctgctcatccccgaggagaaggatggctggctctatggagaacacgacgtgtccaaggcgtcccgtctcgtaccgaatgctgaagaatgagacgaacatgcctccacccaggtagcctaacc

SEQ ID NO: 360822 - DNA, 1308 bp, Homo sapiens
aggtggggccgcccggcccgcccagcttcctctggcggcgtccggccgcttctcctctgctcctcgaagaaggccagggcggcgctgccgcaagttttgacattttcgcagcggagacgcgcgcgggcactctcgggccgacggctgcggcggcggccgaccctccagagccccttagtcgcgccccggccctcccgctgcccggagtccggcggccacgaggcccagccgcgtcctcccgcgcttgctcgcccggcggccgcagccatgtcccgggggcccgaggaggtgaaccggctcacggagagcacctaccggaatgttatggaacagttcaatcctgggctgcgaaatttaataaacctggggaaaaattatgagaaagctgtaaacgctatgatcctggcaggaaaagcctactacgatggagtggccaagatcggtgagattgccactgggtcccccgtgtcaactgaactgggacatgtcctcatagagatttcaagtacccacaagaaactcaacgagagtcttgatgaaaattttaaaaaattccacaaagagattatccatgagctggagaagaagatagaacttgacgtgaaatatatgaacgcaactctaaaaagataccaaacagaacacaagaataaattagagtctttggagaaatcccaagctgagttgaagaagatcagaaggaaaagccaaggaagccgaaacgcactcaaatatgaacacaaagaaattgagtatgtggagaccgttacttctcgtcagagtgaaatccagaaattcattgcagatggttgcaaagaggctctgcttgaagagaagaggcgcttctgctttctggttgataagcactgtggctttgcaaaccacatacattattatcacttacagtctgcagaactactgaattccaagctgcctcggtggcaggagacctgtgttgatgccatcaaagtgccagagaaaatcatgaatatgatcgaagaaataaagaccccagcctctacccccgtgtctggaactcctcaggcttcacccatgatcgagagaagcaatgtggtaggagccagttttctcttccagatttcaatcgtgtgtttcctaacttgatctgggccaaatttgcctgtgttggtgggaatcacaggtccccctttattacttccaggaccaccttttcgcacctctatccccttacctttaggggcgaaggtagctgggcacatgtttgttttttgttgttgttaaggtggagtctttcttgctctgtcgcccaggctggagtacagtgga

SEQ ID NO: 360823 - DNA, 384 bp, Homo sapiens
gtacttccgaagatcccagtttacagcgatcagtttcggttgcaacgggactgaacatgatgaagaagcagaaagtgaagaccatcttcccgcacactgcgggctccaacaagaccttactcagctttgcacagggagatgtcatcacgctgctcatccccgaggagaaggatggctggctctatggagaacacgacgtgtccaaggcgtaagtctgggcgtgatggtccccgcagggcaccagacggcccctcccttccagagcagccaagctgcaaactgtcttcgtggacatgctcacattttagccaaagttaagtttatggtttagttctagtttagttaactgaagttattcgatcccaggctattttctgtatgtct

SEQ ID NO: 360824 - DNA, 405 bp, Homo sapiens
gtctcaaaaaaaaaaaaaagaaaaagcaagctgtagaaattttacaataagatgctactcaaataagtgtgtgtgtgtgtgtgtgtgtgtgtgtgtgtgtgtgtaacatttacttaggtaatttaaaattattaatttaaatctctcatcttcaaaaattctaaatttagtttcttttatacagaattttagtgtacaaattattgattttttaacaagtataatcaaaaaaatacaatactcacttgaaggaaattttctacctttatcactctaggtttccctgcaaacatctaagagaagctctctatcatatacagaatatatacctatttgtctgatacacaagactatatgtctctaaaagttagcaaagagaatgttacacacatccccaagaatatt

SEQ ID NO: 360825 - DNA, 471 bp, Homo sapiens
ggtccaaagtctacccgcctccttgtgacagaagtgcgactgccagctgccgaggcgttcggtcctgctgttgcggccgctgccccagggctgcggggacgctcccggagccctgcctgttccctgtccatccaggccagcagctgaaggagcctcacctgcctcccttctctgagtagcacggatttgaggagaagcagcgaagatgtccagcgagcctccccctccttatcctgggggccccacagccccacttctggaagagaaaagtggagccccgcccaccccaggccgttcctccccagctgtgatgcagccccctccaggcatgccactggactctgtgacagttgcctggcctcctaaagcctgccgaacaccacaagcctgactcactgttatcccaccacaataaagggccttcgtaaaaaagcatatccgggtttctctctagctgtatgtaacccaccg

SEQ ID NO: 360826 - DNA, 2699 bp, Homo sapiens
ggtccaaagtctacccgcctccttgtgacagaagtgcgactgccagctgccgaggcgttcggtcctgctgttgcggccgctgccccagggctgcggggacgctcccggagccctgcctgttccctgtccatccaggccagcagctgaaggagcctcacctgcctcccttctctgagtagcacggatttgaggagaagcagcgaagatgtccagcgagcctccccctccttatcctgggggccccacagccccacttctggaagagaaaagtggagccccgcccaccccaggccgttcctccccagctgtgatgcagccccctccaggcatgccactgccccctgcggacattggccccccaccctatgagccgccgggtcacccaatgccccagcctggcttcatcccaccacacatgagtgcagatggcacctacatgcctccgggtttctaccctcctccaggcccccacccacccatgggctactaccccccagggccctacacgccagggccctaccctggccctgggggccacacagccacagtcctggtcccttcaggagctgccaccacggtgacagtgctgcagggagagatctttgagggagcgcctgtgcagacggtgtgtccccactgccagcaggccatcaccaccaagatctcctacgagattggcttgatgaatttcgtgctgggtttcttctgttgcttcatgggatgtgatctgggctgctgcctgatcccctgcctcatcaatgacttcaaggatgtgacgcacacatgccccagctgcaaagcctacatctacacgtacaagcgcctgtgctaacggagctgggactcgggactcccccgcctgtcagtctggccccctgtgctttgctccctgcgctcagtggtcactttcccgctcccacttggggctgggagccgtgccaccatcccctagaagtcctgtcctcttcaccctgccctacctgagccgctgactcttctggcaaaaattctgttgggatttaaggccaagggtcagtgggtggcagggggctggcaatgagcttgtgtgttgttggtctgcttggtgtgtgtgatcgggaagataagctgggaggggtctcctgctggggtcctgatgcctctgtttccaaacaaggtacaggttcagtccagactctttccccctgggaccaacagcagccagagcagtttagccagttagtccccaggcctgtggccacaggcgtttctgacctgctgggccgagaatgggtaagttgtctggagtcaggtgggcccacgtaggacagggtcacaaagcctgggtttgtttctgggtactttgcgcctctggggtgctagaggtggggcatggtggctggaagtaaaactgccaactctggccctcagaactctcaggtatagaagcccaggatgtctaataccctgtcccagtgcccgagagctgcctggtgtcaggtagagaggacactgtacctgggtgaatgatcagaccctggtagctaagaaggaacttgtccctttgagtcagtgtgcagaccccctttcaggccatgcctctgtgaaccctgtattgctggggccggaaggagcccctgagcctagccccttcccgtctgccctgtgtcctcactgcgtgtgggtatgacctctgcctggtggctggtgtatcccaactgggcaagagatggcagagggtcccccttgtgggtgcgcttggatgtgcagagccttctccatggattttcttccctgtaagtgccgggcccctcaccccagctgacaggctgttgctgtgcctgctcacacctgctcctgcaggcacactgggctagggacgaggaaggagcagccacaagtggtagaactgccttggtggacaccagcctcgccctgtctttatttcctgaatggtttgtgaacttgctcacctggaccactgtatcctgccactgtccttcctggtctcgcactgccactgcatggcctcctgtcactgtgaatcgtggcccagtctcagtttgtagtttctcattaaattggccctttcactcccccgccctgggcctctgctctcttgcctggcttccttcttttttgagggaaagagggtggggctgcaggcagtctactggcaggacgggaggctgagtcctcagggtctcacaccctcagtgctgatgccatgccaactgcctgggacaacaccaacacgtaaggacctaattaaaccaaaccagagtcgggtgtagaccagccctgggatttccagctgtgactgggccagggcacacgttggtctcggcagtggctgtaaggtcaccttccttcctctgatgctggtttcaaccatctatatatggcatccacgcatgggatctgcaagctggagccctcctacccgcaggcttgagcacagcatcatccagccctggggaggcgcacccttaagcaagacagactgggctgaggctgacaggcagaagactaacagagcgcagtctgcacacgcaggttctgggcgacctctggccctggccatctctgcactaactcatctgaattatgaaggtggcagtcttggtcagtagtttaaagagtttccctactttttaaccctttttgaaataaaacttttacaggtagtagattcctattaataaaattatttaagttca

SEQ ID NO: 360827 - DNA, 3044 bp, Homo sapiens
ggtccaaagtctacccgcctccttgtgacagaagtgcgactgccagctgccgaggcgttcggtcctgctgttgcggccgctgccccagggctgcggggacgctcccggagccctgcctgttccctgtccatccaggccagcagctgaaggagcctcacctgcctcccttctctgagtagcacggatttgaggagaagcagcgaagatgtccagcgagcctccccctccttatcctgggggccccacagccccacttctggaagagaaaagtggagccccgcccaccccaggccgttcctccccagctgtgatgcagccccctccaggcatgccactgccccctgcggacattggccccccaccctatgagccgccgggtcacccaatgccccagcctggcttcatcccaccacacatgagtgcagatggcacctacatgcctccgggtttctaccctcctccaggcccccacccacccatgggctactaccccccagggccctacacgccagggccctaccctggccctgggggccacacagccacagtcctggtcccttcaggagctgccaccacggtgacagtgctgcagggagagatctttgagggagcgcctgtgcagacggtgtgtccccactgccagcaggccatcaccaccaagatctcctacgagattggcttgatgaatttcgtgctgggtttcttctgttgcttcatgggatgtgatctgggctgctgcctgatcccctgcctcatcaatgacttcaaggatgtgacgcacacatgccccagctgcaaagcctacatctacacgtacaagcgcctgtgctaacggagctgggactcgggactcccccgcctgtcagtctggccccctgtgctttgctccctgcgctcagtggtcactttcccgctcccacttggggctgggagccgtgccaccatcccctagaagtcctgtcctcttcaccctgccctacctgagccgctgactcttctggcaaaaattctgttgggatttaaggccaagggtcagtgggtggcagggggctggcaatgagcttgtgtgttgttggtctgcttggtgtgtgtgatcgggaagataagctgggaggggtctcctgctggggtcctgatgcctctgtttccaaacaaggtacaggttcagtccagactctttccccctgggaccaacagcagccagagcagtttagccagttagtccccaggcctgtggccacaggcgtttctgacctgctgggccgagaatgggtaagttgtctggagtcaggtgggcccacgtaggacagggtcacaaagcctgggtttgtttctgggtactttgcgcctctggggtgctagaggtggggcatggtggctggaagtaaaactgccaactctggccctcagaactctcaggtatagaagcccaggatgtctaataccctgtcccagtgcccgagagctgcctggtgtcaggtagagaggacactgtacctgggtgaatgatcagaccctggtagctaagaaggaacttgtccctttgagtcagtgtgcagaccccctttcaggccatgcctctgtgaaccctgtattgctggggccggaaggagcccctgagcctagccccttcccgtctgccctgtgtcctcactgcgtgtgggtatgacctctgcctggtggctggtgtatcccaactgggcaagagatggcagagggtcccccttgtgggtgcgcttggatgtgcagagccttctccatggattttcttccctgtaagtgccgggcccctcaccccagctgacaggctgttgctgtgcctgctcacacctgctcctgcaggcacactgggctagggacgaggaaggagcagccacaagtggtagaactgccttggtggacaccagcctcgccctgtctttatttcctgaatggtttgtgaacttgctcacctggaccactgtatcctgccactgtccttcctggtctcgcactgccactgcatggcctcctgtcactgtgaatcgtggcccagtctcagtttgtagtttctcattaaattggccctttcactcccccgccctgggcctctgctctcttgcctggcttccttcttttttgagggaaagagggtggggctgcaggcagtctactggcaggacgggaggctgagtcctcagggtctcacaccctcagtgctgatgccatgccaactgcctgggacaacaccaacacgtaaggacctaattaaaccaaaccagagtcgggtgtagaccagccctgggatttccagctgtgactgggccagggcacacgttggtctcggcagtggctgtaaggtcaccttccttcctctgatgctggtttcaaccatctatatatggcatccacgcatgggatctgcaagctggagccctcctacccgcaggcttgagcacagcatcatccagccctggggaggcgcacccttaagcaagacagactgggctgaggctgacaggcagaagactaacagagcgcagtctgcacacgcaggttctgggcgacctctggccctggccatctctgcactaactcatctgaattatgaaggtggcagtcttggtcagtagtttaaagagtttccctactttttaaccctttttgaaataaaacttttacaggtagtagattcctattaataaaattatttaagttcaaaaaaaaaaaaaaaaaaaaaaaaaaaaaaaaaaaaaaaaaaaaaaaaaaaaaaaaaaaaaaaaaaaaaaaaaaaaaaaaaaaaaaaaaaaaaaaaaaaaaaaaaaacaacagagcaaagaagaaaaaaaaaaggaaagaaagagtgagaaaatagaagatgaaaagaagaacaatacaaaataagaaataaataaaaaaaaaagatataaaaaggaaagagaaaaagaaaagataaaagataaagagaaaaaataacgagagtaagagacaaacacatataaaaagaagatgtaaaaaaaaaagaaaaaaaataagaataaaaaaaaaaaaaaaagagaacaaaa

SEQ ID NO: 360828 - DNA, 2699 bp, Homo sapiens
gcccgaattttgggatatgtcgaccagcgtcgctgtgctgccggcgcctggtccggaaccgggccctcggcgcttacggcggctcgggcacgggcttctggctcccggagccctgcctgttccctgtccatccaggccagcagctgaaggagcctcacctgcctcccttctctgagtagcacggatttgaggagaagcagcgaagatgtccagcgagcctccccctccttatcctgggggccccacagccccacttctggaagagaaaagtggagccccgcccaccccaggccgttcctccccagctgtgatgcagccccctccaggcatgccactgccccctgcggacattggccccccaccctatgagccgccgggtcacccaatgccccagcctggcttcatcccaccacacatgagtgcagatggcacctacatgcctccgggtttctaccctcctccaggcccccacccacccatgggctactaccccccagggccctacacgccagggccctaccctggccctgggggccacacagccacagtcctggtcccttcaggagctgccaccacggtgacagtgctgcagggagagatctttgagggagcgcctgtgcagacggtgtgtccccactgccagcaggccatcaccaccaagatctcctacgagattggcttgatgaatttcgtgctgggtttcttctgttgcttcatgggatgtgatctgggctgctgcctgatcccctgcctcatcaatgacttcaaggatgtgacgcacacatgccccagctgcaaagcctacatctacacgtacaagcgcctgtgctaacggagctgggactcgggactcccccgcctgtcagtctggccccctgtgctttgctccctgcgctcagtggtcactttcccgctcccacttggggctgggagccgtgccaccatcccctagaagtcctgtcctcttcaccctgccctacctgagccgctgactcttctggcaaaaattctgttgggatttaaggccaagggtcagtgggtggcagggggctggcaatgagcttgtgtgttgttggtctgcttggtgtgtgtgatcgggaagataagctgggaggggtctcctgctggggtcctgatgcctctgtttccaaacaaggtacaggttcagtccagactctttccccctgggaccaacagcagccagagcagtttagccagttagtccccaggcctgtggccacaggcgtttctgacctgctgggccgagaatgggtaagttgtctggagtcaggtgggcccacgtaggacagggtcacaaagcctgggtttgtttctgggtactttgcgcctctggggtgctagaggtggggcatggtggctggaagtaaaactgccaactctggccctcagaactctcaggtatagaagcccaggatgtctaataccctgtcccagtgcccgagagctgcctggtgtcaggtagagaggacactgtacctgggtgaatgatcagaccctggtagctaagaaggaacttgtccctttgagtcagtgtgcagaccccctttcaggccatgcctctgtgaaccctgtattgctggggccggaaggagcccctgagcctagccccttcccgtctgccctgtgtcctcactgcgtgtgggtatgacctctgcctggtggctggtgtatcccaactgggcaagagatggcagagggtcccccttgtgggtgcgcttggatgtgcagagccttctccatggattttcttccctgtaagtgccgggcccctcaccccagctgacaggctgttgctgtgcctgctcacacctgctcctgcaggcacactgggctagggacgaggaaggagcagccacaagtggtagaactgccttggtggacaccagcctcgccctgtctttatttcctgaatggtttgtgaacttgctcacctggaccactgtatcctgccactgtccttcctggtctcgcactgccactgcatggcctcctgtcactgtgaatcgtggcccagtctcagtttgtagtttctcattaaattggccctttcactcccccgccctgggcctctgctctcttgcctggcttccttcttttttgagggaaagagggtggggctgcaggcagtctactggcaggacgggaggctgagtcctcagggtctcacaccctcagtgctgatgccatgccaactgcctgggacaacaccaacacgtaaggacctaattaaaccaaaccagagtcgggtgtagaccagccctgggatttccagctgtgactgggccagggcacacgttggtctcggcagtggctgtaaggtcaccttccttcctctgatgctggtttcaaccatctatatatggcatccacgcatgggatctgcaagctggagccctcctacccgcaggcttgagcacagcatcatccagccctggggaggcgcacccttaagcaagacagactgggctgaggctgacaggcagaagactaacagagcgcagtctgcacacgcaggttctgggcgacctctggccctggccatctctgcactaactcatctgaattatgaaggtggcagtcttggtcagtagtttaaagagtttccctactttttaaccctttttgaaataaaacttttacaggtagtagattcctattaataaaattatttaagttca

SEQ ID NO: 360829 - DNA, 2600 bp, Homo sapiens
ggtccaaagtctacccgcctccttgtgacagaagtgcgactgccagctgccgaggcgttcggtcctgctgttgcggccgctgccccagggctgcggggacgctcccggagccctgcctgttccctgtccatccaggccagcagctgaaggagcctcacctgcctcccttctctgagtagcacggatttgaggccgttcctccccagctgtgatgcagccccctccaggcatgccactgccccctgcggacattggccccccaccctatgagccgccgggtcacccaatgccccagcctggcttcatcccaccacacatgagtgcagatggcacctacatgcctccgggtttctaccctcctccaggcccccacccacccatgggctactaccccccagggccctacacgccagggccctaccctggccctgggggccacacagccacagtcctggtcccttcaggagctgccaccacggtgacagtgctgcagggagagatctttgagggagcgcctgtgcagacggtgtgtccccactgccagcaggccatcaccaccaagatctcctacgagattggcttgatgaatttcgtgctgggtttcttctgttgcttcatgggatgtgatctgggctgctgcctgatcccctgcctcatcaatgacttcaaggatgtgacgcacacatgccccagctgcaaagcctacatctacacgtacaagcgcctgtgctaacggagctgggactcgggactcccccgcctgtcagtctggccccctgtgctttgctccctgcgctcagtggtcactttcccgctcccacttggggctgggagccgtgccaccatcccctagaagtcctgtcctcttcaccctgccctacctgagccgctgactcttctggcaaaaattctgttgggatttaaggccaagggtcagtgggtggcagggggctggcaatgagcttgtgtgttgttggtctgcttggtgtgtgtgatcgggaagataagctgggaggggtctcctgctggggtcctgatgcctctgtttccaaacaaggtacaggttcagtccagactctttccccctgggaccaacagcagccagagcagtttagccagttagtccccaggcctgtggccacaggcgtttctgacctgctgggccgagaatgggtaagttgtctggagtcaggtgggcccacgtaggacagggtcacaaagcctgggtttgtttctgggtactttgcgcctctggggtgctagaggtggggcatggtggctggaagtaaaactgccaactctggccctcagaactctcaggtatagaagcccaggatgtctaataccctgtcccagtgcccgagagctgcctggtgtcaggtagagaggacactgtacctgggtgaatgatcagaccctggtagctaagaaggaacttgtccctttgagtcagtgtgcagaccccctttcaggccatgcctctgtgaaccctgtattgctggggccggaaggagcccctgagcctagccccttcccgtctgccctgtgtcctcactgcgtgtgggtatgacctctgcctggtggctggtgtatcccaactgggcaagagatggcagagggtcccccttgtgggtgcgcttggatgtgcagagccttctccatggattttcttccctgtaagtgccgggcccctcaccccagctgacaggctgttgctgtgcctgctcacacctgctcctgcaggcacactgggctagggacgaggaaggagcagccacaagtggtagaactgccttggtggacaccagcctcgccctgtctttatttcctgaatggtttgtgaacttgctcacctggaccactgtatcctgccactgtccttcctggtctcgcactgccactgcatggcctcctgtcactgtgaatcgtggcccagtctcagtttgtagtttctcattaaattggccctttcactcccccgccctgggcctctgctctcttgcctggcttccttcttttttgagggaaagagggtggggctgcaggcagtctactggcaggacgggaggctgagtcctcagggtctcacaccctcagtgctgatgccatgccaactgcctgggacaacaccaacacgtaaggacctaattaaaccaaaccagagtcgggtgtagaccagccctgggatttccagctgtgactgggccagggcacacgttggtctcggcagtggctgtaaggtcaccttccttcctctgatgctggtttcaaccatctatatatggcatccacgcatgggatctgcaagctggagccctcctacccgcaggcttgagcacagcatcatccagccctggggaggcgcacccttaagcaagacagactgggctgaggctgacaggcagaagactaacagagcgcagtctgcacacgcaggttctgggcgacctctggccctggccatctctgcactaactcatctgaattatgaaggtggcagtcttggtcagtagtttaaagagtttccctactttttaaccctttttgaaataaaacttttacaggtagtagattcctattaataaaattatttaagttca

SEQ ID NO: 360830 - DNA, 2462 bp, Homo sapiens
ggtccaaagtctacccgcctccttgtgacagaagtgcgactgccagctgccgaggcgttcggtcctgctgttgcggccgctgccccagggctgcggggacgctcccggagccctgcctgttccctgtccatccaggccagcagctgaaggagcctcacctgcctcccttctctgagtagcacggatttgaggagaagcagcgaagatgtccagcgagcctccccctccttatcctgggggccccacagccccacttctggaagagaaaagtggagccccgcccaccccaggccgttcctccccagctgtgatgcagccccctccaggagctgccaccacggtgacagtgctgcagggagagatctttgagggagcgcctgtgcagacggtgtgtccccactgccagcaggccatcaccaccaagatctcctacgagattggcttgatgaatttcgtgctgggtttcttctgttgcttcatgggatgtgatctgggctgctgcctgatcccctgcctcatcaatgacttcaaggatgtgacgcacacatgccccagctgcaaagcctacatctacacgtacaagcgcctgtgctaacggagctgggactcgggactcccccgcctgtcagtctggccccctgtgctttgctccctgcgctcagtggtcactttcccgctcccacttggggctgggagccgtgccaccatcccctagaagtcctgtcctcttcaccctgccctacctgagccgctgactcttctggcaaaaattctgttgggatttaaggccaagggtcagtgggtggcagggggctggcaatgagcttgtgtgttgttggtctgcttggtgtgtgtgatcgggaagataagctgggaggggtctcctgctggggtcctgatgcctctgtttccaaacaaggtacaggttcagtccagactctttccccctgggaccaacagcagccagagcagtttagccagttagtccccaggcctgtggccacaggcgtttctgacctgctgggccgagaatgggtaagttgtctggagtcaggtgggcccacgtaggacagggtcacaaagcctgggtttgtttctgggtactttgcgcctctggggtgctagaggtggggcatggtggctggaagtaaaactgccaactctggccctcagaactctcaggtatagaagcccaggatgtctaataccctgtcccagtgcccgagagctgcctggtgtcaggtagagaggacactgtacctgggtgaatgatcagaccctggtagctaagaaggaacttgtccctttgagtcagtgtgcagaccccctttcaggccatgcctctgtgaaccctgtattgctggggccggaaggagcccctgagcctagccccttcccgtctgccctgtgtcctcactgcgtgtgggtatgacctctgcctggtggctggtgtatcccaactgggcaagagatggcagagggtcccccttgtgggtgcgcttggatgtgcagagccttctccatggattttcttccctgtaagtgccgggcccctcaccccagctgacaggctgttgctgtgcctgctcacacctgctcctgcaggcacactgggctagggacgaggaaggagcagccacaagtggtagaactgccttggtggacaccagcctcgccctgtctttatttcctgaatggtttgtgaacttgctcacctggaccactgtatcctgccactgtccttcctggtctcgcactgccactgcatggcctcctgtcactgtgaatcgtggcccagtctcagtttgtagtttctcattaaattggccctttcactcccccgccctgggcctctgctctcttgcctggcttccttcttttttgagggaaagagggtggggctgcaggcagtctactggcaggacgggaggctgagtcctcagggtctcacaccctcagtgctgatgccatgccaactgcctgggacaacaccaacacgtaaggacctaattaaaccaaaccagagtcgggtgtagaccagccctgggatttccagctgtgactgggccagggcacacgttggtctcggcagtggctgtaaggtcaccttccttcctctgatgctggtttcaaccatctatatatggcatccacgcatgggatctgcaagctggagccctcctacccgcaggcttgagcacagcatcatccagccctggggaggcgcacccttaagcaagacagactgggctgaggctgacaggcagaagactaacagagcgcagtctgcacacgcaggttctgggcgacctctggccctggccatctctgcactaactcatctgaattatgaaggtggcagtcttggtcagtagtttaaagagtttccctactttttaaccctttttgaaataaaacttttacaggtagtagattcctattaataaaattatttaagttca

SEQ ID NO: 360831 - DNA, 2291 bp, Homo sapiens
ggtccaaagtctacccgcctccttgtgacagaagtgcgactgccagctgccgaggcgttcggtcctgctgttgcggccgctgccccagggctgcggggacgctcccggagccctgcctgttccctgtccatccaggccagcagctgaaggagcctcacctgcctcccttctctgagtagcacggatttgaggagaagcagcgaagatgtccagcgagcctccccctccttatcctgggggccccacagccccacttctggaagagaaaagtggagccccgcccaccccaggccgttcctccccagctgtgatgcagccccctccaggcatgccactgccccctgcggacattggccccccaccctatgagccgccgggtcacccaatgccccagcctggcttcatcccaccacacatgagtgcagatggcacctacatgcctccgggtttctaccctcctccaggcccccacccacccatgggctactaccccccagggccctacacgccagggccctaccctggccctgggggccacacagccacagtcctggtcccttcaggagctgccaccacggtgacagtgctgcagggagagatctttgagggagcgcctgtgcagacggtgtgtccccactgccagcaggccatcaccaccaagatctcctacgagattggcttgatgaatttcgtgctgggtttcttctgttgcttcatgggatgtgatctgggctgctgcctgatcccctgcctcatcaatgacttcaaggatgtgacgcacacatgccccagctgcaaagcctacatctacacgtacaagcgcctgtgctaacggagctgggactcgggactcccccgcctgtcagtctggccccctgtgctttgctccctgcgctcagtggtcactttcccgctcccacttggggctgggagccgtgccaccatcccctagaagtcctgtcctcttcaccctgccctacctgagccgctgactcttctggcaaaaattctgttgggatttaaggccaagggtcagtgggtggcagggggctggcaatgagcttgtgtgttgttggtctgcttggtgtgtgtgatcgggaagataagctgggaggggtctcctgctggggtcctgatgcctctgtttccaaacaaggtacaggttcagtccagactctttccccctgggaccaacagcagccagagcagtttagccagttagtccccaggcctgtggccacaggcgtttctgacctgctgggccgagaatgggtaagttgtctggagtcaggtgggcccacgtaggacagggtcacaaagcctgggtttgtttctgggtactttgcgcctctggggtgctagaggtggggcatggtggctggaagtaaaactgccaactctggccctcagaactctcaggtatagaagcccaggatgtctaataccctgtcccagtgcccgagagctgcctggtgtcaggtagagaggacactgtacctgggtgaatgatcagaccctggtagctaagaaggaacttgtccctttgagtcagtgtgcagaccccctttcaggccatgcctctgtgaacccgctgacaggcagaagactaacagagcgcagtctgcacacgcaggttctgggcgacctctggccctggccatctctgcactaactcatctgaattatgaaggtggcagtcttggtcagtagtttaaagagtttccctactttttaaccctttttgaaataaaacttttacaggtagtagattcctattaataaaattatttaagttcaaagttcatgtttctcttttagagaatgaattgtttaaatacaaatatgtgcttttttaaaacccttatttttaaatatatatatatattttaaaaaaaccttttaagtaggaaacctctaaggtatttctgagctaaaaaatagcagtgctggatacactttaaagatctttgcaagacggttagagtgactttgctttggagactagaggtgctggagagtagacccagagcaggaggtggctgctgggagccatgatggacgatgtccactccccacacagacataacatgcccttgcttctgagggactctcctatggggaggtggcttgacccacccggtgccaggaggcagggaaggaggtagcttgcaaagcccactttattgagtgctggagcatttacacagcgcggaggaggagataagctggggctgagcaaaccgcacccaaggggttagagggattctgggtgagagggatgagctcccaag

SEQ ID NO: 360832 - DNA, 1471 bp, Homo sapiens
ggtccaaagtctacccgcctccttgtgacagaagtgcgactgccagctgccgaggcgttcggtcctgctgttgcggccgctgccccagggctgcggggacgctcccggagccctgcctgttccctgtccatccaggccagcagctgaaggagcctcacctgcctcccttctctgagtagcacggatttgaggtatagaagcccaggatgtctaataccctgtcccagtgcccgagagctgcctggtgtcaggtagagaggacactgtacctgggtgaatgatcagaccctggtagctaagaaggaacttgtccctttgagtcagtgtgcagaccccctttcaggccatgcctctgtgaaccctgtattgctggggccggaaggagcccctgagcctagccccttcccgtctgccctgtgtcctcactgcgtgtgggtatgacctctgcctggtggctggtgtatcccaactgggcaagagatggcagagggtcccccttgtgggtgcgcttggatgtgcagagccttctccatggattttcttccctgtaagtgccgggcccctcaccccagctgacaggctgttgctgtgcctgctcacacctgctcctgcaggcacactgggctagggacgaggaaggagcagccacaagtggtagaactgccttggtggacaccagcctcgccctgtctttatttcctgaatggtttgtgaacttgctcacctggaccactgtatcctgccactgtccttcctggtctcgcactgccactgcatggcctcctgtcactgtgaatcgtggcccagtctcagtttgtagtttctcattaaattggccctttcactcccccgccctgggcctctgctctcttgcctggcttccttcttttttgagggaaagagggtggggctgcaggcagtctactggcaggacgggaggctgagtcctcagggtctcacaccctcagtgctgatgccatgccaactgcctgggacaacaccaacacgtaaggacctaattaaaccaaaccagagtcgggtgtagaccagccctgggatttccagctgtgactgggccagggcacacgttggtctcggcagtggctgtaaggtcaccttccttcctctgatgctggtttcaaccatctatatatggcatccacgcatgggatctgcaagctggagccctcctacccgcaggcttgagcacagcatcatccagccctggggaggcgcacccttaagcaagacagactgggctgaggctgacaggcagaagactaacagagcgcagtctgcacacgcaggttctgggcgacctctggccctggccatctctgcactaactcatctgaattatgaaggtggcagtcttggtcagtagtttaaagagtttccctactttttaaccctttttgaaataaaacttttacaggtagtagattcctattaataaaattatttaagttca

SEQ ID NO: 360833 - DNA, 2081 bp, Homo sapiens
ggtccaaagtctacccgcctccttgtgacagaagtgcgactgccagctgccgaggcgttcggtcctgctgttgcggccgctgccccagggctgcggggacgctcccggagccctgcctgttccctgtccatccaggccagcagctgaaggagcctcacctgcctcccttctctgagtagcacggatttgaggagaagcagcgaagatgtccagcgagcctccccctccttatcctgggggccccacagccccacttctggaagagaaaagtggagccccgcccaccccaggccgttcctccccagctgtgatgcagccccctccaggcatgccactgccccctgcggacattggccccccaccctatgagccgccgggtcacccaatgccccagcctggcttcatcccaccacacatgagtgcagatggcacctacatgcctccgggtttctaccctcctccaggcccccacccacccatgggctactaccccccagggccctacacgccagggccctaccctggccctgggggccacacagccacagtcctggtcccttcaggagctgccaccacggtgacagtgctgcagggagagatctttgagggagcgcctgtgcagacggtgtgtccccactgccagcaggccatcaccaccaagatctcctacgagattggcttgatgaatttcgtgctgggtttcttctgttgcttcatgggatgtgatctgggctgctgcctgatcccctgcctcatcaatgacttcaaggatgtgacgcacacatgccccagctgcaaagcctacatctacacgtacaagcgcctgtgctaacggagctgggactcgggactcccccgcctgtcagtctggccccctgtgctttgctccctgcgctcagtggtcactttcccgctcccacttggggctgggagccgtgccaccatcccctagaagtcctgtcctcttcaccctgccctacctgagccgctgactcttctggcaaaaattctgttgggatttaaggccaagggtcagtgggtggcagggggctggcaatgagcttgtgtgttgttggtctgcttggtgtgtgtgatcgggaagataagctgggaggggtctcctgctggggtcctgatgcctctgtttccaaacaaggtacaggttcagtccagactctttccccctgggaccaacagcagccagagcagtttagccagttagtccccaggcctgtggccacaggcgtttctgacctgctgggccgagaatgggtaagttgtctggagtcaggtgggcccacgtaggacagggtcacaaagcctgggtttgtttctgggtactttgcgcctctggggtgctagaggtggggcatggtggctggaagtaaaactgccaactctggccctcagaactctcaggtatagaagcccaggatgtctaataccctgtcccagtgcccgagagctgcctggtgtcaggtagagaggacactgtacctgggtgaatgatcagaccctggtagctaagaaggaacttgtccctttgagtcagtgtgcagaccccctttcaggccatgcctctgtgaaccctgtattgctggggccggaaggagcccctgagcctagccccttcccgtctgccctgtgtcctcactgcgtgtgggtatgacctctgcctggtggctggtgtatcccaactgggcaagagatggcagagggtcccccttgtgggtgcgcttggatgtgcagagccttctccatggattttcttccctgtaagtgccgggcccctcaccccagctgacaggctgttgctgtgcctgctcacacctgctcctgcaggcacactgggctagggacgaggaaggagcagccacaagtggtagaactgccttggtggacaccagcctcgccctgtctttatttcctgaatggtttgtgaacttgctcacctggaccactgtatcctgccactgtccttcctggtctcgcactgccactgcatggcctcctgtcactgtgaatcgtggcccagtctcagtttgtagtttctcattaaattggccctttcactcccccgc

SEQ ID NO: 360834 - DNA, 763 bp, Homo sapiens
agcaaagcagaaagccctgttcctggctggatgcctgggacctgcctcctggggacagaggagcccctctgaggccagctggcgtcctgacgccatggctgccacgtggctcccggagccctgcctgttccctgtccatccaggccagcagctgaaggagcctcacctgcctcccttctctgagtagcacggatttgaggagaagcagcgaagatgtccagcgagcctccccctccttatcctgggggccccacagccccacttctggaagagaaaagtggagccccgcccaccccaggaggccatgccgccccgagctgtgcatggagaagccgcacccacgggcatgaccgacagcaccgcgtagagacaacacccgggcaagacctatgccacaacagaagacacaccagccgcgcgcacactcacgaaacgcaggacccccaaacaagacaccacaacaaccaaggacaagataaaaaaagcaaaacacaagaacacacgacacaaacgacacgacaagacacaaacacaaccacaaccacgagcacacaaccaacccaccaagacgcgcaaacacacacaccccaacaccacacacaccacgcaacccaaaaaagacagcgcaggcacgacgaccaacaaaaagcgaacaaacaaagacacacacccaccagcgagagcccgcaaacacgcacagaaagagaggagaagagaaggcgagcagaaacaacaccacccacaaaacaacacaaacacaacc

SEQ ID NO: 360835 - DNA, 2736 bp, Homo sapiens
ggtggggtgggcggtgggttggggggtttcgttgtgcgcgcaaagccgcgcggggctgagggtcttgttctgccggcgcctgtccggacccgggcccctctccgctttcggccggcctcgggcaccgggcttctggagctcccggagccctgcctgttccctgtccatccaggccagcagctgaaggagcctcacctgcctcccttctctgagtagcacggatttgaggagaagcagcgaagatgtccagcgagcctccccctccttatcctgggggccccacagccccacttctggaagagaaaagtggagccccgcccaccccaggccgttcctccccagctgtgatgcagccccctccaggcatgccactgccccctgcggacattggccccccaccctatgagccgccgggtcacccaatgccccagcctggcttcatcccaccacacatgagtgcagatggcacctacatgcctccgggtttctaccctcctccaggcccccacccacccatgggctactaccccccagggccctacacgccagggccctaccctggccctgggggccacacagccacagtcctggtcccttcaggagctgccaccacggtgacagtgctgcagggagagatctttgagggagcgcctgtgcagacggtgtgtccccactgccagcaggccatcaccaccaagatctcctacgagattggcttgatgaatttcgtgctgggtttcttctgttgcttcatgggatgtgatctgggctgctgcctgatcccctgcctcatcaatgacttcaaggatgtgacgcacacatgccccagctgcaaagcctacatctacacgtacaagcgcctgtgctaacggagctgggactcgggactcccccgcctgtcagtctggccccctgtgctttgctccctgcgctcagtggtcactttcccgctcccacttggggctgggagccgtgccaccatcccctagaagtcctgtcctcttcaccctgccctacctgagccgctgactcttctggcaaaaattctgttgggatttaaggccaagggtcagtgggtggcagggggctggcaatgagcttgtgtgttgttggtctgcttggtgtgtgtgatcgggaagataagctgggaggggtctcctgctggggtcctgatgcctctgtttccaaacaaggtacaggttcagtccagactctttccccctgggaccaacagcagccagagcagtttagccagttagtccccaggcctgtggccacaggcgtttctgacctgctgggccgagaatgggtaagttgtctggagtcaggtgggcccacgtaggacagggtcacaaagcctgggtttgtttctgggtactttgcgcctctggggtgctagaggtggggcatggtggctggaagtaaaactgccaactctggccctcagaactctcaggtatagaagcccaggatgtctaataccctgtcccagtgcccgagagctgcctggtgtcaggtagagaggacactgtacctgggtgaatgatcagaccctggtagctaagaaggaacttgtccctttgagtcagtgtgcagaccccctttcaggccatgcctctgtgaaccctgtattgctggggccggaaggagcccctgagcctagccccttcccgtctgccctgtgtcctcactgcgtgtgggtatgacctctgcctggtggctggtgtatcccaactgggcaagagatggcagagggtcccccttgtgggtgcgcttggatgtgcagagccttctccatggattttcttccctgtaagtgccgggcccctcaccccagctgacaggctgttgctgtgcctgctcacacctgctcctgcaggcacactgggctagggacgaggaaggagcagccacaagtggtagaactgccttggtggacaccagcctcgccctgtctttatttcctgaatggtttgtgaacttgctcacctggaccactgtatcctgccactgtccttcctggtctcgcactgccactgcatggcctcctgtcactgtgaatcgtggcccagtctcagtttgtagtttctcattaaattggccctttcactcccccgccctgggcctctgctctcttgcctggcttccttcttttttgagggaaagagggtggggctgcaggcagtctactggcaggacgggaggctgagtcctcagggtctcacaccctcagtgctgatgccatgccaactgcctgggacaacaccaacacgtaaggacctaattaaaccaaaccagagtcgggtgtagaccagccctgggatttccagctgtgactgggccagggcacacgttggtctcggcagtggctgtaaggtcaccttccttcctctgatgctggtttcaaccatctatatatggcatccacgcatgggatctgcaagctggagccctcctacccgcaggcttgagcacagcatcatccagccctggggaggcgcacccttaagcaagacagactgggctgaggctgacaggcagaagactaacagagcgcagtctgcacacgcaggttctgggcgacctctggccctggccatctctgcactaactcatctgaattatgaaggtggcagtcttggtcagtagtttaaagagtttccctactttttaaccctttttgaaataaaacttttacaggtagtagattcctattaataaaattatttaagttca

SEQ ID NO: 360836 - DNA, 2637 bp, Homo sapiens
ggtggggtgggcggtgggttggggggtttcgttgtgcgcgcaaagccgcgcggggctgagggtcttgttctgccggcgcctgtccggacccgggcccctctccgctttcggccggcctcgggcaccgggcttctggagctcccggagccctgcctgttccctgtccatccaggccagcagctgaaggagcctcacctgcctcccttctctgagtagcacggatttgaggccgttcctccccagctgtgatgcagccccctccaggcatgccactgccccctgcggacattggccccccaccctatgagccgccgggtcacccaatgccccagcctggcttcatcccaccacacatgagtgcagatggcacctacatgcctccgggtttctaccctcctccaggcccccacccacccatgggctactaccccccagggccctacacgccagggccctaccctggccctgggggccacacagccacagtcctggtcccttcaggagctgccaccacggtgacagtgctgcagggagagatctttgagggagcgcctgtgcagacggtgtgtccccactgccagcaggccatcaccaccaagatctcctacgagattggcttgatgaatttcgtgctgggtttcttctgttgcttcatgggatgtgatctgggctgctgcctgatcccctgcctcatcaatgacttcaaggatgtgacgcacacatgccccagctgcaaagcctacatctacacgtacaagcgcctgtgctaacggagctgggactcgggactcccccgcctgtcagtctggccccctgtgctttgctccctgcgctcagtggtcactttcccgctcccacttggggctgggagccgtgccaccatcccctagaagtcctgtcctcttcaccctgccctacctgagccgctgactcttctggcaaaaattctgttgggatttaaggccaagggtcagtgggtggcagggggctggcaatgagcttgtgtgttgttggtctgcttggtgtgtgtgatcgggaagataagctgggaggggtctcctgctggggtcctgatgcctctgtttccaaacaaggtacaggttcagtccagactctttccccctgggaccaacagcagccagagcagtttagccagttagtccccaggcctgtggccacaggcgtttctgacctgctgggccgagaatgggtaagttgtctggagtcaggtgggcccacgtaggacagggtcacaaagcctgggtttgtttctgggtactttgcgcctctggggtgctagaggtggggcatggtggctggaagtaaaactgccaactctggccctcagaactctcaggtatagaagcccaggatgtctaataccctgtcccagtgcccgagagctgcctggtgtcaggtagagaggacactgtacctgggtgaatgatcagaccctggtagctaagaaggaacttgtccctttgagtcagtgtgcagaccccctttcaggccatgcctctgtgaaccctgtattgctggggccggaaggagcccctgagcctagccccttcccgtctgccctgtgtcctcactgcgtgtgggtatgacctctgcctggtggctggtgtatcccaactgggcaagagatggcagagggtcccccttgtgggtgcgcttggatgtgcagagccttctccatggattttcttccctgtaagtgccgggcccctcaccccagctgacaggctgttgctgtgcctgctcacacctgctcctgcaggcacactgggctagggacgaggaaggagcagccacaagtggtagaactgccttggtggacaccagcctcgccctgtctttatttcctgaatggtttgtgaacttgctcacctggaccactgtatcctgccactgtccttcctggtctcgcactgccactgcatggcctcctgtcactgtgaatcgtggcccagtctcagtttgtagtttctcattaaattggccctttcactcccccgccctgggcctctgctctcttgcctggcttccttcttttttgagggaaagagggtggggctgcaggcagtctactggcaggacgggaggctgagtcctcagggtctcacaccctcagtgctgatgccatgccaactgcctgggacaacaccaacacgtaaggacctaattaaaccaaaccagagtcgggtgtagaccagccctgggatttccagctgtgactgggccagggcacacgttggtctcggcagtggctgtaaggtcaccttccttcctctgatgctggtttcaaccatctatatatggcatccacgcatgggatctgcaagctggagccctcctacccgcaggcttgagcacagcatcatccagccctggggaggcgcacccttaagcaagacagactgggctgaggctgacaggcagaagactaacagagcgcagtctgcacacgcaggttctgggcgacctctggccctggccatctctgcactaactcatctgaattatgaaggtggcagtcttggtcagtagtttaaagagtttccctactttttaaccctttttgaaataaaacttttacaggtagtagattcctattaataaaattatttaagttca

SEQ ID NO: 360837 - DNA, 3193 bp, Homo sapiens
ggtccaaagtctacccgcctccttgtgacagaagtgcgactgccagctgccgaggcgttcggtcctgctgttgcggccgctgccccagggctgcggggacgctcccggagccctgcctgttccctgtccatccaggccagcagctgaaggagcctcacctgcctcccttctctgagtagcacggatttgaggagaagcagcgaagatgtccagcgagcctccccctccttatcctgggggccccacagccccacttctggaagagaaaagtggagccccgcccaccccaggccgttcctccccagctgtgatgcagccccctccaggcatgccactgccccctgcggacattggccccccaccctatgagccgccgggtcacccaatgccccagcctggcttcatcccaccacacatgagtgcagatggcacctacatgcctccgggtttctaccctcctccaggcccccacccacccatgggctactaccccccagggccctacacgccagggccctaccctggccctgggggccacacagccacagtcctggtcccttcaggagctgccaccacggtgacagtgctgcagggagagatctttgagggagcgcctgtgcagacggtgtgtccccactgccagcaggccatcaccaccaagatctcctacgagattggcttgatgaatttcgtgctgggtttcttctgttgcttcatgggatgtgatctgggctgctgcctgatcccctgcctcatcaatgacttcaaggatgtgacgcacacatgccccagctgcaaagcctacatctacacgtacaagcgcctgtgctaacggagctgggactcgggactcccccgcctgtcagtctggccccctgtgctttgctccctgcgctcagtggtcactttcccgctcccacttggggctgggagccgtgccaccatcccctagaagtcctgtcctcttcaccctgccctacctgagccgctgactcttctggcaaaaattctgttgggatttaaggccaagggtcagtgggtggcagggggctggcaatgagcttgtgtgttgttggtctgcttggtgtgtgtgatcgggaagataagctgggaggggtctcctgctggggtcctgatgcctctgtttccaaacaaggtacaggttcagtccagactctttccccctgggaccaacagcagccagagcagtttagccagttagtccccaggcctgtggccacaggcgtttctgacctgctgggccgagaatgggtaagttgtctggagtcaggtgggcccacgtaggacagggtcacaaagcctgggtttgtttctgggtactttgcgcctctggggtgctagaggtggggcatggtggctggaagtaaaactgccaactctggccctcagaactctcaggtatagaagcccaggatgtctaataccctgtcccagtgcccgagagctgcctggtgtcaggtagagaggacactgtacctgggtgaatgatcagaccctggtagctaagaaggaacttgtccctttgagtcagtgtgcagaccccctttcaggccatgcctctgtgaaccctgtattgctggggccggaaggagcccctgagcctagccccttcccgtctgccctgtgtcctcactgcgtgtgggtatgacctctgcctggtggctggtgtatcccaactgggcaagagatggcagagggtcccccttgtgggtgcgcttggatgtgcagagccttctccatggattttcttccctgtaagtgccgggcccctcaccccagctgacaggctgttgctgtgcctgctcacacctgctcctgcaggcacactgggctagggacgaggaaggagcagccacaagtggtagaactgccttggtggacaccagcctcgccctgtctttatttcctgaatggtttgtgaacttgctcacctggaccactgtatcctgccactgtccttcctggtctcgcactgccactgcatggcctcctgtcactgtgaatcgtggcccagtctcagtttgtagtttctcattaaattggccctttcactcccccgccctgggcctctgctctcttgcctggcttccttcttttttgagggaaagagggtggggctgcaggcagtctactggcaggacgggaggctgagtcctcagggtctcacaccctcagtgctgatgccatgccaactgcctgggacaacaccaacacgtaaggacctaattaaaccaaaccagagtcgggtgtagaccagccctgggatttccagctgtgactgggccagggcacacgttggtctcggcagtggctgtaaggtcaccttccttcctctgatgctggtttcaaccatctatatatggcatccacgcatgggatctgcaagctggagccctcctacccgcaggcttgagcacagcatcatccagccctggggaggcgcacccttaagcaagacagactgggctgaggctgacaggcagaagactaacagagcgcagtctgcacacgcaggttctgggcgacctctggccctggccatctctgcactaactcatctgaattatgaaggtggcagtcttggtcagtagtttaaagagtttccctactttttaaccctttttgaaataaaacttttacaggtagtagattcctattaataaaattatttaagttcaaagttcatgtttctcttttagagaatgaattgtttaaatacaaatatgtgcttttttaaaacccttatttttaaatatatatatatattttaaaaaaaccttttaagtaggaaacctctaaggtatttctgagctaaaaaatagcagtgctggatacactttaaagatctttgcaagacggttagagtgactttgctttggagactagaggtgctggagagtagacccagagcaggaggtggctgctgggagccatgatggacgatgtccactccccacacagacataacatgcccttgcttctgagggactctcctatggggaggtggcttgacccacccggtgccaggaggcagggaaggaggtagcttgcaaagcccactttattgagtgctggagcatttacacagcgcggaggaggagataagctggggctgagcaaaccgcacccaaggggttagagggattctgggtgagagggatgagctcccaag

SEQ ID NO: 360838 - DNA, 2147 bp, Homo sapiens
ggtggggtgggcggtgggttggggggtttcgttgtgcgcgcaaagccgcgcggggctgagggtcttgttctgccggcgcctgtccggacccgggcccctctccgctttcggccggcctcgggcaccgggcttctggagctcccggagccctgcctgttccctgtccatccaggccagcagctgaaggagcctcacctgcctcatcaatgacttcaaggatgtgacgcacacatgccccagctgcaaagcctacatctacacgtacaagcgcctgtgctaacggagctgggactcgggactcccccgcctgtcagtctggccccctgtgctttgctccctgcgctcagtggtcactttcccgctcccacttggggctgggagccgtgccaccatcccctagaagtcctgtcctcttcaccctgccctacctgagccgctgactcttctggcaaaaattctgttgggatttaaggccaagggtcagtgggtggcagggggctggcaatgagcttgtgtgttgttggtctgcttggtgtgtgtgatcgggaagataagctgggaggggtctcctgctggggtcctgatgcctctgtttccaaacaaggtacaggttcagtccagactctttccccctgggaccaacagcagccagagcagtttagccagttagtccccaggcctgtggccacaggcgtttctgacctgctgggccgagaatgggtaagttgtctggagtcaggtgggcccacgtaggacagggtcacaaagcctgggtttgtttctgggtactttgcgcctctggggtgctagaggtggggcatggtggctggaagtaaaactgccaactctggccctcagaactctcaggtatagaagcccaggatgtctaataccctgtcccagtgcccgagagctgcctggtgtcaggtagagaggacactgtacctgggtgaatgatcagaccctggtagctaagaaggaacttgtccctttgagtcagtgtgcagaccccctttcaggccatgcctctgtgaaccctgtattgctggggccggaaggagcccctgagcctagccccttcccgtctgccctgtgtcctcactgcgtgtgggtatgacctctgcctggtggctggtgtatcccaactgggcaagagatggcagagggtcccccttgtgggtgcgcttggatgtgcagagccttctccatggattttcttccctgtaagtgccgggcccctcaccccagctgacaggctgttgctgtgcctgctcacacctgctcctgcaggcacactgggctagggacgaggaaggagcagccacaagtggtagaactgccttggtggacaccagcctcgccctgtctttatttcctgaatggtttgtgaacttgctcacctggaccactgtatcctgccactgtccttcctggtctcgcactgccactgcatggcctcctgtcactgtgaatcgtggcccagtctcagtttgtagtttctcattaaattggccctttcactcccccgccctgggcctctgctctcttgcctggcttccttcttttttgagggaaagagggtggggctgcaggcagtctactggcaggacgggaggctgagtcctcagggtctcacaccctcagtgctgatgccatgccaactgcctgggacaacaccaacacgtaaggacctaattaaaccaaaccagagtcgggtgtagaccagccctgggatttccagctgtgactgggccagggcacacgttggtctcggcagtggctgtaaggtcaccttccttcctctgatgctggtttcaaccatctatatatggcatccacgcatgggatctgcaagctggagccctcctacccgcaggcttgagcacagcatcatccagccctggggaggcgcacccttaagcaagacagactgggctgaggctgacaggcagaagactaacagagcgcagtctgcacacgcaggttctgggcgacctctggccctggccatctctgcactaactcatctgaattatgaaggtggcagtcttggtcagtagtttaaagagtttccctactttttaaccctttttgaaataaaacttttacaggtagtagattcctattaataaaattatttaagttca

SEQ ID NO: 360839 - DNA, 102 bp, Homo sapiens
attgagtcctatggccatgggatagcacagagccatgactgccatgcttcaatggctgctgtcacagaagctctgagagatgtttttattctttgttttaag

SEQ ID NO: 360840 - DNA, 1422 bp, Homo sapiens
gatttcattttaactgtctttttaatttgtaaaatatatgagtatggaattttgtatctaacttgaaatttcagatgttttaataatccaaatacgttcttctttagcatgtcaaagtactaatagttaaaaaatttctttagatttaagcatatacattacttgactttttcaaaagtatcaaaaaattgatagctgcagaaatgccattatttgattttctaaaaaacattgattcattcttaaatgtgtattctttaaaaaatagtaaatacctcaagagtgacagaaaactttccttttctgttctgtaatgctaatttaaactttgagtcttagtttacatggtcataggggttaaataaaatgtataactgtacaattaattgtgttcttgtgacctgatgattttttgaaaatttgcttttctctttaagaaatttaagttttcaagggccgtattagttatctaaatattttgggctaatgttgacttataaataaataaaaatttagaaatatattcatgatgacaattttgttacttacactgcctattctttatttcttttttagttcaaaggtgaaattttgacctttgtattaacaaagcctcaagaaaagagaaattctgccttttaaacattggttttccttgcattttatggtggtgtgattttgcctcagcaataataaaacataaaatatgttgttgcatcaagttcagtttgtctgctgagattatttttaagaaccaggttgaagcctctatgcctaaaaaagcgtttattgtctggatacatataaagcaagatatatggctacaaataagtcttgcaaccaaaattggtatattaaaatttactgcacactttgagattgctgccattttttggtgctttttggacctcgtcataaagggatgtatcgtatattagggaaaattactcaagttacacattctacattaactgcgctgtattatctacaggtacaatcaatggaccaatagttcctaaattagtaataaggcttaccttacaaaagtaatgaaataacactgatatttctctttcaaaggctaacagcaattcttggtcctgagctattcagttcatacaataactactgtacatgctacaacatctgaatattaatggttttgctgcagattctgggtatgaggattagcttgaaagcaatacatttgctaacatgaatcatgactcacattatccccgtgtgctttactacctgtatatgaatgcaaatgttgttacagaaaatatgcttgaaatgtcaatacagtgtgcaattagcgttgcattgtcatgctccagcatgtgatatctgtatggtgaagttatttcaattactctgatacattactataataaaaaagtttaacctaagaaagctaca

SEQ ID NO: 360841 - DNA, 1633 bp, Homo sapiens
caagctttgtacttagatcttttacttagatctgctttttgtcttattctttttagtggatgtttccaaggattgtcttcagtcatggccttgggattaaagtgcttccgcatggtccaccctacctttcgcaattatcttgcagcctctatcagacccgtttcagaagttacactgaagacagtgcatgaaagacaacatggccataggcaatacatggcctattcagctgtaccagtccgccattttgctaccaagaaagccaaagccaaagggaaaggacagtcccaaaccagagtgaatattaatgctgccttggttgaggatataatcaacttggaagaggtgaatgaagaaatgaagtctgtgatagaagctctcaaggataatttcaataagactctcaatataaggacctcaccaggatcccttgacaagattgctgtggtaactgctgacgggaagcttgctttaaaccagattagccagatctccatgaagtcgccacagctgattttggtgaatatggccagcttcccagagactatgaagcaaataaaacaatactttaatgggccaaatgtggcctgagggccaccaatttgtgacctctgcattagtatttggagcagaccctccaggaagtccttttatactagactgaccattgcagaatattgcatggagcacagtgcttccaaaactggaaggaattggcctggattaggagtcttagagtacctggaatccggtcccatctctaccaccaactggctgtttgaccttgggcaagttgcttcactctctgggcctccatttcctcatctgctaatataagtgtacagctgcagctatcaaggctataagagaaagtggaatgaatctgaacccagaagtggaagggacgctaattcgggtacccattccccaagtaaccagagagcacagagaaatgctggtgaaactggccaaacagaacaccaacaaggccaaagactctttacggaaggttcgcaccaactcaatgaacaagctgaagaaatccaaggatacagtctcagaggacaccattaggctaatagagaaacagatcagccaaatggccgatgacacagtggcagaactggacaggcatctggcagtgaagaccaaagaactccttggatgaaagtccactggggccagcaatactccagagcccagtttctgctggatcccatgggtggcacattgggacttctctccctcccccatctacacagaagactgtcaccatgctgacagaagcctgtccttgtaaggcccagccttccaggggaacactcagacatgttcattctcttcctgcttctgctctgggccggtgggtggctctcagaaaatacttgctgctggcaaaaggcctgtactcaggcatttgctttgacttgatgttgccaagggactgaggccattggcaggcttagtaccacctgctcctcatcttaggagtctccttttcaaataattaggctctgttcccattttaaaactctgatattggccttcacctgtgactggacactttactagaggcccattttcactaaacaataaaatctaaataaattggaaggaataacaaccacaaagg

SEQ ID NO: 360842 - DNA, 1274 bp, Homo sapiens
tgtaagacctcttagcgggcccatcgctgaggtgcagggacatgtcgcggccgaactcacctcgtggcctcggcgtggtgctctcagctcatgcccggaaaccaggtcccgacgccgcggtcagacggacctctagacgcgtccgcctcaatgccgccagctgccaggccgcccgtgacgcgttaagcctgcgccgcctcctggcttcgtgacgtcacgacgtccgcgcagctgcggtcgccgccgtcgcacgagtctttccttagtaacctgggcgatagctgatgagacggaagtcctgagagtttgaccgatttaaggtcacgtgcctaggaagtgctggaaccaagactcggagttttctctaatggatgtttccaaggattgtcttcagtcatggccttgggattaaagtgcttccgcatggtccaccctacctttcgcaattatcttgcagcctctatcagacccgtttcagaagttacactgaagacagtgcatgaaagacaacatggccataggcaatacatggcctattcagctgtaccagtccgccattttgctaccaagaaagccaaagccaaagggaaaggacagtcccaaaccagagtgaatattaatgctgccttggttgaggatataatcaacttggaagaggtgaatgaagaaatgaagtctgtgatagaagctctcaaggataatttcaataagactctcaatataaggacctcaccaggatcccttgacaagattgctgtggtaactgctgacgggaagcttgctttaaaccagattagccagatctccatgaagtcgccacagctgattttggtgaatatggccagcttcccagagtaagatggccttgctaaaatctctctccgtggtctcttttggaatggaggagactgggtcatatcaggaggaagtgttccttcagcttaggatgaaacaagagagaagacataataaagagaacttaaggataaggcaaagctcttttcctgttgccagattccttttctgttaaactcagatgctacagaggctaggtaagttgtttgaatacccaaacgggtcccatctaagaaaaacaatactggagatgcagtgattggtgcttggccagcgtgaaaaggctctggtgagctggagagcctgtaccttgtgtgagtggaatgcctctgcccagctcctgctgatcattgccaggcacaatgtaggcctggtaatcagtgttacctgatactacgatttttatttccagaagaagc

SEQ ID NO: 360843 - DNA, 436 bp, Homo sapiens
ttaaggcttaggcttccttagtaacctgggcgaatgtggatgtttccaaggattgtcttcagtcatggccttgggattaaagtgcttccgcatggtccaccctacctttcgcaattatcttgcagcctctatcagacccgtttcagaagttacactgaagacagtgcatgaaagacaacatggccataggcaatacatggcctattcagctgtaccagtccgccattttgctaccaagaaagccaaaggtagagacatgtgacgttctctcctacttcacccctttcttatagttggcccttgaattatagctggcaggtatctcagatgtactgaatttctccccttgctaacatgaggaaatggtgcctcagctatttcattggattagcttaaaaggttacagtggcagagatggtgttataacccagtgcct

SEQ ID NO: 360844 - DNA, 2626 bp, Homo sapiens
tgtaagacctcttagcgggcccatcgctgaggtgcagggacatgtcgcggccgaactcacctcgtggcctcggcgtggtgctctcagctcatgcccggaaaccaggtcccgacgccgcggtcagacggacctctagacgcgtccgcctcaatgccgccagctgccaggccgcccgtgacgcgttaagcctgcgccgcctcctggcttcgtgacgtcacgacgtccgcgcagctgcggtcgccgccgtcgcacgagtctttccttagtaacctgggcgatagctgtggatgtttccaaggattgtcttcagtcatggccttgggattaaagtgcttccgcatggtccaccctacctttcgcaattatcttgcagcctctatcagacccgtttcagaagttacactgaagacagtgcatgaaagacaacatggccataggcaatacatggcctattcagctgtaccagtccgccattttgctaccaagaaagccaaagccaaagggaaaggacagtcccaaaccagagtgaatattaatgctgccttggttgaggatataatcaacttggaagaggtgaatgaagaaatgaagtctgtgatagaagctctcaaggataatttcaataagactctcaatataaggacctcaccaggatcccttgacaagattgctgtggtaactgctgacgggaagcttgctttaaaccagattagccagatctccatgaagtcgccacagctgattttggtgaatatggccagcttcccagagtgtacagctgcagctatcaaggctataagagaaagtggaatgaatctgaacccagaagtggaagggacgctaattcgggtacccattccccaagtaaccagagagcacagagaaatgctggtgaaactggccaaacagaacaccaacaaggccaaagactctttacggaaggttcgcaccaactcaatgaacaagctgaagaaatccaaggatacagtctcagaggacaccattaggctaatagagaaacagatcagccaaatggccgatgacacagtggcagaactggacaggcatctggcagtgaagaccaaagaactccttggatgaaagtccactggggccagcaatactccagagcccagtttctgctggatcccatgggtggcacattgggacttctctccctcccccatctacacagaagactgtcaccatgctgacagaagcctgtccttgtaaggcccagccttccaggggaacactcagacatgttcattctcttcctgcttctgctctgggccggtgggtggctctcagaaaatacttgctgctggcaaaaggcctgtactcaggcatttgctttgacttgatgttgccaagggactgaggccattggcaggcttagtaccacctgctcctcatcttaggagtctccttttcaaataattaggctctgttcccattttaaaactctgatattggccttcacctgtgactggacactttactagaggcccattttcactaaacaataaaatctaaataaattggaaggaataacaaccacaaaggaaagaatagagttggtctggattgatgatcactgaggatctgtatgtgaggcacccataacagtagttttgcctgtgagtcgtcttcacacatgctgttttctctgcctggctctctcttcccctccttacctggccagtcctgtttatcatcaggccttgtcttggatatcacgtcctctgggaagtcttcttttcccctctaacctaggaccctcattaccggctctcatagcacagtctactgctttgtacgaattctaagtattcttgttgcacttaattagcctgtatatcctcagaactttgtgtaatgcctggagcatagtaggcagtcatatgttgtatcgtgaataaattgcacatagtagctacccagcaaatgctgacttcttttctttctagtcttaacactccctttctatcattttccactcttgtacttgttctcaacatttacttggtagtgacatacctttcctgcagggcctgcccattgttgacagacaagtagtttattgtggcttatcttcggatactgggttattaggtttttttccctccaattattttttattcattcattcattcctaatatagccattatgagttaggtatagttctaggcattatttataatcttgacagtaaacttaagagatgtgtattatcttcatttacaaataggaaaactaagtcttgacagtattaggtaatttgcccaaagtaacaaagcaaagctgatcagtggtagaaggttttcatgattcattgtcagcgtcatttacatagaggtgaagtttcttgtgcagggttacacacctagcaagtagcagagctggcattcaaattgaggcctgatgtgctaatgtaaaaggaaaaaaacaaactttttttccttttgtactttcacactcaacatggaacacttctgtgacaaggtgtgtgagtttgtttcccccacacaccaagcaattctccagcagacaccaactgggtatcctataattcaattcatttctgacattacctggaaatagtgtcagatcccacaggttgag

SEQ ID NO: 360845 - DNA, 2029 bp, Homo sapiens
tgtaagacctcttagcgggcccatcgctgaggtgcagggacatgtcgcggccgaactcacctcgtggcctcggcgtggtgctctcagctcatgcccggaaaccaggtcccgacgccgcggtcagacggacctctagacgcgtccgcctcaatgccgccagctgccaggccgcccgtgacgcgttaagcctgcgccgcctcctggcttcgtgacgtcacgacgtccgcgcagctgcggtcgccgccgtcgcacgagtctttccttagtaacctgggcgatagctgatgagacggaagtcctgagagtttgaccgatttaaggtcacgtgcctaggaagtgctggaaccaagactcggagttttctctaatggatgtttccaaggattgtcttcagtcatggccttgggattaaagtgcttccgcatggtccaccctacctttcgcaattatcttgcagcctctatcagacccgtttcagaagttacactgaagacagtgcatgaaagacaacatggccataggcaatacatggcctattcagctgtaccagtccgccattttgctaccaagaaagccaaagccaaagggaaaggacagtcccaaaccagagtgaatattaatgctgccttggttgaggatataatcaacttggaagaggtgaatgaagaaatgaagtctgtgatagaagctctcaaggataatttcaataagactctcaatataaggacctcaccaggatcccttgacaagattgctgtggtaactgctgacgggaagcttgctttaaaccagattagccagatctccatgaagtcgccacagctgattttggtgaatatggccagcttcccagagtgtacagctgcagctatcaaggctataagagaaagtggaatgaatctgaacccagaagtggaagggacgctaattcgggtacccattccccaagtaaccagagagcacagagaaatgctggtgaaactggccaaacagaacaccaacaaggccaaagactctttacggaaggttcgcaccaactcaatgaacaagctgaagaaatccaaggatacagtctcagaggacaccattaggctaatagagaaacagatcagccaaatggccgatgacacagtggcagaactggacaggcatctggcagtgaagaccaaagaactccttggatgaaagtccactggggccagcaatactccagagcccagtttctgctggatcccatgggtggcacattgggacttctctccctcccccatctacacagaagactgtcaccatgctgacagaagcctgtccttgtaaggcccagccttccaggggaacactcagacatgttcattctcttcctgcttctgctctgggccggtgggtggctctcagaaaatacttgctgctggcaaaaggcctgtactcaggcatttgctttgacttgatgttgccaagggactgaggccattggcaggcttagtaccacctgctcctcatcttaggagtctccttttcaaataattaggctctgttcccattttaaaactctgatattggccttcacctgtgactggacactttactagaggcccattttcactaaacaataaaatctaaataaattggaaggaataacaaccacaaaggaaagaatagagttggtctggattgatgatcactgaggatctgtatgtgaggcacccataacagtagttttgcctgtgagtcgtcttcacacatgctgttttctctgcctggctctctcttcccctccttacctggccagtcctgtttatcatcaggccttgtcttggatatcacgtcctctgggaagtcttcttttcccctctaacctaggaccctcattaccggctctcatagcacagtctactgctttgtacgaattctaagtattcttgttgcacttaattagcctgtatatcctcagaactttgtgtaatgcctggagcatagtaggcagtcatatgttgtatcgtgaataaattgcacatagtagctacccagc

SEQ ID NO: 360846 - DNA, 2033 bp, Homo sapiens
cgcggggcactctacctaaatgaacctggtcatatactcggatccctacgaaattctggacattagagcgattggatgctcactaattaaaaaaagggctggaggcaaagtcggtgcttgaatcaatcccagatggaccttcagagggcattacagcatctagcagcatgagtccacatgaggtcgatactctaattttatctgcgcaaaggaatgaaaacctgatctgaccccttcattttatggttgaaacaaaatctacgtaggagaaatcacttggtacaagtcacaagtcagtggtagagctgccgcaaatgctttttgaatacgtgtgattatgaatctaaatggcagatggcagggagtgataagtggatgtttccaaggattgtcttcagtcatggccttgggattaaagtgcttccgcatggtccaccctacctttcgcaattatcttgcagcctctatcagacccgtttcagaagttacactgaagacagtgcatgaaagacaacatggccataggcaatacatggcctattcagctgtaccagtccgccattttgctaccaagaaagccaaagccaaagggaaaggacagtcccaaaccagagtgaatattaatgctgccttggttgaggatataatcaacttggaagaggtgaatgaagaaatgaagtctgtgatagaagctctcaaggataatttcaataagactctcaatataaggacctcaccaggatcccttgacaagattgctgtggtaactgctgacgggaagcttgctttaaaccagattagccagatctccatgaagtcgccacagctgattttggtgaatatggccagcttcccagagtgtacagctgcagctatcaaggctataagagaaagtggaatgaatctgaacccagaagtggaagggacgctaattcgggtacccattccccaagtaaccagagagcacagagaaatgctggtgaaactggccaaacagaacaccaacaaggccaaagactctttacggaaggttcgcaccaactcaatgaacaagctgaagaaatccaaggatacagtctcagaggacaccattaggctaatagagaaacagatcagccaaatggccgatgacacagtggcagaactggacaggcatctggcagtgaagaccaaagaactccttggatgaaagtccactggggccagcaatactccagagcccagtttctgctggatcccatgggtggcacattgggacttctctccctcccccatctacacagaagactgtcaccatgctgacagaagcctgtccttgtaaggcccagccttccaggggaacactcagacatgttcattctcttcctgcttctgctctgggccggtgggtggctctcagaaaatacttgctgctggcaaaaggcctgtactcaggcatttgctttgacttgatgttgccaagggactgaggccattggcaggcttagtaccacctgctcctcatcttaggagtctccttttcaaataattaggctctgttcccattttaaaactctgatattggccttcacctgtgactggacactttactagaggcccattttcactaaacaataaaatctaaataaattggaaggaataacaaccacaaaggaaagaatagagttggtctggattgatgatcactgaggatctgtatgtgaggcacccataacagtagttttgcctgtgagtcgtcttcacacatgctgttttctctgcctggctctctcttcccctccttacctggccagtcctgtttatcatcaggccttgtcttggatatcacgtcctctgggaagtcttcttttcccctctaacctaggaccctcattaccggctctcatagcacagtctactgctttgtacgaattctaagtattcttgttgcacttaattagcctgtatatcctcagaactttgtgtaatgcctggagcatagtaggcagtcatatgttgtatcgtgaataaattgcacatagtagctacccagc

SEQ ID NO: 360847 - DNA, 1697 bp, Homo sapiens
ttaaggcttaggcttccttagtaacctgggcgaatgtggatgtttccaaggattgtcttcagtcatggccttgggattaaagtgcttccgcatggtccaccctacctttcgcaattatcttgcagcctctatcagacccgtttcagaagttacactgaagacagtgcatgaaagacaacatggccataggcaatacatggcctattcagctgtaccagtccgccattttgctaccaagaaagccaaagccaaagggaaaggacagtcccaaaccagagtgaatattaatgctgccttggttgaggatataatcaacttggaagaggtgaatgaagaaatgaagtctgtgatagaagctctcaaggataatttcaataagactctcaatataaggacctcaccaggatcccttgacaagattgctgtggtaactgctgacgggaagcttgctttaaaccagattagccagatctccatgaagtcgccacagctgattttggtgaatatggccagcttcccagagtgtacagctgcagctatcaaggctataagagaaagtggaatgaatctgaacccagaagtggaagggacgctaattcgggtacccattccccaagtaaccagagagcacagagaaatgctggtgaaactggccaaacagaacaccaacaaggccaaagactctttacggaaggttcgcaccaactcaatgaacaagctgaagaaatccaaggatacagtctcagaggacaccattaggctaatagagaaacagatcagccaaatggccgatgacacagtggcagaactggacaggcatctggcagtgaagaccaaagaactccttggatgaaagtccactggggccagcaatactccagagcccagtttctgctggatcccatgggtggcacattgggacttctctccctcccccatctacacagaagactgtcaccatgctgacagaagcctgtccttgtaaggcccagccttccaggggaacactcagacatgttcattctcttcctgcttctgctctgggccggtgggtggctctcagaaaatacttgctgctggcaaaaggcctgtactcaggcatttgctttgacttgatgttgccaagggactgaggccattggcaggcttagtaccacctgctcctcatcttaggagtctccttttcaaataattaggctctgttcccattttaaaactctgatattggccttcacctgtgactggacactttactagaggcccattttcactaaacaataaaatctaaataaattggaaggaataacaaccacaaaggaaagaatagagttggtctggattgatgatcactgaggatctgtatgtgaggcacccataacagtagttttgcctgtgagtcgtcttcacacatgctgttttctctgcctggctctctcttcccctccttacctggccagtcctgtttatcatcaggccttgtcttggatatcacgtcctctgggaagtcttcttttcccctctaacctaggaccctcattaccggctctcatagcacagtctactgctttgtacgaattctaagtattcttgttgcacttaattagcctgtatatcctcagaactttgtgtaatgcctggagcatagtaggcagtcatatgttgtatcgtgaataaattgcacatagtagctacccagc

SEQ ID NO: 360848 - DNA, 2921 bp, Homo sapiens
tgtaagacctcttagcgggcccatcgctgaggtgcagggacatgtcgcggccgaactcacctcgtggcctcggcgtggtgctctcagctcatgcccggaaaccaggtcccgacgccgcggtcagacggacctctagacgcgtccgcctcaatgccgccagctgccaggccgcccgtgacgcgttaagcctgcgccgcctcctggcttcgtgacgtcacgacgtccgcgcagctgcggtcgccgccgtcgcacgagtctttccttagtaacctgggcgatagctgtggatgtttccaaggattgtcttcagtcatggccttgggattaaagtgcttccgcatggtccaccctacctttcgcaattatcttgcagcctctatcagacccgtttcagaagttacactgaagacagtgcatgaaagacaacatggccataggcaatacatggcctattcagctgtaccagtccgccattttgctaccaagaaagccaaagccaaagggaaaggacagtcccaaaccagagtgaatattaatgctgccttggttgaggatataatcaacttggaagaggtgaatgaagaaatgaagtctgtgatagaagctctcaaggataatttcaataagactctcaatataaggacctcaccaggatcccttgacaagattgctgtggtaactgctgacgggaagcttgctttaaaccagattagccagatctccatgaagtcgccacagctgattttggtgaatatggccagcttcccagagactatgaagcaaataaaacaatactttaatgggccaaatgtggcctgagggccaccaatttgtgacctctgcattagtatttggagcagaccctccaggaagtccttttatactagactgaccattgcagaatattgcatggagcacagtgcttccaaaactggaaggaattggcctggattaggagtcttagagtacctggaatccggtcccatctctaccaccaactggctgtttgaccttgggcaagttgcttcactctctgggcctccatttcctcatctgctaatataagtgtacagctgcagctatcaaggctataagagaaagtggaatgaatctgaacccagaagtggaagggacgctaattcgggtacccattccccaagtaaccagagagcacagagaaatgctggtgaaactggccaaacagaacaccaacaaggccaaagactctttacggaaggttcgcaccaactcaatgaacaagctgaagaaatccaaggatacagtctcagaggacaccattaggctaatagagaaacagatcagccaaatggccgatgacacagtggcagaactggacaggcatctggcagtgaagaccaaagaactccttggatgaaagtccactggggccagcaatactccagagcccagtttctgctggatcccatgggtggcacattgggacttctctccctcccccatctacacagaagactgtcaccatgctgacagaagcctgtccttgtaaggcccagccttccaggggaacactcagacatgttcattctcttcctgcttctgctctgggccggtgggtggctctcagaaaatacttgctgctggcaaaaggcctgtactcaggcatttgctttgacttgatgttgccaagggactgaggccattggcaggcttagtaccacctgctcctcatcttaggagtctccttttcaaataattaggctctgttcccattttaaaactctgatattggccttcacctgtgactggacactttactagaggcccattttcactaaacaataaaatctaaataaattggaaggaataacaaccacaaaggaaagaatagagttggtctggattgatgatcactgaggatctgtatgtgaggcacccataacagtagttttgcctgtgagtcgtcttcacacatgctgttttctctgcctggctctctcttcccctccttacctggccagtcctgtttatcatcaggccttgtcttggatatcacgtcctctgggaagtcttcttttcccctctaacctaggaccctcattaccggctctcatagcacagtctactgctttgtacgaattctaagtattcttgttgcacttaattagcctgtatatcctcagaactttgtgtaatgcctggagcatagtaggcagtcatatgttgtatcgtgaataaattgcacatagtagctacccagcaaatgctgacttcttttctttctagtcttaacactccctttctatcattttccactcttgtacttgttctcaacatttacttggtagtgacatacctttcctgcagggcctgcccattgttgacagacaagtagtttattgtggcttatcttcggatactgggttattaggtttttttccctccaattattttttattcattcattcattcctaatatagccattatgagttaggtatagttctaggcattatttataatcttgacagtaaacttaagagatgtgtattatcttcatttacaaataggaaaactaagtcttgacagtattaggtaatttgcccaaagtaacaaagcaaagctgatcagtggtagaaggttttcatgattcattgtcagcgtcatttacatagaggtgaagtttcttgtgcagggttacacacctagcaagtagcagagctggcattcaaattgaggcctgatgtgctaatgtaaaaggaaaaaaacaaactttttttccttttgtactttcacactcaacatggaacacttctgtgacaaggtgtgtgagtttgtttcccccacacaccaagcaattctccagcagacaccaactgggtatcctataattcaattcatttctgacattacctggaaatagtgtcagatcccacaggttgag

SEQ ID NO: 360849 - DNA, 2537 bp, Homo sapiens
tgtaagacctcttagcgggcccatcgctgaggtgcagggacatgtcgcggccgaactcacctcgtggcctcggcgtggtgctctcagctcatgcccggaaaccaggtcccgacgccgcggtcagacggacctctagacgcgtccgcctcaatgccgccagctgccaggccgcccgtgacgcgttaagcctgcgccgcctcctggcttcgtgacgtcacgacgtccgcgcagctgcggtcgccgccgtcgcacgagtctttccttagtaacctgggcgatagctgcctctatcagacccgtttcagaagttacactgaagacagtgcatgaaagacaacatggccataggcaatacatggcctattcagctgtaccagtccgccattttgctaccaagaaagccaaagccaaagggaaaggacagtcccaaaccagagtgaatattaatgctgccttggttgaggatataatcaacttggaagaggtgaatgaagaaatgaagtctgtgatagaagctctcaaggataatttcaataagactctcaatataaggacctcaccaggatcccttgacaagattgctgtggtaactgctgacgggaagcttgctttaaaccagattagccagatctccatgaagtcgccacagctgattttggtgaatatggccagcttcccagagtgtacagctgcagctatcaaggctataagagaaagtggaatgaatctgaacccagaagtggaagggacgctaattcgggtacccattccccaagtaaccagagagcacagagaaatgctggtgaaactggccaaacagaacaccaacaaggccaaagactctttacggaaggttcgcaccaactcaatgaacaagctgaagaaatccaaggatacagtctcagaggacaccattaggctaatagagaaacagatcagccaaatggccgatgacacagtggcagaactggacaggcatctggcagtgaagaccaaagaactccttggatgaaagtccactggggccagcaatactccagagcccagtttctgctggatcccatgggtggcacattgggacttctctccctcccccatctacacagaagactgtcaccatgctgacagaagcctgtccttgtaaggcccagccttccaggggaacactcagacatgttcattctcttcctgcttctgctctgggccggtgggtggctctcagaaaatacttgctgctggcaaaaggcctgtactcaggcatttgctttgacttgatgttgccaagggactgaggccattggcaggcttagtaccacctgctcctcatcttaggagtctccttttcaaataattaggctctgttcccattttaaaactctgatattggccttcacctgtgactggacactttactagaggcccattttcactaaacaataaaatctaaataaattggaaggaataacaaccacaaaggaaagaatagagttggtctggattgatgatcactgaggatctgtatgtgaggcacccataacagtagttttgcctgtgagtcgtcttcacacatgctgttttctctgcctggctctctcttcccctccttacctggccagtcctgtttatcatcaggccttgtcttggatatcacgtcctctgggaagtcttcttttcccctctaacctaggaccctcattaccggctctcatagcacagtctactgctttgtacgaattctaagtattcttgttgcacttaattagcctgtatatcctcagaactttgtgtaatgcctggagcatagtaggcagtcatatgttgtatcgtgaataaattgcacatagtagctacccagcaaatgctgacttcttttctttctagtcttaacactccctttctatcattttccactcttgtacttgttctcaacatttacttggtagtgacatacctttcctgcagggcctgcccattgttgacagacaagtagtttattgtggcttatcttcggatactgggttattaggtttttttccctccaattattttttattcattcattcattcctaatatagccattatgagttaggtatagttctaggcattatttataatcttgacagtaaacttaagagatgtgtattatcttcatttacaaataggaaaactaagtcttgacagtattaggtaatttgcccaaagtaacaaagcaaagctgatcagtggtagaaggttttcatgattcattgtcagcgtcatttacatagaggtgaagtttcttgtgcagggttacacacctagcaagtagcagagctggcattcaaattgaggcctgatgtgctaatgtaaaaggaaaaaaacaaactttttttccttttgtactttcacactcaacatggaacacttctgtgacaaggtgtgtgagtttgtttcccccacacaccaagcaattctccagcagacaccaactgggtatcctataattcaattcatttctgacattacctggaaatagtgtcagatcccacaggttgag

SEQ ID NO: 360850 - DNA, 2470 bp, Homo sapiens
tgtaagacctcttagcgggcccatcgctgaggtgcagggacatgtcgcggccgaactcacctcgtggcctcggcgtggtgctctcagctcatgcccggaaaccaggtcccgacgccgcggtcagacggacctctagacgcgtccgcctcaatgccgccagctgccaggccgcccgtgacgcgttaagcctgcgccgcctcctggcttcgtgacgtcacgacgtccgcgcagctgcggtcgccgccgtcgcacgagtctttccttagtaacctgggcgatagctgtggatgtttccaaggattgtcttcagtcatggccttgggattaaagtgcttccgcatggtccaccctacctttcgcaattatcttgcagcctctatcagacccgtttcagaagttacactgaagacagtgcatgaaagacaacatggccataggcaatacatggcctattcagctgtaccagtccgccattttgctaccaagaaagccaaaggatcccttgacaagattgctgtggtaactgctgacgggaagcttgctttaaaccagattagccagatctccatgaagtcgccacagctgattttggtgaatatggccagcttcccagagtgtacagctgcagctatcaaggctataagagaaagtggaatgaatctgaacccagaagtggaagggacgctaattcgggtacccattccccaagtaaccagagagcacagagaaatgctggtgaaactggccaaacagaacaccaacaaggccaaagactctttacggaaggttcgcaccaactcaatgaacaagctgaagaaatccaaggatacagtctcagaggacaccattaggctaatagagaaacagatcagccaaatggccgatgacacagtggcagaactggacaggcatctggcagtgaagaccaaagaactccttggatgaaagtccactggggccagcaatactccagagcccagtttctgctggatcccatgggtggcacattgggacttctctccctcccccatctacacagaagactgtcaccatgctgacagaagcctgtccttgtaaggcccagccttccaggggaacactcagacatgttcattctcttcctgcttctgctctgggccggtgggtggctctcagaaaatacttgctgctggcaaaaggcctgtactcaggcatttgctttgacttgatgttgccaagggactgaggccattggcaggcttagtaccacctgctcctcatcttaggagtctccttttcaaataattaggctctgttcccattttaaaactctgatattggccttcacctgtgactggacactttactagaggcccattttcactaaacaataaaatctaaataaattggaaggaataacaaccacaaaggaaagaatagagttggtctggattgatgatcactgaggatctgtatgtgaggcacccataacagtagttttgcctgtgagtcgtcttcacacatgctgttttctctgcctggctctctcttcccctccttacctggccagtcctgtttatcatcaggccttgtcttggatatcacgtcctctgggaagtcttcttttcccctctaacctaggaccctcattaccggctctcatagcacagtctactgctttgtacgaattctaagtattcttgttgcacttaattagcctgtatatcctcagaactttgtgtaatgcctggagcatagtaggcagtcatatgttgtatcgtgaataaattgcacatagtagctacccagcaaatgctgacttcttttctttctagtcttaacactccctttctatcattttccactcttgtacttgttctcaacatttacttggtagtgacatacctttcctgcagggcctgcccattgttgacagacaagtagtttattgtggcttatcttcggatactgggttattaggtttttttccctccaattattttttattcattcattcattcctaatatagccattatgagttaggtatagttctaggcattatttataatcttgacagtaaacttaagagatgtgtattatcttcatttacaaataggaaaactaagtcttgacagtattaggtaatttgcccaaagtaacaaagcaaagctgatcagtggtagaaggttttcatgattcattgtcagcgtcatttacatagaggtgaagtttcttgtgcagggttacacacctagcaagtagcagagctggcattcaaattgaggcctgatgtgctaatgtaaaaggaaaaaaacaaactttttttccttttgtactttcacactcaacatggaacacttctgtgacaaggtgtgtgagtttgtttcccccacacaccaagcaattctccagcagacaccaactgggtatcctataattcaattcatttctgacattacctggaaatagtgtcagatcccacaggttgag

SEQ ID NO: 360851 - DNA, 2581 bp, Homo sapiens
tgtaagacctcttagcgggcccatcgctgaggtgcagggacatgtcgcggccgaactcacctcgtggcctcggcgtggtgctctcagctcatgcccggaaaccaggtcccgacgccgcggtcagacggacctctagacgcgtccgcctcaatgccgccagctgccaggccgcccgtgacgcgttaagcctgcgccgcctcctggcttcgtgacgtcacgacgtccgcgcagctgcggtcgccgccgtcgcacgagtctttccttagtaacctgggcgatagctgccaaagggaaaggacagtcccaaaccagagtgaatattaatgctgccttggttgaggatataatcaacttggaagaggtgaatgaagaaatgaagtctgtgatagaagctctcaaggataatttcaataagactctcaatataaggacctcaccaggagggatcccgttggacaacgatcgcgtcgtcggtatacgtgcctgacgcgtgaagccttgcctttacagacccaggatcatgccgaggatcgtccgatgcatagtacgcacagctagctggattcttcgcgtgacatatgcgccagtcttcccagaggaattggcctggattaggagtcttagagtacctggaatccggtcccatctctaccaccaactggctgtttgaccttgggcaagttgcttcactctctgggcctccatttcctcatctgctaatataagtgtacagctgcagctatcaaggctataagagaaagtggaatgaatctgaacccagaagtggaagggacgctaattcgggtacccattccccaagtaaccagagagcacagagaaatgctggtgaaactggccaaacagaacaccaacaaggccaaagactctttacggaaggttcgcaccaactcaatgaacaagctgaagaaatccaaggatacagtctcagaggacaccattaggctaatagagaaacagatcagccaaatggccgatgacacagtggcagaactggacaggcatctggcagtgaagaccaaagaactccttggatgaaagtccactggggccagcaatactccagagcccagtttctgctggatcccatgggtggcacattgggacttctctccctcccccatctacacagaagactgtcaccatgctgacagaagcctgtccttgtaaggcccagccttccaggggaacactcagacatgttcattctcttcctgcttctgctctgggccggtgggtggctctcagaaaatacttgctgctggcaaaaggcctgtactcaggcatttgctttgacttgatgttgccaagggactgaggccattggcaggcttagtaccacctgctcctcatcttaggagtctccttttcaaataattaggctctgttcccattttaaaactctgatattggccttcacctgtgactggacactttactagaggcccattttcactaaacaataaaatctaaataaattggaaggaataacaaccacaaaggaaagaatagagttggtctggattgatgatcactgaggatctgtatgtgaggcacccataacagtagttttgcctgtgagtcgtcttcacacatgctgttttctctgcctggctctctcttcccctccttacctggccagtcctgtttatcatcaggccttgtcttggatatcacgtcctctgggaagtcttcttttcccctctaacctaggaccctcattaccggctctcatagcacagtctactgctttgtacgaattctaagtattcttgttgcacttaattagcctgtatatcctcagaactttgtgtaatgcctggagcatagtaggcagtcatatgttgtatcgtgaataaattgcacatagtagctacccagcaaatgctgacttcttttctttctagtcttaacactccctttctatcattttccactcttgtacttgttctcaacatttacttggtagtgacatacctttcctgcagggcctgcccattgttgacagacaagtagtttattgtggcttatcttcggatactgggttattaggtttttttccctccaattattttttattcattcattcattcctaatatagccattatgagttaggtatagttctaggcattatttataatcttgacagtaaacttaagagatgtgtattatcttcatttacaaataggaaaactaagtcttgacagtattaggtaatttgcccaaagtaacaaagcaaagctgatcagtggtagaaggttttcatgattcattgtcagcgtcatttacatagaggtgaagtttcttgtgcagggttacacacctagcaagtagcagagctggcattcaaattgaggcctgatgtgctaatgtaaaaggaaaaaaacaaactttttttccttttgtactttcacactcaacatggaacacttctgtgacaaggtgtgtgagtttgtttcccccacacaccaagcaattctccagcagacaccaactgggtatcctataattcaattcatttctgacattacctggaaatagtgtcagatcccacaggttgag

SEQ ID NO: 360852 - DNA, 1930 bp, Homo sapiens
atctgtacccctcacagcaggttctcctggagggtgatctgagcagcataccttcatgcccactgcagtgaacttggaatgtgagtgctttgagaggagagaggaagagctttgtcagttttgttcattgctgtattcctaggccctcaaacagagcctagcatgtaagtaaccagagagcacagagaaatgctggtgaaactggccaaacagaacaccaacaaggccaaagactctttacggaaggttcgcaccaactcaatgaacaagctgaagaaatccaaggatacagtctcagaggacaccattaggctaatagagaaacagatcagccaaatggccgatgacacagtggcagaactggacaggcatctggcagtgaagaccaaagaactccttggatgaaagtccactggggccagcaatactccagagcccagtttctgctggatcccatgggtggcacattgggacttctctccctcccccatctacacagaagactgtcaccatgctgacagaagcctgtccttgtaaggcccagccttccaggggaacactcagacatgttcattctcttcctgcttctgctctgggccggtgggtggctctcagaaaatacttgctgctggcaaaaggcctgtactcaggcatttgctttgacttgatgttgccaagggactgaggccattggcaggcttagtaccacctgctcctcatcttaggagtctccttttcaaataattaggctctgttcccattttaaaactctgatattggccttcacctgtgactggacactttactagaggcccattttcactaaacaataaaatctaaataaattggaaggaataacaaccacaaaggaaagaatagagttggtctggattgatgatcactgaggatctgtatgtgaggcacccataacagtagttttgcctgtgagtcgtcttcacacatgctgttttctctgcctggctctctcttcccctccttacctggccagtcctgtttatcatcaggccttgtcttggatatcacgtcctctgggaagtcttcttttcccctctaacctaggaccctcattaccggctctcatagcacagtctactgctttgtacgaattctaagtattcttgttgcacttaattagcctgtatatcctcagaactttgtgtaatgcctggagcatagtaggcagtcatatgttgtatcgtgaataaattgcacatagtagctacccagcaaatgctgacttcttttctttctagtcttaacactccctttctatcattttccactcttgtacttgttctcaacatttacttggtagtgacatacctttcctgcagggcctgcccattgttgacagacaagtagtttattgtggcttatcttcggatactgggttattaggtttttttccctccaattattttttattcattcattcattcctaatatagccattatgagttaggtatagttctaggcattatttataatcttgacagtaaacttaagagatgtgtattatcttcatttacaaataggaaaactaagtcttgacagtattaggtaatttgcccaaagtaacaaagcaaagctgatcagtggtagaaggttttcatgattcattgtcagcgtcatttacatagaggtgaagtttcttgtgcagggttacacacctagcaagtagcagagctggcattcaaattgaggcctgatgtgctaatgtaaaaggaaaaaaacaaactttttttccttttgtactttcacactcaacatggaacacttctgtgacaaggtgtgtgagtttgtttcccccacacaccaagcaattctccagcagacaccaactgggtatcctataattcaattcatttctgacattacctggaaatagtgtcagatcccacaggttgag

SEQ ID NO: 360853 - DNA, 2055 bp, Homo sapiens
atctgtacccctcacagcaggttctcctggagggtgatctgagcagcataccttcatgcccactgcagtgaacttgggcaagttgcttaattttttgaagcttcagcctccttatctgtaaaactggagtagtatttatggttttgaagagtaataggatattatatgtgaagctcatagtgtgaagcctggcatatcatagaatgtgagtgctttgagaggagagaggaagagctttgtcagttttgttcattgctgtattcctaggccctcaaacagagcctagcatgtaagtaaccagagagcacagagaaatgctggtgaaactggccaaacagaacaccaacaaggccaaagactctttacggaaggttcgcaccaactcaatgaacaagctgaagaaatccaaggatacagtctcagaggacaccattaggctaatagagaaacagatcagccaaatggccgatgacacagtggcagaactggacaggcatctggcagtgaagaccaaagaactccttggatgaaagtccactggggccagcaatactccagagcccagtttctgctggatcccatgggtggcacattgggacttctctccctcccccatctacacagaagactgtcaccatgctgacagaagcctgtccttgtaaggcccagccttccaggggaacactcagacatgttcattctcttcctgcttctgctctgggccggtgggtggctctcagaaaatacttgctgctggcaaaaggcctgtactcaggcatttgctttgacttgatgttgccaagggactgaggccattggcaggcttagtaccacctgctcctcatcttaggagtctccttttcaaataattaggctctgttcccattttaaaactctgatattggccttcacctgtgactggacactttactagaggcccattttcactaaacaataaaatctaaataaattggaaggaataacaaccacaaaggaaagaatagagttggtctggattgatgatcactgaggatctgtatgtgaggcacccataacagtagttttgcctgtgagtcgtcttcacacatgctgttttctctgcctggctctctcttcccctccttacctggccagtcctgtttatcatcaggccttgtcttggatatcacgtcctctgggaagtcttcttttcccctctaacctaggaccctcattaccggctctcatagcacagtctactgctttgtacgaattctaagtattcttgttgcacttaattagcctgtatatcctcagaactttgtgtaatgcctggagcatagtaggcagtcatatgttgtatcgtgaataaattgcacatagtagctacccagcaaatgctgacttcttttctttctagtcttaacactccctttctatcattttccactcttgtacttgttctcaacatttacttggtagtgacatacctttcctgcagggcctgcccattgttgacagacaagtagtttattgtggcttatcttcggatactgggttattaggtttttttccctccaattattttttattcattcattcattcctaatatagccattatgagttaggtatagttctaggcattatttataatcttgacagtaaacttaagagatgtgtattatcttcatttacaaataggaaaactaagtcttgacagtattaggtaatttgcccaaagtaacaaagcaaagctgatcagtggtagaaggttttcatgattcattgtcagcgtcatttacatagaggtgaagtttcttgtgcagggttacacacctagcaagtagcagagctggcattcaaattgaggcctgatgtgctaatgtaaaaggaaaaaaacaaactttttttccttttgtactttcacactcaacatggaacacttctgtgacaaggtgtgtgagtttgtttcccccacacaccaagcaattctccagcagacaccaactgggtatcctataattcaattcatttctgacattacctggaaatagtgtcagatcccacaggttgag

SEQ ID NO: 360854 - DNA, 1352 bp, Homo sapiens
tgtaagacctcttagcgggcccatcgctgaggtgcagggacatgtcgcggccgaactcacctcgtggcctcggcgtggtgctctcagctcatgcccggaaaccaggtcccgacgccgcggtcagacggacctctagacgcgtccgcctcaatgccgccagctgccaggccgcccgtgacgcgttaagcctgcgccgcctcctggcttcgtgacgtcacgacgtccgcgcagctgcggtcgccgccgtcgcacgagtctttccttagtaacctgggcgatagctgtggatgtttccaaggattgtcttcagtcatggccttgggattaaagtgcttccgcatggtccaccctacctttcgcaattatcttgcagcctctatcagacccgtttcagaagttacactgaagacagtgcatgaaagacaacatggccataggcaatacatggcctattcagctgtaccagtccgccattttgctaccaagaaagccaaagccaaagggaaaggacagtcccaaaccagagtgaatattaatgctgccttggttgaggatataatcaacttggaagaggtgaatgaagaaatgaagtctgtgatagaagctctcaaggataatttcaataagactctcaatataaggacctcaccaggatcccttgacaagattgctgtggtaactgctgacgggaagcttgctttaaaccagattagccagatctccatgaagtcgccacagctgattttggtgaatatggccagcttcccagagtgtacagctgcagctatcaaggctataagagaaagtggaatgaatctgaacccagaagtggaagggacgctaattcgggtacccattccccaagtaaccagagagcacagagaaatgctggtgaaactggccaaacagaacaccaacaaggccaaagactctttacggaaggttcgcaccaactcaatgaacaagctgaagaaatccaaggatacagtctcagaggacaccattaggctaatagagaaacaggcacccataacagtagttttgcctgtgagtcgtcttcacacatgctgttttctctgcctggctctctcttcccctccttacctggccagtcctgtttatcatcaggccttgtcttggatatcacgtcctctgggaagtcttcttttcccctctaacctaggaccctcattaccggctctcatagcacagtctactgctttgtacgaattctaagtattcttgttgcacttaattagcctgtatatcctcagaactttgtgtaatgcctggagcatagtaggcagtcatatgttgtatcgtgaataaattgcacatagtagctacccagc

SEQ ID NO: 360855 - DNA, 1509 bp, Homo sapiens
tgtaagacctcttagcgggcccatcgctgaggtgcagggacatgtcgcggccgaactcacctcgtggcctcggcgtggtgctctcagctcatgcccggaaaccaggtcccgacgccgcggtcagacggacctctagacgcgtccgcctcaatgccgccagctgccaggccgcccgtgacgcgttaagcctgcgccgcctcctggcttcgtgacgtcacgacgtccgcgcagctgcggtcgccgccgtcgcacgagtctttccttagtaacctgggcgatagctgatgagacggaagtcctgagagtttgaccgatttaaggtcacgtgcctaggaagtgctggaaccaagactcggagttttctctaagtttagtgcctttattttgttttaaaccacactgttgcatttccccccattttggaaagctttatagttggaaagaatgaaaacctgatctgaccccttcattttatggttgaaacaaaatctacgtaggagaaatcacttggtacaagtcacaagtcagtggtagagctgccgcaaatgctttttgaatacgtgtgattatgaatctaaatggcagatggcagggagtgataagtggatgtttccaaggattgtcttcagtcatggccttgggattaaagtgcttccgcatggtccaccctacctttcgcaattatcttgcagcctctatcagacccgtttcagaagttacactgaagacagtgcatgaaagacaacatggccataggcaatacatggcctattcagctgtaccagtccgccattttgctaccaagaaagccaaagccaaagggaaaggacagtcccaaaccagagtgaatattaatgctgccttggttgaggatataatcaacttggaagaggtgaatgaagaaatgaagtctgtgatagaagctctcaaggataatttcaataagactctcaatataaggacctcaccaggatcccttgacaagattgctgtggtaactgctgacgggaagcttgctttaaaccagattagccagatctccatgaagtcgccacagctgattttggtgaatatggccagcttcccagagtaagatggccttgctaaaatctctctccgtggtctcttttggaatggaggagactgggtcatatcaggaggaagtgttccttcagcttaggatgaaacaagagagaagacataataaagagaacttaaggataaggcaaagctcttttcctgttgccagattccttttctgttaaactcagatgctacagaggctaggtaagttgtttgaatacccaaacgggtcccatctaagaaaaacaatactggagatgcagtgattggtgcttggccagcgtgaaaaggctctggtgagctggagagcctgtaccttgtgtgagtggaatgcctctgcccagctcctgctgatcattgccaggcacaatgtaggcctggtaatcagtgttacctgatactacgatttttatttccagaagaagc

SEQ ID NO: 360856 - DNA, 369 bp, Homo sapiens
gtgggttgtattaggtcattgcatctttgaagctttatgattttaagtgtagttgaagaaggtaattgggctttttgttattggtccactaggaattggcctggattaggagtcttagagtacctggaatccggtcccatctctaccaccaactggctgtttgaccttgggcaagttgcttcactctctgggcctccatttcctcatctgctaatataaggtgaaggaatcctcctgttcttattgtctatttcagtagttgtattccaaagtcatagaccaaggttggacctgttgtatttgacaaactaggctagagataggagaaagggaaagcccttgctgtgaacacactgtttcaaatcaaag

SEQ ID NO: 360857 - DNA, 569 bp, Homo sapiens
aatcaggctgtctcattttgtgttcttgcagatcagccaaatggccgatgacacagtggcagaactggacaggcatctggcagtgaagaccaaagaactccttggatgaaagtccactggggccagcaatactccagagcccagtttctgctggatcccatgggtggcacattgggacttctctccctcccccatctacacagaagactgtcaccatgctgacagaagcctgtccttgtaaggcccagccttccaggggaacactcagacatgttcattctcttcctgcttctgctctgggccggtgggtggctctcagaaaatacttgctgctggcaaaaggcctgtactcaggcatttgctttgacttgatgttgccaagggactgaggccattggcaggcttagtaccacctgctcctcatcttaggagtctccttttcaaataattaggctctgttcccattttaaaactctgatattggccttcacctgtgactggacactttactagaggcccattttcactaaacaataaaatctaaataaattggaaggaataacaaccac

SEQ ID NO: 360858 - DNA, 1190 bp, Homo sapiens
tgtaagacctcttagcgggcccatcgctgaggtgcagggacatgtcgcggccgaactcacctcgtggcctcggcgtggtgctctcagctcatgcccggaaaccaggtcccgacgccgcggtcagacggacctctagacgcgtccgcctcaatgccgccagctgccaggccgcccgtgacgcgttaagcctgcgccgcctcctggcttcgtgacgtcacgacgtccgcgcagctgcggtcgccgccgtcgcacgagtctttccttagtaacctgggcgatagctgtggatgtttccaaggattgtcttcagtcatggccttgggattaaagtgcttccgcatggtccaccctacctttcgcaattatcttgcagcctctatcagacccgtttcagaagttacactgaagacagtgcatgaaagacaacatggccataggcaatacatggcctattcagctgtaccagtccgccattttgctaccaagaaagccaaagccaaagggaaaggacagtcccaaaccagagtgaatattaatgctgccttggttgaggatataatcaacttggaagaggtgaatgaagaaatgaagtctgtgatagaagctctcaaggataatttcaataagactctcaatataaggacctcaccaggatcccttgacaagattgctgtggtaactgctgacgggaagcttgctttaaaccagattagccagatctccatgaagtcgccacagctgattttggtgaatatggccagcttcccagagtaagatggccttgctaaaatctctctccgtggtctcttttggaatggaggagactgggtcatatcaggaggaagtgttccttcagcttaggatgaaacaagagagaagacataataaagagaacttaaggataaggcaaagctcttttcctgttgccagattccttttctgttaaactcagatgctacagaggctaggtaagttgtttgaatacccaaacgggtcccatctaagaaaaacaatactggagatgcagtgattggtgcttggccagcgtgaaaaggctctggtgagctggagagcctgtaccttgtgtgagtggaatgcctctgcccagctcctgctgatcattgccaggcacaatgtaggcctggtaatcagtgttacctgatactacgatttttatttccagaagaagc

SEQ ID NO: 360859 - DNA, 1945 bp, Homo sapiens
tgtaagacctcttagcgggcccatcgctgaggtgcagggacatgtcgcggccgaactcacctcgtggcctcggcgtggtgctctcagctcatgcccggaaaccaggtcccgacgccgcggtcagacggacctctagacgcgtccgcctcaatgccgccagctgccaggccgcccgtgacgcgttaagcctgcgccgcctcctggcttcgtgacgtcacgacgtccgcgcagctgcggtcgccgccgtcgcacgagtctttccttagtaacctgggcgatagctgtggatgtttccaaggattgtcttcagtcatggccttgggattaaagtgcttccgcatggtccaccctacctttcgcaattatcttgcagcctctatcagacccgtttcagaagttacactgaagacagtgcatgaaagacaacatggccataggcaatacatggcctattcagctgtaccagtccgccattttgctaccaagaaagccaaagccaaagggaaaggacagtcccaaaccagagtgaatattaatgctgccttggttgaggatataatcaacttggaagaggtgaatgaagaaatgaagtctgtgatagaagctctcaaggataatttcaataagactctcaatataaggacctcaccaggatcccttgacaagattgctgtggtaactgctgacgggaagcttgctttaaaccagattagccagatctccatgaagtcgccacagctgattttggtgaatatggccagcttcccagagtgtacagctgcagctatcaaggctataagagaaagtggaatgaatctgaacccagaagtggaagggacgctaattcgggtacccattccccaagtaaccagagagcacagagaaatgctggtgaaactggccaaacagaacaccaacaaggccaaagactctttacggaaggttcgcaccaactcaatgaacaagctgaagaaatccaaggatacagtctcagaggacaccattaggctaatagagaaacagatcagccaaatggccgatgacacagtggcagaactggacaggcatctggcagtgaagaccaaagaactccttggatgaaagtccactggggccagcaatactccagagcccagtttctgctggatcccatgggtggcacattgggacttctctccctcccccatctacacagaagactgtcaccatgctgacagaagcctgtccttgtaaggcccagccttccaggggaacactcagacatgttcattctcttcctgcttctgctctgggccggtgggtggctctcagaaaatacttgctgctggcaaaaggcctgtactcaggcatttgctttgacttgatgttgccaagggactgaggccattggcaggcttagtaccacctgctcctcatcttaggagtctccttttcaaataattaggctctgttcccattttaaaactctgatattggccttcacctgtgactggacactttactagaggcccattttcactaaacaataaaatctaaataaattggaaggaataacaaccacaaaggaaagaatagagttggtctggattgatgatcactgaggatctgtatgtgaggcacccataacagtagttttgcctgtgagtcgtcttcacacatgctgttttctctgcctggctctctcttcccctccttacctggccagtcctgtttatcatcaggccttgtcttggatatcacgtcctctgggaagtcttcttttcccctctaacctaggaccctcattaccggctctcatagcacagtctactgctttgtacgaattctaagtattcttgttgcacttaattagcctgtatatcctcagaactttgtgtaatgcctggagcatagtaggcagtcatatgttgtatcgtgaataaattgcacatagtagctacccagc

SEQ ID NO: 360860 - DNA, 2264 bp, Homo sapiens
tgtaagacctcttagcgggcccatcgctgaggtgcagggacatgtcgcggccgaactcacctcgtggcctcggcgtggtgctctcagctcatgcccggaaaccaggtcccgacgccgcggtcagacggacctctagacgcgtccgcctcaatgccgccagctgccaggccgcccgtgacgcgttaagcctgcgccgcctcctggcttcgtgacgtcacgacgtccgcgcagctgcggtcgccgccgtcgcacgagtctttccttagtaacctgggcgatagctgatgagacggaagtcctgagagtttgaccgatttaaggtcacgtgcctaggaagtgctggaaccaagactcggagttttctctaagtttagtgcctttattttgttttaaaccacactgttgcatttccccccattttggaaagctttatagttggaaagaatgaaaacctgatctgaccccttcattttatggttgaaacaaaatctacgtaggagaaatcacttggtacaagtcacaagtcagtggtagagctgccgcaaatgctttttgaatacgtgtgattatgaatctaaatggcagatggcagggagtgataagtggatgtttccaaggattgtcttcagtcatggccttgggattaaagtgcttccgcatggtccaccctacctttcgcaattatcttgcagcctctatcagacccgtttcagaagttacactgaagacagtgcatgaaagacaacatggccataggcaatacatggcctattcagctgtaccagtccgccattttgctaccaagaaagccaaagccaaagggaaaggacagtcccaaaccagagtgaatattaatgctgccttggttgaggatataatcaacttggaagaggtgaatgaagaaatgaagtctgtgatagaagctctcaaggataatttcaataagactctcaatataaggacctcaccaggatcccttgacaagattgctgtggtaactgctgacgggaagcttgctttaaaccagattagccagatctccatgaagtcgccacagctgattttggtgaatatggccagcttcccagagtgtacagctgcagctatcaaggctataagagaaagtggaatgaatctgaacccagaagtggaagggacgctaattcgggtacccattccccaagtaaccagagagcacagagaaatgctggtgaaactggccaaacagaacaccaacaaggccaaagactctttacggaaggttcgcaccaactcaatgaacaagctgaagaaatccaaggatacagtctcagaggacaccattaggctaatagagaaacagatcagccaaatggccgatgacacagtggcagaactggacaggcatctggcagtgaagaccaaagaactccttggatgaaagtccactggggccagcaatactccagagcccagtttctgctggatcccatgggtggcacattgggacttctctccctcccccatctacacagaagactgtcaccatgctgacagaagcctgtccttgtaaggcccagccttccaggggaacactcagacatgttcattctcttcctgcttctgctctgggccggtgggtggctctcagaaaatacttgctgctggcaaaaggcctgtactcaggcatttgctttgacttgatgttgccaagggactgaggccattggcaggcttagtaccacctgctcctcatcttaggagtctccttttcaaataattaggctctgttcccattttaaaactctgatattggccttcacctgtgactggacactttactagaggcccattttcactaaacaataaaatctaaataaattggaaggaataacaaccacaaaggaaagaatagagttggtctggattgatgatcactgaggatctgtatgtgaggcacccataacagtagttttgcctgtgagtcgtcttcacacatgctgttttctctgcctggctctctcttcccctccttacctggccagtcctgtttatcatcaggccttgtcttggatatcacgtcctctgggaagtcttcttttcccctctaacctaggaccctcattaccggctctcatagcacagtctactgctttgtacgaattctaagtattcttgttgcacttaattagcctgtatatcctcagaactttgtgtaatgcctggagcatagtaggcagtcatatgttgtatcgtgaataaattgcacatagtagctacccagc

SEQ ID NO: 360861 - DNA, 1717 bp, Homo sapiens
caagctttgtacttagatcttttacttagatctgctttttgtcttattctttttagtggatgtttccaaggattgtcttcagtcatggccttgggattaaagtgcttccgcatggtccaccctacctttcgcaattatcttgcagcctctatcagacccgtttcagaagttacactgaagacagtgcatgaaagacaacatggccataggcaatacatggcctattcagctgtaccagtccgccattttgctaccaagaaagccaaagccaaagggaaaggacagtcccaaaccagagtgaatattaatgctgccttggttgaggatataatcaacttggaagaggtgaatgaagaaatgaagtctgtgatagaagctctcaaggataatttcaataagactctcaatataaggacctcaccaggatcccttgacaagattgctgtggtaactgctgacgggaagcttgctttaaaccagattagccagatctccatgaagtcgccacagctgattttggtgaatatggccagcttcccagagtgtacagctgcagctatcaaggctataagagaaagtggaatgaatctgaacccagaagtggaagggacgctaattcgggtacccattccccaagtaaccagagagcacagagaaatgctggtgaaactggccaaacagaacaccaacaaggccaaagactctttacggaaggttcgcaccaactcaatgaacaagctgaagaaatccaaggatacagtctcagaggacaccattaggctaatagagaaacagatcagccaaatggccgatgacacagtggcagaactggacaggcatctggcagtgaagaccaaagaactccttggatgaaagtccactggggccagcaatactccagagcccagtttctgctggatcccatgggtggcacattgggacttctctccctcccccatctacacagaagactgtcaccatgctgacagaagcctgtccttgtaaggcccagccttccaggggaacactcagacatgttcattctcttcctgcttctgctctgggccggtgggtggctctcagaaaatacttgctgctggcaaaaggcctgtactcaggcatttgctttgacttgatgttgccaagggactgaggccattggcaggcttagtaccacctgctcctcatcttaggagtctccttttcaaataattaggctctgttcccattttaaaactctgatattggccttcacctgtgactggacactttactagaggcccattttcactaaacaataaaatctaaataaattggaaggaataacaaccacaaaggaaagaatagagttggtctggattgatgatcactgaggatctgtatgtgaggcacccataacagtagttttgcctgtgagtcgtcttcacacatgctgttttctctgcctggctctctcttcccctccttacctggccagtcctgtttatcatcaggccttgtcttggatatcacgtcctctgggaagtcttcttttcccctctaacctaggaccctcattaccggctctcatagcacagtctactgctttgtacgaattctaagtattcttgttgcacttaattagcctgtatatcctcagaactttgtgtaatgcctggagcatagtaggcagtcatatgttgtatcgtgaataaattgcacatagtagctacccagc

SEQ ID NO: 360862 - DNA, 1566 bp, Homo sapiens
tgtaagacctcttagcgggcccatcgctgaggtgcagggacatgtcgcggccgaactcacctcgtggcctcggcgtggtgctctcagctcatgcccggaaaccaggtcccgacgccgcggtcagacggacctctagacgcgtccgcctcaatgccgccagctgccaggccgcccgtgacgcgttaagcctgcgccgcctcctggcttcgtgacgtcacgacgtccgcgcagctgcggtcgccgccgtcgcacgagtctttccttagtaacctgggcgatagctgtggatgtttccaaggattgtcttcagtcatggccttgggattaaagtgcttccgcatggtccaccctacctttcgcaattatcttgcagcctctatcagacccgtttcagaagttacactgaagacagtgcatgaaagacaacatggccataggcaatacatggcctattcagctgtaccagtccgccattttgctaccaagaaagccaaagccaaagggaaaggacagtcccaaaccagagtgaatattaatgctgccttggttgaggatataatcaacttggaagaggtgaatgaagaaatgaagtctgtgatagaagctctcaaggataatttcaataagactctcaatataaggacctcaccaggatcccttgacaagattgctgtggtaactgctgacgggaagcttgctttaaaccagattagccagatctccatgaagtcgccacagctgattttggtgaatatggccagcttcccagagtgtacagctgcagctatcaaggctataagagaaagtggaatgaatctgaacccagaagtggaagggacgctaattcgggtacccattccccaagtaaccagagagcacagagaaatgctggtgaaactggccaaacagaacaccaacaaggccaaagactctttacggaaggttcgcaccaactcaatgaacaagctgaagaaatccaaggatacagtctcagaggacaccattaggctaatagagaaacagatcagccaaatggccgatgacacagtggcagaactggacaggcatctggcagtgaagaccaaagaactccttggatgaaagtccactggggccagcaatactccagagcccagtttctgctggatcccatgggtggcacattgggacttctctccctcccccatctacacagaagactgtcaccatgctgacagaagcctgtccttgtaaggcccagccttccaggggaacactcagacatgttcattctcttcctgcttctgctctgggccggtgggtggctctcagaaaatacttgctgctggcaaaaggcctgtactcaggcatttgctttgacttgatgttgccaagggactgaggccattggcaggcttagtaccacctgctcctcatcttaggagtctccttttcaaataattaggctctgttcccattttaaaactctgatattggccttcacctgtgactggacactttactagaggcccattttcactaaacaataaaatctaaataaattggaaggaataacaaccacaaagg

SEQ ID NO: 360863 - DNA, 3151 bp, Homo sapiens
tgtaagacctcttagcgggcccatcgctgaggtgcagggacatgtcgcggccgaactcacctcgtggcctcggcgtggtgctctcagctcatgcccggaaaccaggtcccgacgccgcggtcagacggacctctagacgcgtccgcctcaatgccgccagctgccaggccgcccgtgacgcgttaagcctgcgccgcctcctggcttcgtgacgtcacgacgtccgcgcagctgcggtcgccgccgtcgcacgagtctttccttagtaacctgggcgatagctgatgagacggaagtcctgagagtttgaccgatttaaggtcacgtgcctaggaagtgctggaaccaagactcggagttttctctaagtttagtgcctttattttgttttaaaccacactgttgcatttccccccattttggaaagctttatagttggaaagaatgaaaacctgatctgaccccttcattttatggttgaaacaaaatctacgtaggagaaatcacttggtacaagtcacaagtcagtggtagagctgccgcaaatgctttttgaatacgtgtgattatgaatctaaatggcagatggcagggagtgataagcctctatcagacccgtttcagaagttacactgaagacagtgcatgaaagacaacatggccataggcaatacatggcctattcagctgtaccagtccgccattttgctaccaagaaagccaaagccaaagggaaaggacagtcccaaaccagagtgaatattaatgctgccttggttgaggatataatcaacttggaagaggtgaatgaagaaatgaagtctgtgatagaagctctcaaggataatttcaataagactctcaatataaggacctcaccaggatcccttgacaagattgctgtggtaactgctgacgggaagcttgctttaaaccagattagccagatctccatgaagtcgccacagctgattttggtgaatatggccagcttcccagagactatgaagcaaataaaacaatactttaatgggccaaatgtggcctgagggccaccaatttgtgacctctgcattagtatttggagcagaccctccaggaagtccttttatactagactgaccattgcagaatattgcatggagcacagtgcttccaaaactggaaggaattggcctggattaggagtcttagagtacctggaatccggtcccatctctaccaccaactggctgtttgaccttgggcaagttgcttcactctctgggcctccatttcctcatctgctaatataagtgtacagctgcagctatcaaggctataagagaaagtggaatgaatctgaacccagaagtggaagggacgctaattcgggtacccattccccaagtaaccagagagcacagagaaatgctggtgaaactggccaaacagaacaccaacaaggccaaagactctttacggaaggttcgcaccaactcaatgaacaagctgaagaaatccaaggatacagtctcagaggacaccattaggctaatagagaaacagatcagccaaatggccgatgacacagtggcagaactggacaggcatctggcagtgaagaccaaagaactccttggatgaaagtccactggggccagcaatactccagagcccagtttctgctggatcccatgggtggcacattgggacttctctccctcccccatctacacagaagactgtcaccatgctgacagaagcctgtccttgtaaggcccagccttccaggggaacactcagacatgttcattctcttcctgcttctgctctgggccggtgggtggctctcagaaaatacttgctgctggcaaaaggcctgtactcaggcatttgctttgacttgatgttgccaagggactgaggccattggcaggcttagtaccacctgctcctcatcttaggagtctccttttcaaataattaggctctgttcccattttaaaactctgatattggccttcacctgtgactggacactttactagaggcccattttcactaaacaataaaatctaaataaattggaaggaataacaaccacaaaggaaagaatagagttggtctggattgatgatcactgaggatctgtatgtgaggcacccataacagtagttttgcctgtgagtcgtcttcacacatgctgttttctctgcctggctctctcttcccctccttacctggccagtcctgtttatcatcaggccttgtcttggatatcacgtcctctgggaagtcttcttttcccctctaacctaggaccctcattaccggctctcatagcacagtctactgctttgtacgaattctaagtattcttgttgcacttaattagcctgtatatcctcagaactttgtgtaatgcctggagcatagtaggcagtcatatgttgtatcgtgaataaattgcacatagtagctacccagcaaatgctgacttcttttctttctagtcttaacactccctttctatcattttccactcttgtacttgttctcaacatttacttggtagtgacatacctttcctgcagggcctgcccattgttgacagacaagtagtttattgtggcttatcttcggatactgggttattaggtttttttccctccaattattttttattcattcattcattcctaatatagccattatgagttaggtatagttctaggcattatttataatcttgacagtaaacttaagagatgtgtattatcttcatttacaaataggaaaactaagtcttgacagtattaggtaatttgcccaaagtaacaaagcaaagctgatcagtggtagaaggttttcatgattcattgtcagcgtcatttacatagaggtgaagtttcttgtgcagggttacacacctagcaagtagcagagctggcattcaaattgaggcctgatgtgctaatgtaaaaggaaaaaaacaaactttttttccttttgtactttcacactcaacatggaacacttctgtgacaaggtgtgtgagtttgtttcccccacacaccaagcaattctccagcagacaccaactgggtatcctataattcaattcatttctgacattacctggaaatagtgtcagatcccacaggttgag

SEQ ID NO: 360864 - DNA, 2526 bp, Homo sapiens
caagctttgtacttagatcttttacttagatctgctttttgtcttattctttttagtggatgtttccaaggattgtcttcagtcatggccttgggattaaagtgcttccgcatggtccaccctacctttcgcaattatcttgcagcctctatcagacccgtttcagaagttacactgaagacagtgcatgaaagacaacatggccataggcaatacatggcctattcagctgtaccagtccgccattttgctaccaagaaagccaaagccaaagggaaaggacagtcccaaaccagagtgaatattaatgctgccttggttgaggatataatcaacttggaagaggtgaatgaagaaatgaagtctgtgatagaagctctcaaggataatttcaataagactctcaatataaggacctcaccaggatcccttgacaagattgctgtggtaactgctgacgggaagcttgctttaaaccagattagccagatctccatgaagtcgccacagctgattttggtgaatatggccagcttcccagaggaattggcctggattaggagtcttagagtacctggaatccggtcccatctctaccaccaactggctgtttgaccttgggcaagttgcttcactctctgggcctccatttcctcatctgctaatataagtgtacagctgcagctatcaaggctataagagaaagtggaatgaatctgaacccagaagtggaagggacgctaattcgggtacccattccccaagtaaccagagagcacagagaaatgctggtgaaactggccaaacagaacaccaacaaggccaaagactctttacggaaggttcgcaccaactcaatgaacaagctgaagaaatccaaggatacagtctcagaggacaccattaggctaatagagaaacagatcagccaaatggccgatgacacagtggcagaactggacaggcatctggcagtgaagaccaaagaactccttggatgaaagtccactggggccagcaatactccagagcccagtttctgctggatcccatgggtggcacattgggacttctctccctcccccatctacacagaagactgtcaccatgctgacagaagcctgtccttgtaaggcccagccttccaggggaacactcagacatgttcattctcttcctgcttctgctctgggccggtgggtggctctcagaaaatacttgctgctggcaaaaggcctgtactcaggcatttgctttgacttgatgttgccaagggactgaggccattggcaggcttagtaccacctgctcctcatcttaggagtctccttttcaaataattaggctctgttcccattttaaaactctgatattggccttcacctgtgactggacactttactagaggcccattttcactaaacaataaaatctaaataaattggaaggaataacaaccacaaaggaaagaatagagttggtctggattgatgatcactgaggatctgtatgtgaggcacccataacagtagttttgcctgtgagtcgtcttcacacatgctgttttctctgcctggctctctcttcccctccttacctggccagtcctgtttatcatcaggccttgtcttggatatcacgtcctctgggaagtcttcttttcccctctaacctaggaccctcattaccggctctcatagcacagtctactgctttgtacgaattctaagtattcttgttgcacttaattagcctgtatatcctcagaactttgtgtaatgcctggagcatagtaggcagtcatatgttgtatcgtgaataaattgcacatagtagctacccagcaaatgctgacttcttttctttctagtcttaacactccctttctatcattttccactcttgtacttgttctcaacatttacttggtagtgacatacctttcctgcagggcctgcccattgttgacagacaagtagtttattgtggcttatcttcggatactgggttattaggtttttttccctccaattattttttattcattcattcattcctaatatagccattatgagttaggtatagttctaggcattatttataatcttgacagtaaacttaagagatgtgtattatcttcatttacaaataggaaaactaagtcttgacagtattaggtaatttgcccaaagtaacaaagcaaagctgatcagtggtagaaggttttcatgattcattgtcagcgtcatttacatagaggtgaagtttcttgtgcagggttacacacctagcaagtagcagagctggcattcaaattgaggcctgatgtgctaatgtaaaaggaaaaaaacaaactttttttccttttgtactttcacactcaacatggaacacttctgtgacaaggtgtgtgagtttgtttcccccacacaccaagcaattctccagcagacaccaactgggtatcctataattcaattcatttctgacattacctggaaatagtgtcagatcccacaggttgag

SEQ ID NO: 360865 - DNA, 2018 bp, Homo sapiens
tatacatggatgtcctatggcgtagactcggtatatctcaaattatcgccccagcccgtgaatgaagaaatgaagtctgtgatagaagctctcaaggataatttcaataagactctcaatataaggacctcaccaggatcccttgacaagattgctgtggtaactgctgacgggaagcttgctttaaaccagattagccagatctccatgaagtcgccacagctgattttggtgaatatggccagcttcccagagagtaaccagagagcacagagaaatgctggtgaaactggccaaacagaacaccaacaaggccaaagactctttacggaaggttcgcaccaactcaatgaacaagctgaagaaatccaaggatacagtctcagaggacaccattaggctaatagagaaacagatcagccaaatggccgatgacacagtggcagaactggacaggcatctggcagtgaagaccaaagaactccttggatgaaagtccactggggccagcaatactccagagcccagtttctgctggatcccatgggtggcacattgggacttctctccctcccccatctacacagaagactgtcaccatgctgacagaagcctgtccttgtaaggcccagccttccaggggaacactcagacatgttcattctcttcctgcttctgctctgggccggtgggtggctctcagaaaatacttgctgctggcaaaaggcctgtactcaggcatttgctttgacttgatgttgccaagggactgaggccattggcaggcttagtaccacctgctcctcatcttaggagtctccttttcaaataattaggctctgttcccattttaaaactctgatattggccttcacctgtgactggacactttactagaggcccattttcactaaacaataaaatctaaataaattggaaggaataacaaccacaaaggaaagaatagagttggtctggattgatgatcactgaggatctgtatgtgaggcacccataacagtagttttgcctgtgagtcgtcttcacacatgctgttttctctgcctggctctctcttcccctccttacctggccagtcctgtttatcatcaggccttgtcttggatatcacgtcctctgggaagtcttcttttcccctctaacctaggaccctcattaccggctctcatagcacagtctactgctttgtacgaattctaagtattcttgttgcacttaattagcctgtatatcctcagaactttgtgtaatgcctggagcatagtaggcagtcatatgttgtatcgtgaataaattgcacatagtagctacccagcaaatgctgacttcttttctttctagtcttaacactccctttctatcattttccactcttgtacttgttctcaacatttacttggtagtgacatacctttcctgcagggcctgcccattgttgacagacaagtagtttattgtggcttatcttcggatactgggttattaggtttttttccctccaattattttttattcattcattcattcctaatatagccattatgagttaggtatagttctaggcattatttataatcttgacagtaaacttaagagatgtgtattatcttcatttacaaataggaaaactaagtcttgacagtattaggtaatttgcccaaagtaacaaagcaaagctgatcagtggtagaaggttttcatgattcattgtcagcgtcatttacatagaggtgaagtttcttgtgcagggttacacacctagcaagtagcagagctggcattcaaattgaggcctgatgtgctaatgtaaaaggaaaaaaacaaactttttttccttttgtactttcacactcaacatggaacacttctgtgacaaggtgtgtgagtttgtttcccccacacaccaagcaattctccagcagacaccaactgggtatcctataattcaattcatttctgacattacctggaaatagtgtcagatcccacaggttgag

SEQ ID NO: 360866 - DNA, 982 bp, Homo sapiens
tgtgcctggcttatttccctaaacataatatcttccaggtccccccacattgtagcacgtgccagaccctcgctcccgtcgaaggctgatgccatccttcagtgatgtgtggacggacacattccgcgtatcccccaatcagtggatggacgcgtgggttgcagagcacgccacacacattcagtcagtacacgagttaacagttgcgtgcttgtctgcctgtgtcatccattcgagcatctgccaaggacccaggaaacacacagtgtgtctcctgaaggaatgaaaagccctcctggcccctctgccctctttctccaccctctccattttcaccgagatggttgtggtgtcacctctcgtggggtggccaaaaccccagccagggccacctatcccttcacctccctccacctcggatttcctcttggaaaatgaggctcctgactcacttgacctactgcgtaggctcctaaaagggtgtcggcaagttggcaagttaaaaaaaaaaacaatcagcatgaaagcactccgatgtatgcatacttttacttcgcgttggttccctacgttcttagaacaaggaaggagtgtgagtacttgctttggattgaaaggttttccagactagctgtaggaagtatgaaagtaaccaaggtctcacacacagccccagcactctgggtggatttcacttcatctactccactcacctacgctgagcttccctgtggacaagctcgtccatcctctttaatcactcccaggcctcgctcacacagcaacaagtgcctgtccctgtgtccttgctgttggcaagcagaagttccctggcagcctttgaacatagctgaatgttaggtatctttgatctgtctaaggaaaaagtctattttaaactgtgaagtgaagccaatttttttaggtcagattcttacccaacaaagcatacatcatccgtgctcatatagtttccagttta

SEQ ID NO: 360867 - DNA, 189 bp, Homo sapiens
aatgcagcccagcccaagcttagctccctccccagtcccactctagatgcacacgggctgggctgcttggggcttggcatagggtggaaagggctaccctggggctctgaccacactgtagtatgtgtggagggtgccctcccgtctcccacaacttctgctataacaataaactgtagaggaatctga

SEQ ID NO: 360868 - DNA, 939 bp, Homo sapiens
tctagttctctgtgttcgggcggggggagtcgaactcgtggggtgtcagtatcccgggttcgtctccccactaccggttcccaccactgagtctgggggcgaaggaaggagccagagtgcaattgcagatccagaccccagagtcagaaggagtgagaaccctgacccctaatcccactgcatccagccaataggagcccagccaccatggcggagctgcaggaggtgcagatcacagaggagaagccactgttgccaggacagacgcctgaggcggccaagactcactctgtggagacaccatacggctctgtcactttcactgtctatggcacccccaaacccaaacgcccagcgatccttacctaccacgatgtgggactcaactataaatcttgcttccagccactgtttcagttcgaggacatgcaggaaatcattcagaactttgtgcgggttcatgtggatgcccctggaatggaagagggagcccctgtgttccctttgggatatcagtacccatctctggaccagcttgcagacatgatcccttgcgtcctgcagtacctaaatttctctacaataattggagttggtgttggagctggagcctacatcctggcgagatatgctcttaaccacccggacactgttgaaggtcttgtcctcatcaacattgatcccaatgccaagggttggatggattgggcagcccacaagctaacaggctcacctctccatcggagatgaccctggacctctttcggcagagaggtctcggcatccggtgtcccgccgcacttcttcctcccactggtactgtgtcgcccgtccaccgcggacggcggcgggggtcccggccgacgggggaaccgcctcgggtgtccgccccctccttgcgccccgcgcctcgcgctctccccggtcctgtgtccagta

SEQ ID NO: 360869 - DNA, 437 bp, Homo sapiens
atttggtaaatcacttccctctaggtcttccccctttgaatcctcttggtggcatcagcagggagacacagaagtgtctttcctctttggagccagatatttttccagctgcactcctaggcagaggccagtgagggagtgccaggggctcactgccttctccccaacactgtgtctttaggtgtcctgtgatgctggtggtaggagaccaagcacctcatgaagatgcagtgggttagtagggaattttggggtgagtgagggaggagggttggggtcctaaagtggtggtcagaagagtatcttgccaaggggatgtcctgtttggcacagggagatcaactttggggcactaagaatttgattcctggtaagggaggaggaggaattcgcccaggaggaggaggaattcgccccggaggaggaggaattcgccc

SEQ ID NO: 360870 - DNA, 2716 bp, Homo sapiens
gtgggagtccaggagtgggtcgagcttagcggggaggggataaggccatgccctgtttctcatttccttccttctgctgtccctcagcttaaccacccggacactgttgaaggtcttgtcctcatcaacattgatcccaatgccaagggttggatggattgggcagcccacaaggtttggaggggcctgtgtgctgagacctacggttggggatcccctcgtatggatccagttaggctctggtagatagcctaactggatggactctgaacttcaaggagggagtaaaggggcaggaaagtgaagctgtcactttgcctgagtctcttataatatcctgaactttctttttctttttcttttttttttttttttgagatggtgtctcactctgttgccaaggctggagtgcagtggcttgatcttggctcactgcaacctctgcttcctgggttcaagtgattctcctgcctcagcctcccaagtagctgggattacaggcacccgccaccacgcctggctaatatttgtattattagtagagatggggtttcaccatcttggccagggtggtcttgaactcctgacctcgtgatccacccgcctcggcctcccaaagtgctgggattacagacgtgagccactgtgcctggccaataccctgaactttctcacctgccttctcctcatagctaacaggcctcacctcttccattccggagatgatccttggacatcttttcagccaggaagagctctctggaaattctgagttgatacaaaagtacagaaatatcattacacatgcacccaacctggataacattgaattgtactggaacagctacaacaaccgccgagacctgaactttgagcgtggaggtgatatcaccctcaggtgtcctgtgatgctggtggtaggagaccaagcacctcatgaagatgcagtgggttagtagggaattttggggtgagtgagggaggagggttggggtcctaaagtggtggtcagaagagtatcttgccaaggggatgtcctgtttggcacagggagatcaactttggggcactaagaatttgattcctggtaaggaggaactgggtagggagctgatagaaaagggactggggtctgggttcctgggtcccttacgggggaggcgccacagtgggcgtgacctcattcattcagcctcctgcttactccgtggaatgtaactcaaaactggaccccacccagacctcgttcctcaaggtcagtaacctgttcctgggcccccgtccacagtcatatatcctctctacatgcagctgctaagcctccagggcccggcatgggagcaaatggggtgaacgaagaacaaaacaaaggggctagagtgaagaagctagggaagagagaccctttccacctctctgcatggctcatttatgtgtgtttcactttttctgggtggtgctctcctgaacagatggctgactccggaggtcagccccagctgactcaggtgagtgccgctgccgtccatgggatggggaagggacataggataccggtggcactgggctctgccctttgccacacacccggccccacagtgccgcagcctcaggctccagctcttcctctaacctcatctcaccgtctccctcgcctcttcttacttccgcagccaggcaagctgaccgaggccttcaagtacttcctgcaaggcatgggctacatggcctcatcctgcatgactcgcctgtcccggtctcgtacagcctctctgaccagtgcagcatccgttgatggcaaccggtcccgctctcgcaccctgtcccagagcagcgagtctggaactctttcttcggggcccccggggcacaccatggaggtctcctgttgaatggcccttgttgccctagagtgggacccagccctcacctcccccagagctaacctgggaggtgctgaaggggcattgggccaccgtaagcaagggaaaaagggcagatcatgcggggagatgaccttgatctttgattgctaccctaaccttgacctttaacccgtgattccccccagctcctggaagagatgtcctaatatctcttagggacccagacccctaaattctcctcctcccccattttgatgttaaggtggagagggcatatgcatcctctgtcctgatctaggtgtctatagctgaggggtaagaggttgttgtagttgtcctggtgcctccatcagactctccctacttgtcccatatttgcaaggggaggggatttggggctggggctccattcaccaaagctgaggtggcttctcattaaccctttaggactctgaagggtatggacctacgtgaatgtgtgtcagggggagacttgctggtgggttagtggtcctcaggatgtgatagaaacatccagtgtaaaaaggaagttggaatgggagttggcgggcagtgaacgagtgtggggaaggattggtgctggggcaacaggaaggggcctggggccgtttggctgcactaactttggtagctcagtgtgcatctagagtgggactggggagggagctaagcttgggctgggctgcttggggcttggcatagggtggaaagggctaccctggggctctgaccacactgtagtatgtgtggagggtgccctcccgtctcccacaacttctgctataacaataaactgtagaggaatctga

SEQ ID NO: 360871 - DNA, 2404 bp, Homo sapiens
agtagtcgccggtaggctggaggctcggcgtggccgtgcgttgaacgaccgtgcgtgactgggactcactctgtggagacaccatacggctctgtcactttcactgtctatggcacccccaaacccaaacgcccagcgatccttacctaccacgatgtgggactcaactataaatcttgcttccagccactgtttcagttcgaggacatgcaggaaatcattcagaactttgtgcgggttcatgtggatgcccctggaatggaagagggagcccctgtgttccctttgggatatcagtacccatctctggaccagcttgcagacatgatcccttgcgtcctgcagtacctaaatttctctacaataattggagttggtgttggagctggagcctacatcctggcgagatatgctcttaaccacccggacactgttgaaggtcttgtcctcatcaacattgatcccaatgccaagggttggatggattgggcagcccacaaggtttggaggggcctgtgtgctgagacctacggttggggatcccctcgtatggatccagttaggctctggtagatagcctaactggatggactctgaacttcaaggagggagtaaaggggcaggaaagtgaagctgtcactttgcctgagtctcttataatatcctgaactttctttttctttttcttttttttttttttttgagatggtgtctcactctgttgccaaggctggagtgcagtggcttgatcttggctcactgcaacctctgcttcctgggttcaagtgattctcctgcctcagcctcccaagtagctgggattacaggcacccgccaccacgcctggctaatatttgtattattagtagagatggggtttcaccatcttggccagggtggtcttgaactcctgacctcgtgatccacccgcctcggcctcccaaagtgctgggattacagacgtgagccactgtgcctggccaataccctgaactttctcacctgccttctcctcatagctaacaggcctcacctcttccattccggagatgatccttggacatcttttcagccaggaagagctctctggaaattctgagttgatacaaaagtacagaaatatcattacacatgcacccaacctggataacattgaattgtactggaacagctacaacaaccgccgagacctgaactttgagcgtggaggtgatatcaccctcaggtgtcctgtgatgctggtggtaggagaccaagcacctcatgaagatgcagtggtggaatgtaactcaaaactggaccccacccagacctcgttcctcaagatggctgactccggaggtcagccccagctgactcagccaggcaagctgaccgaggccttcaagtacttcctgcaaggcatgggctacatggcctcatcctgcatgactcgcctgtcccggtctcgtacagcctctctgaccagtgcagcatccgttgatggcaaccggtcccgctctcgcaccctgtcccagagcagcgagtctggaactctttcttcggggcccccggggcacaccatggaggtctcctgttgaatggcccttgttgccctagagtgggacccagccctcacctcccccagagctaacctgggaggtgctgaaggggcattgggccaccgtaagcaagggaaaaagggcagatcatgcggggagatgaccttgatctttgattgctaccctaaccttgacctttaacccgtgattccccccagctcctggaagagatgtcctaatatctcttagggacccagacccctaaattctcctcctcccccattttgatgttaaggtggagagggcatatgcatcctctgtcctgatctaggtgtctatagctgaggggtaagaggttgttgtagttgtcctggtgcctccatcagactctccctacttgtcccatatttgcaaggggaggggatttggggctggggctccattcaccaaagctgaggtggcttctcattaaccctttaggactctgaagggtatggacctacgtgaatgtgtgtcagggggagacttgctggtgggttagtggtcctcaggatgtgatagaaacatccagtgtaaaaaggaagttggaatgggagttggcgggcagtgaacgagtgtggggaaggattggtgctggggcaacaggaaggggcctggggccgtttggctgcactaactttggtagctcagtgtgcatctagagtgggactggggagggagctaagcttgggctgggctgcttggggcttggcatagggtggaaagggctaccctggggctctgaccacactgtagtatgtgtggagggtgccctcccgtctcccacaacttctgctataacaataaactgtagaggaatctga

SEQ ID NO: 360872 - DNA, 1928 bp, Homo sapiens
agtagtcgccggtaggctggaggctcggcgtggccgtgcgttgaacgaccgtgcgtgactgggactcactctgtggagacaccatacggctctgtcactttcactgtctatggcacccccaaacccaaacgcccagcgatccttacctaccacgatgtgggactcaactataaatcttgcttccagccactgtttcagttcgaggacatgcaggaaatcattcagaactttgtgcgggttcatgtggatgcccctggaatggaagagggagcccctgtgttccctttgggatatcagtacccatctctggaccagcttgcagacatgatcccttgcgtcctgcagtacctaaatttctctacaataattggagttggtgttggagctggagcctacatcctggcgagatatgctcttaaccacccggacactgttgaaggtcttgtcctcatcaacattgatcccaatgccaagggttggatggattgggcagcccacaagctaacaggcctcacctcttccattccggagatgatccttggacatcttttcagccaggaagagctctctggaaattctgagttgatacaaaagtacagaaatatcattacacatgcacccaacctggataacattgaattgtactggaacagctacaacaaccgccgagacctgaactttgagcgtggaggtgatatcaccctcaggtgtcctgtgatgctggtggtaggagaccaagcacctcatgaagatgcagtgggagatcaactttggggcactaagaatttgattcctggtaaggtggaatgtaactcaaaactggaccccacccagacctcgttcctcaagatggctgactccggaggtcagccccagctgactcagccaggcaagctgaccgaggccttcaagtacttcctgcaaggcatgggctacatggcctcatcctgcatgactcgcctgtcccggtctcgtacagcctctctgaccagtgcagcatccgttgatggcaaccggtcccgctctcgcaccctgtcccagagcagcgagtctggaactctttcttcggggcccccggggcacaccatggaggtctcctgttgaatggcccttgttgccctagagtgggacccagccctcacctcccccagagctaacctgggaggtgctgaaggggcattgggccaccgtaagcaagggaaaaagggcagatcatgcggggagatgaccttgatctttgattgctaccctaaccttgacctttaacccgtgattccccccagctcctggaagagatgtcctaatatctcttagggacccagacccctaaattctcctcctcccccattttgatgttaaggtggagagggcatatgcatcctctgtcctgatctaggtgtctatagctgaggggtaagaggttgttgtagttgtcctggtgcctccatcagactctccctacttgtcccatatttgcaaggggaggggatttggggctggggctccattcaccaaagctgaggtggcttctcattaaccctttaggactctgaagggtatggacctacgtgaatgtgtgtcagggggagacttgctggtgggttagtggtcctcaggatgtgatagaaacatccagtgtaaaaaggaagttggaatgggagttggcgggcagtgaacgagtgtggggaaggattggtgctggggcaacaggaaggggcctggggccgtttggctgcactaactttggtagctcagtgtgcatctagagtgggactggggagggagctaagcttgggctgggctgcttggggcttggcatagggtggaaagggctaccctggggctctgaccacactgtagtatgtgtggagggtgccctcccgtctcccacaacttctgctataacaataaactgtagaggaatctga

SEQ ID NO: 360873 - DNA, 2360 bp, Homo sapiens
agtagtcgccggtaggctggaggctcggcgtggccgtgcgttgaacgaccgtgcgtgactgggactcactctgtggagacaccatacggctctgtcactttcactgtctatggcacccccaaacccaaacgcccagcgatccttacctaccacgatgtgggactcaactataaatcttgcttccagccactgtttcagttcgaggacatgcaggaaatcattcagaactttgtgcgggttcatgtggatgcccctggaatggaagagggagcccctgtgttccctttgggatatcagtacccatctctggaccagcttgcagacatgatcccttgcgtcctgcagtacctaaatttctctacaataattggagttggtgttggagctggagcctacatcctggcgagatatgctcttaaccacccggacactgttgaaggtcttgtcctcatcaacattgatcccaatgccaagggttggatggattgggcagcccacaagctaacaggcctcacctcttccattccggagatgatccttggacatcttttcagccaggaagagctctctggaaattctgagttgatacaaaagtacagaaatatcattacacatgcacccaacctggataacattgaattgtactggaacagctacaacaaccgccgagacctgaactttgagcgtggaggtgatatcaccctcaggtgtcctgtgatgctggtggtaggagaccaagcacctcatgaagatgcagtgggttagtagggaattttggggtgagtgagggaggagggttggggtcctaaagtggtggtcagaagagtatcttgccaaggggatgtcctgtttggcacagggagatcaactttggggcactaagaatttgattcctggtaaggaggaactgggtagggagctgatagaaaagggactggggtctgggttcctgggtcccttacgggggaggcgccacagtgggcgtgacctcattcattcagcctcctgcttactccgtggaatgtaactcaaaactggaccccacccagacctcgttcctcaaggtcagtaacctgttcctgggcccccgtccacagtcatatatcctctctacatgcagctgctaagcctccagggcccggcatgggagcaaatggggtgaacgaagaacaaaacaaaggggctagagtgaagaagctagggaagagagaccctttccacctctctgcatggctcatttatgtgtgtttcactttttctgggtggtgctctcctgaacagatggctgactccggaggtcagccccagctgactcagccaggcaagctgaccgaggccttcaagtacttcctgcaaggcatgggctacatggcctcatcctgcatgactcgcctgtcccggtctcgtacagcctctctgaccagtgcagcatccgttgatggcaaccggtcccgctctcgcaccctgtcccagagcagcgagtctggaactctttcttcggggcccccggggcacaccatggaggtctcctgttgaatggcccttgttgccctagagtgggacccagccctcacctcccccagagctaacctgggaggtgctgaaggggcattgggccaccgtaagcaagggaaaaagggcagatcatgcggggagatgaccttgatctttgattgctaccctaaccttgacctttaacccgtgattccccccagctcctggaagagatgtcctaatatctcttagggacccagacccctaaattctcctcctcccccattttgatgttaaggtggagagggcatatgcatcctctgtcctgatctaggtgtctatagctgaggggtaagaggttgttgtagttgtcctggtgcctccatcagactctccctacttgtcccatatttgcaaggggaggggatttggggctggggctccattcaccaaagctgaggtggcttctcattaaccctttaggactctgaagggtatggacctacgtgaatgtgtgtcagggggagacttgctggtgggttagtggtcctcaggatgtgatagaaacatccagtgtaaaaaggaagttggaatgggagttggcgggcagtgaacgagtgtggggaaggattggtgctggggcaacaggaaggggcctggggccgtttggctgcactaactttggtagctcagtgtgcatctagagtgggactggggagggagctaagcttgggctgggctgcttggggcttggcatagggtggaaagggctaccctggggctctgaccacactgtagtatgtgtggagggtgccctcccgtctcccacaacttctgctataacaataaactgtagaggaatctga

SEQ ID NO: 360874 - DNA, 1852 bp, Homo sapiens
agtagtcgccggtaggctggaggctcggcgtggccgtgcgttgaacgaccgtgcgtgactgggactcactctgtggagacaccatacggctctgtcactttcactgtctatggcacccccaaacccaaacgcccagcgatccttacctaccacgatgtgggactcaactataaatcttgcttccagccactgtttcagttcgaggacatgcaggaaatcattcagaactttgtgcgggttcatgtggatgcccctggaatggaagagggagcccctgtgttccctttgggatatcagtacccatctctggaccagcttgcagacatgatcccttgcgtcctgcagtacctaaatttctctacaataattggagttggtgttggagctggagcctacatcctggcgagatatgctcttaaccacccggacactgttgaaggtcttgtcctcatcaacattgatcccaatgccaagggttggatggattgggcagcccacaagctaacaggcctcacctcttccattccggagatgatccttggacatcttttcagccaggaagagctctctggaaattctgagttgatacaaaagtacagaaatatcattacacatgcacccaacctggataacattgaattgtactggaacagctacaacaaccgccgagacctgaactttgagcgtggaggtgatatcaccctcaggtgtcctgtgatgctggtggtaggagaccaagcacctcatgaagatgcagtggtggaatgtaactcaaaactggaccccacccagacctcgttcctcaagatggctgactccggaggtcagccccagctgactcagccaggcaagctgaccgaggccttcaagtacttcctgcaaggcatgggctacatggcctcatcctgcatgactcgcctgtcccggtctcgtacagcctctctgaccagtgcagcatccgttgatggcaaccggtcccgctctcgcaccctgtcccagagcagcgagtctggaactctttcttcggggcccccggggcacaccatggaggtctcccagccctcacctcccccagagctaacctgggaggtgctgaaggggcattgggccaccgtaagcaagggaaaaagggcagatcatgcggggagatgaccttgatctttgattgctaccctaaccttgacctttaacccgtgattccccccagctcctggaagagatgtcctaatatctcttagggacccagacccctaaattctcctcctcccccattttgatgttaaggtggagagggcatatgcatcctctgtcctgatctaggtgtctatagctgaggggtaagaggttgttgtagttgtcctggtgcctccatcagactctccctacttgtcccatatttgcaaggggaggggatttggggctggggctccattcaccaaagctgaggtggcttctcattaaccctttaggactctgaagggtatggacctacgtgaatgtgtgtcagggggagacttgctggtgggttagtggtcctcaggatgtgatagaaacatccagtgtaaaaaggaagttggaatgggagttggcgggcagtgaacgagtgtggggaaggattggtgctggggcaacaggaaggggcctggggccgtttggctgcactaactttggtagctcagtgtgcatctagagtgggactggggagggagctaagcttgggctgggctgcttggggcttggcatagggtggaaagggctaccctggggctctgaccacactgtagtatgtgtggagggtgccctcccgtctcccacaacttctgctataacaataaactgtagaggaatctga

SEQ ID NO: 360875 - DNA, 2161 bp, Homo sapiens
agtagtcgccggtaggctggaggctcggcgtggccgtgcgttgaacgaccgtgcgtgactgggactcactctgtggagacaccatacggctctgtcactttcactgtctatggcacccccaaacccaaacgcccagcgatccttacctaccacgatgtgggactcaactataaatcttgcttccagccactgtttcagttcgaggacatgcaggaaatcattcagaactttgtgcgggttcatgtggatgcccctggaatggaagagggagcccctgtgttccctttgggatatcagtacccatctctggaccagcttgcagacatgatcccttgcgtcctgcagtacctaaatttctctacaataattggagttggtgttggagctggagcctacatcctggcgagatatgctcttaaccacccggacactgttgaaggtcttgtcctcatcaacattgatcccaatgccaagggttggatggattgggcagcccacaagctaacaggcctcacctcttccattccggagatgatccttggacatcttttcagccaggaagagctctctggaaattctgagttgatacaaaagtacagaaatatcattacacatgcacccaacctggataacattgaattgtactggaacagctacaacaaccgccgagacctgaactttgagcgtggaggtgatatcaccctcaggtgtcctgtgatgctggtggtaggagaccaagcacctcatgaagatgcagtggtggaatgtaactcaaaactggaccccacccagacctcgttcctcaagatggctgactccggaggtcagccccagctgactcagccaggcaagctgaccgaggccttcaagtacttcctgcaaggcatgggctacatggcctcatcctgcatgactcgcctgtcccggtctcgtacagcctctctgaccagtgcagcatccgttgatggcaaccggtcccgctctcgcaccctgtcccagagcagcgagtctggaactctttcttcggggcccccggggcacaccatggaggtctcctgttgaatggcccttgttgccctagagtgggacccagccctcacctcccccagagctaacctgggaggtgctgaaggggcattgggccaccgtaagcaagggaaaaagggcagatcatgcggggagatgaccttgatctttgattgctaccctaaccttgacctttaacccgtgattccccccagctcctggaagagatgtcctaatatctcttagggacccagacccctaaattctcctcctcccccattttgatgttaaggtggagagggcatatgcatcctctgtcctgatctaggtgtctatagctgaggggtaagaggttgttgtagttgtcctggtgcctccatcagactctccctacttgtcccatatttgcaaggggaggggatttggggctggggctccattcaccaaagctgaggtggcttctcattaaccctttaggactctgaagggtatggacctacgtgaatgtgtgtcagggggagacttgctggtgggttagtggtcctcaggatgtgatagaaacatccagtgtaaaaaggaagttggaatgggagttggcgggcagtgaacgagtgtggggaaggattggtgctggggcaacaggaaggggcctggggccgtttggctgcactaactttggtagctcagtgtgcatctagagtgggactggggagggagctaagcttgggctgggctgcttggggcttggcatagggtggaaagggctaccctggggctctgaccacactgtagtatgtgtggagggtgccctcccgtctcccacaacttctgctataacaataaactgtagaggaatctgaaaaaaaaaaacacacacacaacacaaaataaaccaagcgacaacaacaacaacgaaatagtaaacggacatcacactaacgacccaagcacaacacaaacaaggagggggcgcggacggacaaacatcccccgcgggggagcgcacacccacccagggccacccgagttgctctgcagaacagggggcccaccaacgacaggcagaataaacaccagcgaggccgcgcggtaacaaccgtgcgaggggaaaacggcggcggcgagctggcgaaac

SEQ ID NO: 360876 - DNA, 1721 bp, Homo sapiens
agtagtcgccggtaggctggaggctcggcgtggccgtgcgttgaacgaccgtgcgtgactgggactcactctgtggagacaccatacggctctgtcactttcactgtctatggcacccccaaacccaaacgcccagcgatccttacctaccacgatgtgggactcaactataaatcttgcttccagccactgtttcagttcgaggacatgcaggaaatcattcagaactttgtgcgggttcatgtggatgcccctggaatggaagagggagcccctgtgttccctttgggatatcagtacccatctctggaccagcttgcagacatgatcccttgcgtcctgcagtacctaaatttctctacaataattggagttggtgttggagctggagcctacatcctggcgagatatgctcttaaccacccggacactgttgaaggtcttgtcctcatcaacattgatcccaatgccaagggttggatggattgggcagcccacaagctaacaggcctcacctcttccattccggagatgatccttggacatcttttcagccaggaagagctctctggaaattctgagttgatacaaaagtacagaaatatcattacacatgcacccaacctggataacattgaattgtactggaacagctacaacaaccgccgagacctgaactttgagcgtggaggtgatatcaccctcaggtgtcctgtgatgctggtggtaggagaccaagcacctcatgaagatgcagtggtggaatgtaactcaaaactggaccccacccagacctcgttcctcaagatggctgactccggaggtcagccccagctgactcagccaggcaagctgaccgaggccttcaagtacttcctgcaaggcatgggctacatggcctcatcctgcatgactcgcctgtcccggtctcgtacagcctctctgaccagtgcagcatccgttgatggcaaccggtcccgctctcgcaccctgtcccagagcagcgagtctggaactctttcttcggggcccccggggcacaccatggaggtctcctgttgaatggcccttgttgccctagagtgggacccagccctcacctcccccagagctaacctgggaggtgctgaaggggcattgggccaccgtaagcaagggaaaaagggcagatcatgcggggagatgaccttgatctttgattgctaccctaaccttgacctttaacccgtgattccccccagctcctggaagagatgtcctaatatctcttagggacccagacccctaaattctcctcctcccccattttgatgttaaggtggagagggcatatgcatcctctgtcctgatctaggtgtctatagctgaggggtaagaggttgttgtagttgtcctggtgcctccatcagactctcccaaagtgctgggattacaggcatgagccactgtaccctggcctgtagttgtatttttaaatttttgaaacctctgtactgttttccataatggctgtactagtttaagttcccaacagtgaacaagggctcctttttctgcacattcctgctaccaacacttgttatcttttgtctttttgtttgtttgtttttgagacagtcttgttctgttgcctaggctggagggcagtgacacgatcatagcttactgcagcctcaactcccaggctcaagcagctctctcacctcagcctcccaataggt

SEQ ID NO: 360877 - DNA, 1457 bp, Homo sapiens
agtagtcgccggtaggctggaggctcggcgtggccgtgcgttgaacgaccgtgcgtgactgggactcactctgtggagacaccatacggctctgtcactttcactgtctatggcacccccaaacccaaacgcccagcgatccttacctaccacgatgtgggactcaactataaatcttgcttccagccactgtttcagttcgaggacatgcaggaaatcattcagaactttgtgcgggttcatgtggatgcccctggaatggaagagggagcccctgtgttccctttgggatatcagtacccatctctggaccagcttgcagacatgatcccttgcgtcctgcagtacctaaatttctctacaataattggagttggtgttggagctggagcctacatcctggcgagatatgctcttaaccacccggacactgttgaaggtcttgtcctcatcaacattgatcccaatgccaagggttggatggattgggcagcccacaagctaacaggcctcacctcttccattccggagatgatccttggacatcttttcagccaggaagagctctctggaaattctgagttgatacaaaagtacagaaatatcattacacatgcacccaacctggataacattgaattgtactggaacagctacaacaaccgccgagacctgaactttgagcgtggaggtgatatcaccctcaggtgtcctgtgatgctggtggtaggagaccaagcacctcatgaagatgcagtggtggaatgtaactcaaaactggaccccacccagacctcgttcctcaagatggctgactccggaggtcagccccagctgactcagccaggcaagctgaccgaggccttcaagtacttcctgcaaggcatgggctacatggcctcatcctgcatgactcgcctgtcccggtctcgtacagcctctctgaccagtgcagcatccgttgatggcaaccggtcccgctctcgcaccctgtcccagagcagcgagtctggaactctttcttcggggcccccggggcacaccatggaggtctcctgttgaatggcccttgttgccctagagtgggacccagccctcacctcccccagagctaacctgggaggtgctgaaggggcattgggccaccgtaagcaagggaaaaagggcagatcatgcggggagatgaccttgatctttgattgctaccctaaccttgacctttaacccgtgattccccccagctcggcctggggccgtttggctgcactaactttggtagctcagtgtgcatctagagtgggactggggagggagctaagcttgggctgggctgcttggggcttggcatagggtggaaagggctaccctggggctctgaccacactgtagtatgtgtggagggtgccctcccgtctcccacaacttctgctataacaataaactgtagaggaatctga

SEQ ID NO: 360878 - DNA, 1404 bp, Homo sapiens
agtagtcgccggtaggctggaggctcggcgtggccgtgcgttgaacgaccgtgcgtgactgggactcactctgtggagacaccatacggctctgtcactttcactgtctatggcacccccaaacccaaacgcccagcgatccttacctaccacgatgtgggactcaactataaatcttgcttccagccactgtttcagttcgaggacatgcaggaaatcattcagaactttgtgcgggttcatgtggatgcccctggaatggaagagggagcccctgtgttccctttgggatatcagtacccatctctggaccagcttgcagacatgatcccttgcgtcctgcagtacctaaatttctctacaataattggagttggtgttggagctggagcctacatcctggcgagatatgctcttaaccacccggacactgttgaaggtcttgtcctcatcaacattgatcccaatgccaagggttggatggattgggcagcccacaagctaacaggcctcacctcttccattccggagatgatccttggacatcttttcagccaggaagagctctctggaaattctgagttgatacaaaagtacagaaatatcattacacatgcacccaacctggataacattgaattgtactggaacagctacaacaaccgccgagacctgaactttgagcgtggaggtgatatcaccctcaggtgtcctgtgatgctggtggtaggagaccaagcacctcatgaagatgcagtggtggaatgtaactcaaaactggaccccacccagacctcgttcctcaagatggctgactccggaggtcagccccagctgactcagccaggcaagctgaccgaggccttcaagtacttcctgcaaggcatgggctacatggcctcatcctgcatgactcgcctgtcccggtctcgtacagcctctctgaccagtgcagcatccgttgatggcaaccggtcccgctctcgcaccctgtcccagagcagcgagtctggaactctttcttcggggcccccggggcacaccatggaggtctcctgttgaatggcccttgttgccctagagtgggacccagccctcacctcccccagagctaacctgggaggtgctgaaggggcattgggccaccgtaagcaagggacttgacctttaacccgtgattccccccagctcggcctggggccgtttggctgcactaactttggtagctcagtgtgcatctagagtgggactggggagggagctaagcttgggctgggctgcttggggcttggcatagggtggaaagggctaccctggggctctgaccacactgtagtatgtgtggagggtgccctcccgtctcccacaacttctgctataacaataaactgtagaggaatctga

SEQ ID NO: 360879 - DNA, 1477 bp, Homo sapiens
agtagtcgccggtaggctggaggctcggcgtggccgtgcgttgaacgaccgtgcgtgactgggactcactctgtggagacaccatacggctctgtcactttcactgtctatggcacccccaaacccaaacgcccagcgatccttacctaccacgatgtgggactcaactataaatcttgcttccagccactgtttcagttcgaggacatgcaggaaatcattcagaactttgtgcgggttcatgtggatgcccctggaatggaagagggagcccctgtgttccctttgggatatcagtacccatctctggaccagcttgcagacatgatcccttgcgtcctgcagtacctaaatttctctacaataattggagttggtgttggagctggagcctacatcctggcgagatatgctcttaaccacccggacactgttgaaggtcttgtcctcatcaacattgatcccaatgccaagggttggatggattgggcagcccacaagctaacaggcctcacctcttccattccggagatgatccttggacatcttttcagccaggaagagctctctggaaattctgagttgatacaaaagtacagaaatatcattacacatgcacccaacctggataacattgaattgtactggaacagctacaacaaccgccgagacctgaactttgagcgtggaggtgatatcaccctcaggtgtcctgtgatgctggtggtaggagaccaagcacctcatgaagatgcagtggtggaatgtaactcaaaactggaccccacccagacctcgttcctcaagatggctgactccggaggtcagccccagctgactcagccaggcaagctgaccgaggccttcaagtacttcctgcaaggcatgggctacatggcctcatcctgcatgactcgcctgtcccggtctcgtacagcctctctgaccagtgcagcatccgttgatggcaaccggtcccgctctcgcaccctgtcccagagcagcgagtctggaactctttcttcggggcccccggggcacaccatggaggtctcctgttgaatggcccttgttgccctagagtgggacccagccctcacctcccccagagctaacctgggaggtgctgaaggggcattgggccaccgtaagcaagggaaaaagggcagatcatgcggggagatgaccttgatctttgattgctaccctaaccttgacctttaacccgtgattccccccagctcggcctggggccgtttggctgcactaactttggtagctcagtgtgcatctagagtgggactggggagggagctaagcttgggctgggctgcttggggcttggcatagggtggaaagggctaccctggggctctgaccacactgtagtatgtgtggagggtgccctcccgtctcccacaacttctgctataacaataaactgtagaggaatctgagtaccgttattattctttgt

SEQ ID NO: 360880 - DNA, 1187 bp, Homo sapiens
agtagtcgccggtaggctggaggctcggcgtggccgtgcgttgaacgaccgtgcgtgactgggactcactctgtggagacaccatacggctctgtcactttcactgtctatggcacccccaaacccaaacgcccagcgatccttacctaccacgatgtgggactcaactataaatcttgcttccagccactgtttcagttcgaggacatgcaggaaatcattcagaactttgtgcgggttcatgtggatgcccctggaatggaagagggagcccctgtgttccctttgggatatcagtacccatctctggaccagcttgcagacatgatcccttgcgtcctgcagtacctaaatttctctacaataattggagttggtgttggagctggagcctacatcctggcgagatatgctcttaaccacccggacactgttgaaggtcttgtcctcatcaacattgatcccaatgccaagggttggatggattgggcagcccacaagctaacaggcctcacctcttccattccggagatgatccttggacatcttttcagccaggaagagctctctggaaattctgagttgatacaaaagtacagaaatatcattacacatgcacccaacctggataacattgaattgtactggaacagctacaacaaccgccgagacctgaactttgagcgtggaggtgatatcaccctcaggtgtcctgtgatgctggtggtaggagaccaagcacctcatgaagatgcagtggtggaatgtaactcaaaactggaccccacccagacctcgttcctcaagatggctgactccggaggtcagccccagctgactcagccaggcaagctgaccgaggccttcaagtacttcctgcaaggcatgggctacatggcctcatcctgcatgactcgcctgtcccggtctcgtacagcctctctgaccagtgcagcatccgttgatggcaaccgggcctggggccgtttggctgcactaactttggtagctcagtgtgcatctagagtgggactggggagggagctaagcttgggctgggctgcttggggcttggcatagggtggaaagggctaccctggggctctgaccacactgtagtatgtgtggagggtgccctcccgtctcccacaacttctgctataacaataaactgtagaggaatctga

SEQ ID NO: 360881 - DNA, 1144 bp, Homo sapiens
agtagtcgccggtaggctggaggctcggcgtggccgtgcgttgaacgaccgtgcgtgactgggactcactctgtggagacaccatacggctctgtcactttcactgtctatggcacccccaaacccaaacgcccagcgatccttacctaccacgatgtgggactcaactataaatcttgcttccagccactgtttcagttcgaggacatgcaggaaatcattcagaactttgtgcgggttcatgtggatgcccctggaatggaagagggagcccctgtgttccctttgggatatcagtacccatctctggaccagcttgcagacatgatcccttgcgtcctgcagtacctaaatttctctacaataattggagttggtgttggagctggagcctacatcctggcgagatatgctcttaaccacccggacactgttgaaggtcttgtcctcatcaacattgatcccaatgccaagggttggatggattgggcagcccacaagctaacaggcctcacctcttccattccggagatgatccttggacatcttttcagccaggaagagctctctggaaattctgagttgatacaaaagtacagaaatatcattacacatgcacccaacctggataacattgaattgtactggaacagctacaacaaccgccgagacctgaactttgagcgtggaggtgatatcaccctcaggtgtcctgtgatgctggtggtaggagaccaagcacctcatgaagatgcagtggtggaatgtaactcaaaactggaccccacccagacctcgttcctcaagatggctgactccggaggtcagccccagctgactcagccaggcaagctgaccgaggccttcaagtacttcctgcaaggcatgggctacatggcctcatcctgcatgactcgcctgtcccggtctcgtacagcctctctgaccagtgcagcatccgttgatggcaaccggtcccgctctcgcaccctgtcccagagcagcgagtgggctgggctgcttggggcttggcatagggtggaaagggctaccctggggctctgaccacactgtagtatgtgtggagggtgccctcccgtctcccacaacttctgctataacaataaactgtagaggaatctga

SEQ ID NO: 360882 - DNA, 1139 bp, Homo sapiens
agtagtcgccggtaggctggaggctcggcgtggccgtgcgttgaacgaccgtgcgtgactgggactcactctgtggagacaccatacggctctgtcactttcactgtctatggcacccccaaacccaaacgcccagcgatccttacctaccacgatgtgggactcaactataaatcttgcttccagccactgtttcagttcgaggacatgcaggaaatcattcagaactttgtgcgggttcatgtggatgcccctggaatggaagagggagcccctgtgttccctttgggatatcagtacccatctctggaccagcttgcagacatgatcccttgcgtcctgcagtacctaaatttctctacaataattggagttggtgttggagctggagcctacatcctggcgagatatgctcttaaccacccggacactgttgaaggtcttgtcctcatcaacattgatcccaatgccaagggttggatggattgggcagcccacaagctaacaggcctcacctcttccattccggagatgatccttggacatcttttcagccaggaagagctctctggaaattctgagttgatacaaaagtacagaaatatcattacacatgcacccaacctggataacattgaattgtactggaacagctacaacaaccgccgagacctgaactttgagcgtggaggtgatatcaccctcaggtgtcctgtgatgctggtggtaggagaccaagcacctcatgaagatgcagtggtggaatgtaactcaaaactggaccccacccagacctcgttcctcaaggtcagtaacctgttcctgggcccccgtccacagtcatatatcctctctacatgcagctgctaagcctccagggcccggcatgggagcaaatggggtgaacgaagaacaaaacaaaggggggcctggggccgtttggctgcactaactttggtagctcagtgtgcatctagagtgggactggggagggagctaagcttgggctgggctgcttggggcttggcatagggtggaaagggctaccctggggctctgaccacactgtagtatgtgtggagggtgccctcccgtctcccacaacttctgctataacaataaactgtagaggaatctga

SEQ ID NO: 360883 - DNA, 655 bp, Homo sapiens
agtagtcgccggtaggctggaggctcggcgtggccgtgcgttgaacgaccgtgcgtgactgggactcactctgtggagacaccatacggctctgtcactttcactgtctatggcacccccaaacccaaacgcccagcgatccttacctaccacgatgtgggactcaactataaatcttgcttccagccactgtttcagttcgaggacatgcaggaaatcattcagaactttgtgcgggttcatgtggatgcccctggaatggaagagggagcccctgtgttccctttgggatatcagtacccatctctggaccagcttgcagacatgatcccttgcgtcctgcagtacctaaatttctctacaataattggagttggtgttggagctggagcctacatcctggcgagatatgctcttaaccacccggacactgttgaaggtcttgtcctcatcaacattgatcccaatgccaagggttggatggattgggcagcccacaagctaacaggcctcacctcttccattccggagatgatccttggacatcttttcagccaggaagagctctctggaaattctgagttgatacaaaagtacagaaatatcattacacatgcacccaacctggataacacgttcgcgagggggatcctct

SEQ ID NO: 360884 - DNA, 1652 bp, Homo sapiens
agtagtcgccggtaggctggaggctcggcgtggccgtgcgttgaacgaccgtgcgtgactgggactcactctgtggagacaccatacggctctgtcactttcactgtctatggcacccccaaacccaaacgcccagcgatccttacctaccacgatgtgggactcaactataaatcttgcttccagccactgtttcagttcgaggacatgcaggaaatcattcagaactttgtgcgggttcatgtggatgcccctggaatggaagagggagcccctgtgttccctttgggatatcagtacccatctctggaccagcttgcagacatgatcccttgcgtcctgcagtacctaaatttctctacaataattggagttggtgttggagctggagcctacatcctggcgagatatgctcttaaccacccggacactgttgaaggtcttgtcctcatcaacattgatcccaatgccaagggttggatggattgggcagcccacaaggtttggaggggcctgtgtgctgagacctacggttggggatcccctcgtatggatccagttaggctctggtagatagcctaactggatggactctgaacttcaaggagggagtaaaggggcaggaaagtgaagctgtcactttgcctgagtctcttataatatcctgaactttctttttctttttcttttttttttttttttgagatggtgtctcactctgttgccaaggctggagtgcagtggcttgatcttggctcactgcaacctctgcttcctgggttcaagtgattctcctgcctcagcctcccaagtagctgggattacaggcacccgccaccacgcctggctaatatttgtattattagtagagatggggtttcaccatcttggccagggtggtcttgaactcctgacctcgtgatccacccgcctcggcctcccaaagtgctgggattacagacgtgagccactgtgcctggccaataccctgaactttctcacctgccttctcctcatagctaacaggcctcacctcttccattccggagatgatccttggacatcttttcagccaggaagagctctctggaaattctgagttgatacaaaagtacagaaatatcattacacatgcacccaacctggataacattgaattgtactggaacagctacaacaaccgccgagacctgaactttgagcgtggaggtgatatcaccctcaggtgtcctgtgatgctggtggtaggagaccaagcacctcatgaagatgcagtgggtggaatgtaactcaaaactggacccaacagactcgttcctcaagatggctgaatccggaggtcagcccagtgagtcagcaaggaatgctgaccgaggcctacaagtaattcctgcaggcatgggtacatgaccatcggcatgaatcgcatgtccaggctcgtaaaggcatctctgaccaggaagcatccgagaaggaacggcccggccgagcctgtccagaacaggaggttgaaaccttattgggccggggaaccaggcggcctgagagggccgggccagggaacgacagcacaaaatgagggaaggaaggcacaagaaaggaaaggggaaggtaggcaaccaacaaccagtcaggactgaaccaccacaagg

SEQ ID NO: 360885 - DNA, 720 bp, Homo sapiens
agtagtcgccggtaggctggaggctcggcgtggccgtgcgttgaacgaccgtgcgtgactgggactcactctgtggagacaccatacggctctgtcactttcactgtctatggcacccccaaacccaaacgcccagcgatccttacctaccacgatgtgggactcaactataaatcttgcttccagccactgtttcagttcgaggacatgcaggaaatcattcagaactttgtgcgggttcatgtggatgcccctggaatggaagagggagcccctgtgttccctttgggatatcagtacccatctctggaccagcttgcagacatgatcccttgcgtcctgcagtacctaaatttctctacaataattggagttggtgttggagctggagcctacatcctggcgagatatgctcttaaccacccggacactgttgaaggtcttgtcctcatcaacattgatcccaatgccaagggttggatggattgggcagcccacaagctaacaggctcacctctccatcggagatgaccctggacctctttcggcagagaggtctcggcatccggtgtcccgccgcacttcttcctcccactggtactgtgtcgcccgtccaccgcggacggcggcgggggtcccggccgacgggggaaccgcctcgggtgtccgccccctccttgcgccccgcgcctcgcgctctccccggtcctgtgtccagta

SEQ ID NO: 360886 - DNA, 2102 bp, Homo sapiens
attccccgcccccacctccccgccttgttgtccaacttctcccggagcagccggagagcaggcgtcgggacgcagcaaagagaggagagaccccagagtcagaaggagtgagaaccctgacccctaatcccactgcatccagccaataggagcccagccaccatggcggagctgcaggaggtgcagatcacagaggagaagccactgttgccaggacagacgcctgaggcggccaaggaggctgagttagctgcccgaatcctcctggaccagggacagactcactctgtggagacaccatacggctctgtcactttcactgtctatggcacccccaaacccaaacgcccagcgatccttacctaccacgatgtgggactcaactataaatcttgcttccagccactgtttcagttcgaggacatgcaggaaatcattcagaactttgtgcgggttcatgtggatgcccctggaatggaagagggagcccctgtgttccctttgggatatcagtacccatctctggaccagcttgcagacatgatcccttgcgtcctgcagtacctaaatttctctacaataattggagttggtgttggagctggagcctacatcctggcgagatatgctcttaaccacccggacactgttgaaggtcttgtcctcatcaacattgatcccaatgccaagggttggatggattgggcagcccacaagctaacaggcctcacctcttccattccggagatgatccttggacatcttttcagccaggaagagctctctggaaattctgagttgatacaaaagtacagaaatatcattacacatgcacccaacctggataacattgaattgtactggaacagctacaacaaccgccgagacctgaactttgagcgtggaggtgatatcaccctcaggtgtcctgtgatgctggtggtaggagaccaagcacctcatgaagatgcagtggtggaatgtaactcaaaactggaccccacccagacctcgttcctcaagatggctgactccggaggtcagccccagctgactcagccaggcaagctgaccgaggccttcaagtacttcctgcaaggcatgggctacatggcctcatcctgcatgactcgcctgtcccggtctcgtacagcctctctgaccagtgcagcatccgttgatggcaaccggtcccgctctcgcaccctgtcccagagcagcgagtctggaactctttcttcggggcccccggggcacaccatggaggtctcctgttgaatggcccttgttgccctagagtgggacccagccctcacctcccccagagctaacctgggaggtgctgaaggggcattgggccaccgtaagcaagggaaaaagggcagatcatgcggggagatgaccttgatctttgattgctaccctaaccttgacctttaacccgtgattccccccagctcctggaagagatgtcctaatatctcttagggacccagacccctaaattctcctcctcccccattttgatgttaaggtggagagggcatatgcatcctctgtcctgatctaggtgtctatagctgaggggtaagaggttgttgtagttgtcctggtgcctccatcagactctccctacttgtcccatatttgcaaggggaggggatttggggctggggctccattcaccaaagctgaggtggcttctcattaaccctttaggactctgaagggtatggacctacgtgaatgtgtgtcagggggagacttgctggtgggttagtggtcctcaggatgtgatagaaacatccagtgtaaaaaggaagttggaatgggagttggcgggcagtgaacgagtgtggggaaggattggtgctggggcaacaggaaggggcctggggccgtttggctgcactaactttggtagctcagtgtgcatctagagtgggactggggagggagctaagcttgggctgggctgcttggggcttggcatagggtggaaagggctaccctggggctctgaccacactgtagtatgtgtggagggtgccctcccgtctcccacaacttctgctataacaataaactgtagaggaatctga

SEQ ID NO: 360887 - DNA, 1886 bp, Homo sapiens
agtagtcgccggtaggctggaggctcggcgtggccgtgcgttgaacgaccgtgcgtgactgggactcactctgtggagacaccatacggctctgtcactttcactgtctatggcacccccaaacccaaacgcccagcgatccttacctaccacgatgtgggactcaactataaatcttgcttccagccactgtttcagttcgaggacatgcaggaaatcattcagaactttgtgcgggttcatgtggatgcccctggaatggaagagggagcccctgtgttccctttgggatatcagtacccatctctggaccagcttgcagacatgatcccttgcgtcctgcagtacctaaatttctctacaataattggagttggtgttggagctggagcctacatcctggcgagatatgctcttaaccacccggacactgttgaaggtcttgtcctcatcaacattgatcccaatgccaagggttggatggattgggcagcccacaagctaacaggcctcacctcttccattccggagatgatccttggacatcttttcagccaggaagagctctctggaaattctgagttgatacaaaagtacagaaatatcattacacatgcacccaacctggataacattgaattgtactggaacagctacaacaaccgccgagacctgaactttgagcgtggaggtgatatcaccctcaggtgtcctgtgatgctggtggtaggagaccaagcacctcatgaagatgcagtggtggaatgtaactcaaaactggaccccacccagacctcgttcctcaagatggctgactccggaggtcagccccagctgactcagccaggcaagctgaccgaggccttcaagtacttcctgcaaggcatgggctacatggcctcatcctgcatgactcgcctgtcccggtctcgtacagcctctctgaccagtgcagcatccgttgatggcaaccggtcccgctctcgcaccctgtcccagagcagcgagtctggaactctttcttcggggcccccggggcacaccatggaggtctcctgttgaatggcccttgttgccctagagtgggacccagccctcacctcccccagagctaacctgggaggtgctgaaggggcattgggccaccgtaagcaagggaaaaagggcagatcatgcggggagatgaccttgatctttgattgctaccctaaccttgacctttaacccgtgattccccccagctcctggaagagatgtcctaatatctcttagggacccagacccctaaattctcctcctcccccattttgatgttaaggtggagagggcatatgcatcctctgtcctgatctaggtgtctatagctgaggggtaagaggttgttgtagttgtcctggtgcctccatcagactctccctacttgtcccatatttgcaaggggaggggatttggggctggggctccattcaccaaagctgaggtggcttctcattaaccctttaggactctgaagggtatggacctacgtgaatgtgtgtcagggggagacttgctggtgggttagtggtcctcaggatgtgatagaaacatccagtgtaaaaaggaagttggaatgggagttggcgggcagtgaacgagtgtggggaaggattggtgctggggcaacaggaaggggcctggggccgtttggctgcactaactttggtagctcagtgtgcatctagagtgggactggggagggagctaagcttgggctgggctgcttggggcttggcatagggtggaaagggctaccctggggctctgaccacactgtagtatgtgtggagggtgccctcccgtctcccacaacttctgctataacaataaactgtagaggaatctga

SEQ ID NO: 360888 - DNA, 1911 bp, Homo sapiens
agtagtcgccggtaggctggaggctcggcgtggccgtgcgttgaacgaccgtgcgtgactgggactcactctgtggagacaccatacggctctgtcactttcactgtctatggcacccccaaacccaaacgcccagcgatccttacctaccacgatgtgggactcaactataaatcttgcttccagccactgtttcagttcgaggacatgcaggaaatcattcagaactttgtgcgggttcatgtggatgcccctggaatggaagagggagcccctgtgttccctttgggatatcagtacccatctctggaccagcttgcagacatgatcccttgcgtcctgcagtacctaaatttctctacaataattggagttggtgttggagctggagcctacatcctggcgagatatgctcttaaccacccggacactgttgaaggtcttgtcctcatcaacattgatcccaatgccaagggttggatggattgggcagcccacaagctaacaggcctcacctcttccattccggagatgatccttggacatcttttcagccaggaagagctctctggaaattctgagttgatacaaaagtacagaaatatcattacacatgcacccaacctggataacattgaattgtactggaacagctacaacaagtgggtgggctgtgtgtgtatgcatccgccgagacctgaactttgagcgtggaggtgatatcaccctcaggtgtcctgtgatgctggtggtaggagaccaagcacctcatgaagatgcagtggtggaatgtaactcaaaactggaccccacccagacctcgttcctcaagatggctgactccggaggtcagccccagctgactcagccaggcaagctgaccgaggccttcaagtacttcctgcaaggcatgggctacatggcctcatcctgcatgactcgcctgtcccggtctcgtacagcctctctgaccagtgcagcatccgttgatggcaaccggtcccgctctcgcaccctgtcccagagcagcgagtctggaactctttcttcggggcccccggggcacaccatggaggtctcctgttgaatggcccttgttgccctagagtgggacccagccctcacctcccccagagctaacctgggaggtgctgaaggggcattgggccaccgtaagcaagggaaaaagggcagatcatgcggggagatgaccttgatctttgattgctaccctaaccttgacctttaacccgtgattccccccagctcctggaagagatgtcctaatatctcttagggacccagacccctaaattctcctcctcccccattttgatgttaaggtggagagggcatatgcatcctctgtcctgatctaggtgtctatagctgaggggtaagaggttgttgtagttgtcctggtgcctccatcagactctccctacttgtcccatatttgcaaggggaggggatttggggctggggctccattcaccaaagctgaggtggcttctcattaaccctttaggactctgaagggtatggacctacgtgaatgtgtgtcagggggagacttgctggtgggttagtggtcctcaggatgtgatagaaacatccagtgtaaaaaggaagttggaatgggagttggcgggcagtgaacgagtgtggggaaggattggtgctggggcaacaggaaggggcctggggccgtttggctgcactaactttggtagctcagtgtgcatctagagtgggactggggagggagctaagcttgggctgggctgcttggggcttggcatagggtggaaagggctaccctggggctctgaccacactgtagtatgtgtggagggtgccctcccgtctcccacaacttctgctataacaataaactgtagaggaatctga

SEQ ID NO: 360889 - DNA, 2661 bp, Homo sapiens
agtagtcgccggtaggctggaggctcggcgtggccgtgcgttgaacgaccgtgcgtgactgggactcactctgtggagacaccatacggctctgtcactttcactgtctatggcacccccaaacccaaacgcccagcgatccttacctaccacgatgtgggactcaactataaatcttgcttccagccactgtttcagttcgaggacatgcaggaaatcattcagaactttgtgcgggttcatgtggatgcccctggaatggaagagggagcccctgtgttccctttgggatatcagtacccatctctggaccagcttgcagacatgatcccttgcgtcctgcagtacctaaatttctctacaataattggagttggtgttggagctggagcctacatcctggcgagatatgctcttaaccacccggacactgttgaaggtcttgtcctcatcaacattgatcccaatgccaagggttggatggattgggcagcccacaaggtttggaggggcctgtgtgctgagacctacggttggggatcccctcgtatggatccagttaggctctggtagatagcctaactggatggactctgaacttcaaggagggagtaaaggggcaggaaagtgaagctgtcactttgcctgagtctcttataatatcctgaactttctttttctttttcttttttttttttttttgagatggtgtctcactctgttgccaaggctggagtgcagtggcttgatcttggctcactgcaacctctgcttcctgggttcaagtgattctcctgcctcagcctcccaagtagctgggattacaggcacccgccaccacgcctggctaatatttgtattattagtagagatggggtttcaccatcttggccagggtggtcttgaactcctgacctcgtgatccacccgcctcggcctcccaaagtgctgggattacagacgtgagccactgtgcctggccaataccctgaactttctcacctgccttctcctcatagctaacaggcctcacctcttccattccggagatgatccttggacatcttttcagccaggaagagctctctggaaattctgagttgatacaaaagtacagaaatatcattacacatgcacccaacctggataacattgaattgtactggaacagctacaacaaccgccgagacctgaactttgagcgtggaggtgatatcaccctcaggtgtcctgtgatgctggtggtaggagaccaagcacctcatgaagatgcagtgggttagtagggaattttggggtgagtgagggaggagggttggggtcctaaagtggtggtcagaagagtatcttgccaaggggatgtcctgtttggcacagggagatcaactttggggcactaagaatttgattcctggtaaggaggaactgggtagggagctgatagaaaagggactggggtctgggttcctgggtcccttacgggggaggcgccacagtgggcgtgacctcattcattcagcctcctgcttactccgtggaatgtaactcaaaactggaccccacccagacctcgttcctcaagatggctgactccggaggtcagccccagctgactcagccaggcaagctgaccgaggccttcaagtacttcctgcaaggcatgggctacatggcctcatcctgcatgactcgcctgtcccggtctcgtacagcctctctgaccagtgcagcatccgttgatggcaaccggtcccgctctcgcaccctgtcccagagcagcgagtctggaactctttcttcggggcccccggggcacaccatggaggtctcctgttgaatggcccttgttgccctagagtgggacccagccctcacctcccccagagctaacctgggaggtgctgaaggggcattgggccaccgtaagcaagggaaaaagggcagatcatgcggggagatgaccttgatctttgattgctaccctaaccttgacctttaacccgtgattccccccagctcctggaagagatgtcctaatatctcttagggacccagacccctaaattctcctcctcccccattttgatgttaaggtggagagggcatatgcatcctctgtcctgatctaggtgtctatagctgaggggtaagaggttgttgtagttgtcctggtgcctccatcagactctccctacttgtcccatatttgcaaggggaggggatttggggctggggctccattcaccaaagctgaggtggcttctcattaaccctttaggactctgaagggtatggacctacgtgaatgtgtgtcagggggagacttgctggtgggttagtggtcctcaggatgtgatagaaacatccagtgtaaaaaggaagttggaatgggagttggcgggcagtgaacgagtgtggggaaggattggtgctggggcaacaggaaggggcctggggccgtttggctgcactaactttggtagctcagtgtgcatctagagtgggactggggagggagctaagcttgggctgggctgcttggggcttggcatagggtggaaagggctaccctggggctctgaccacactgtagtatgtgtggagggtgccctcccgtctcccacaacttctgctataacaataaactgtagaggaatctga

SEQ ID NO: 360890 - DNA, 1356 bp, Homo sapiens
agtagtcgccggtaggctggaggctcggcgtggccgtgcgttgaacgaccgtgcgtgactgggactcactctgtggagacaccatacggctctgtcactttcactgtctatggcacccccaaacccaaacgcccagcgatccttacctaccacgatgtgggactcaactataaatcttgcttccagccactgtttcagttcgaggacatgcaggaaatcattcagaactttgtgcgggttcatgtggatgcccctggaatggaagagggagcccctgtgttccctttgggatatcagtacccatctctggaccagcttgcagacatgatcccttgcgtcctgcagtacctaaatttctctacaataattggagttggtgttggagctggagcctacatcctggcgagatatgctcttaaccacccggacactgttgaaggtcttgtcctcatcaacattgatcccaatgccaagggttggatggattgggcagcccacaagctaacaggcctcacctcttccattccggagatgatccttggacatcttttcagccaggaagagctctctggaaattctgagttgatacaaaagtacagaaatatcattacacatgcacccaacctggataacattgaattgtactggaacagctacaacaaccgccgagacctgaactttgagcgtggaggtgatatcaccctcaggtgtcctgtgatgctggtggtaggagaccaagcacctcatgaagatgcagtggtggaatgtaactcaaaactggaccccacccagacctcgttcctcaagatggctgactccggaggtcagccccagctgactcagccaggcaagctgaccgaggccttcaagtacttcctgcaaggcatgggctacatggcctcatcctgcatgactcgcctgtcccggtctcgtacagcctctctgaccagtgcagcatccgttgatggcaaccggtcccgctctcgcaccctgtcccagagcagcgagtctggaactctttcttcggggcccccggggcacaccatggaggtctcctgttgaatggcccttgttgccctagagtgggacccagccctcacctcccccagagctaacctgggaggtgctgaaggggcattgggccaccgtaagcaagggaaaaagggcagatcatgcggggagatgaccttgatctttgattgctaccctaaccttgacctttaacccgtgattccccccagctcctggaagagatgtcctaatatctcttagggacccagacccctaaattctcctcctctccccatttgtgtaggtggaggcttgatcttgcgatagggcaaagaggtaagtgga

SEQ ID NO: 360891 - DNA, 636 bp, Homo sapiens
agtagtcgccggtaggctggaggctcggcgtggccgtgcgttgaacgaccgtgcgtgactgggactcactctgtggagacaccatacggctctgtcactttcactgtctatggcacccccaaacccaaacgcccagcgatccttacctaccacgatgtgggactcaactataaatcttgcttccagccactgtttcagttcgaggacatgcaggaaatcattcagaactttgtgcgggttcatgtggatgcccctggaatggaagagggagcccctgtgttccctttgggatatcagtacccatctctggaccagcttgcagacatgatcccttgcgtcctgcagtacctaaatttctctacaataattggagttggtgttggagctggagcctacatcctggcgagatatgctcttaaccacccggacactgttgaaggtcttgtcctcatcaacattgatcccaatgccaagggttggatggattgggcagcccacaaggggctgggctgcttggggcttggcatagggtggaaagggctaccctggggctctgaccacactgtagtatgtgtggagggtgccctcccgtctcccacaacttctgctataacaataaactgtagaggaatctga

SEQ ID NO: 360892 - DNA, 528 bp, Homo sapiens
agtagtcgccggtaggctggaggctcggcgtggccgtgcgttgaacgaccgtgcgtgactgggactcactctgtggagacaccatacggctctgtcactttcactgtctatggcacccccaaacccaaacgcccagcgatccttacctaccacgatgtgggactcaactataaatcttgcttccagccactgtttcagttcgaggacatgcaggaaatcattcagaactttgtgcgggttcatgtggatgcccctggaatggaagagggagcccctgtgttccctttgggatatcagtacccatctctggaccagcttgcagacatgatcccttgcgtcctgcagtacctaaagtgagaggcctgggaacccctccaaaccagagttctctttccagcacaaggagacccttagaacttccaggttcaccgtggttcctgagccagtttcagcttctgaactcaatatatcttcttccttcatgctcccgccttgattattgagaaaaggtggtgggtttggaaaatt

SEQ ID NO: 360893 - DNA, 384 bp, Homo sapiens
gctgctttcctaccataacgggcggaattgagtagttgtgactgagacaatatggcccacagagccaaaaatatttactatctggtcctttaagaaaaagtttaggctgagggtggtggctcatgcctgtaatcccagcactttgggaggctgaagtaggaggatcacttgagaccaggtgttcacgaccagcctgggcagcacagtgagactccgtccctactaaagaaaaaattagccgggcatggtggcacacacctgtggttctagctactcaggagtctgaggcaggaggatcgcttgagcccaggagttcaaggctgcattgagccatgattgtaccactgcactctggcctgggtaacacagcaagaccttgtctca

SEQ ID NO: 360894 - DNA, 2600 bp, Homo sapiens
tatgtgtgaagtctttacggtcagaggacattgacaaaatattttagattgaaagcctgttctccttgatgattcagtataacttcttttgactgcgcttttagttcttgcaaaatagatcttgtttagatgagattccagcatgactcctttgtaatttttcatatttttgctattacatctcaactcttgaagagctatttctgtgaaaaccaaacatgcagtcaaggcacattccacgtgtggctgatggggttatcatagttacaaatcatatttatccacagtgataattatcttccttagcgttttgttctacttcagagctcatttgtgggccttaccacctgtttcttacatatggggaaagagtctcttattctcttttggaatatagatctaagagtagatttatatcaggatttgaaagatgaatctttttcaaggatgtttttcctctggaccgtggcattgtgtaagaaatttccctactcatcccatccctggggcacattaatttggagatgatgttaaatgtgtcagagtgtggcacaaatctcaactggcagataaagcctagtattgaattgttttcagttcagaaacgtggctggctgactttgaccctgaatgtgtaaattatctttgcagcaataagaacttgaagtagctttgatagctaatcatagtatgataactcagccagaagaattcactaagagcagtttgtgtgtcttccatctaatgtaaaggttagtaatgtaagtcatattcttggtgcctttagacctagttatgcagagagacatcacattgacattcagtaattcttactcttaacagttccttaactctaaaatcatctttttccttacctttccctagttctagaacagcaaaatattttacttagattctatcattaattaatatactcgtttgaatttttctcttctaaaaaatgtaggccaggcatggtggctttacacctgtaatcccaggactttgggaggtcgaggcgggcggatcacctgaggtctggagtccgagaccagtctggccaatgtggcgaaacccaccccgtctctactaaaaatacaaaaattagctgggtgtggtggtgtgcgccatagtcccagctactctggaggctgaggcaggagaatcacttgaacccgggaggcagaggttgcagtgagccaagatcacgtcactgtattccagcttgggtgacagagcaagactctgtctcaaaaaaaaaaaaaaaaaagtaaaattattttggccttaccatgcttggtttctttgtctttgttttttcattcactttatgtttggggaggagaatggagtgtcagtgatttcagcaaaaagttggggtaccagttcataataaattagtgtctaagattaatgttacagctgatattcaaagtaccaaatacgttattgttctgattattctggtccttaaatttgtctctttcctggagacgtggtaaacaataatgatgattctaataatgaccatttattgaatgagcactatgtgtcagacattgtactggtgatgtggtttggctgtgtgtccctacccaaatctcatctcaaattgtaatccccacgtgttgagggagggacctgatgggaggtgattggatcatgaggatggtttaccccatgctgtcctcctgatagcgagggagttctcatgagatctaatggtttaaaagtgtttggcagtttcacccttgcacccatgtctctctctgtctctcctgctgtcatgtgaagaagaggtccttgcctccccttggccttccaccgtgattataagtttcctggccgggtgcagtggctcacacctgtaatcccagcactttgagagaccaacgcgggcagatcacttgaggtcaggagttcaagaccagtctggccaacatggcgaaacctgtctctactgaaaaaacaaaaattagccgggcgggtggcgcacacctgtaatctcagctgttcgggaagctgaggcaggagaatcgattgaacctgacagatggaggttacagtgagccaagattgtgccactgcacttcagcctgtgtaacagagtgagactctctcaaaaaataatgataatagtaagtttcctaaggcttccccagccatgcagaactgtgagtcaattaaaccttttttcttcataaattgctcagtctcaggtagttctttatagcagtgtgaaaatggactaatgcaattgggcaatgtctgacagtttgcaaataccatctcatttgtttttaatagaaacctcctgctgagagtggtggctcacgcctgtaatcccagctctttgggaggccgaggcaggcagatcacatggtcaggagtttgagaccagcctgaccaacatgatgaaacctgtctctactaaaaatagaaaaattagctgggtgtggtggtacgcgcctgtaatcccagctacttaggagactgaggcaggagaatcacttgaacgtgggaggcagaggttgcagtgagcccagattgaaccactgcactccagcctgggcaacaaagtgagactccgtctcaaaaaa

SEQ ID NO: 360895 - DNA, 797 bp, Homo sapiens
gcacaagaccgctctacagtctcatccaagacttgaagagctcccgacttgtaatactacttgtgtttaccagggactgttgacactgcttcgcttccgaagaccgttagggacgtgggattaggtaagaatcaggccttattggagacattcaagcaaaggttggacaactacttttccagaacagaaaggaaactcatgcatcagaaaaggtgactaataaaggtaccagaagaatatggctgcacaaataccagaatctgatcagataaaacagtttaaggaatttctggggacctacaataaacttacagagacctgctttttggactgtgttaaagacttcacaacaagagaagtaaaacctgaagagaccacctgttcagaacattgcttacagaaatatttaaaaatgacacaaagaatatccatgagatttcaggaatatcatattcagcagaatgaagccctggcagccaaagcaggactccttggccaaccacgatagagaagtcctgatggatgaacttttgatgaaagattgccaacagctgctttattggaaatgaggactcatctgatagaatcccctgaaagcagtagccaccatgttcaaccatctgtcatgactgtttggcaaatggaaaccgctggagaaacaaaattgctatttaccaggaataatcacaatagaaggtcttattgttcagtgaaataataagatgcaacatttgttgaggccttatgattcagcagcttggtcacttgattagaaaaataaaccattgtttcttcaa

SEQ ID NO: 360896 - DNA, 584 bp, Homo sapiens
aagggtttttttaaaaaaaaaaaaaaaaaaccccccctttttgggggaaaaaaaaaaaggttccaccacctgttcagaacattgcttacagaaatatttaaaaatgacacaaagaatatccatgagatttcaggaatatcatattcagcagaatgaagccctggcagccaaagcaggactccttggccaaccacgatagagaagtcctgatggatgaacttttgatgaaagattgccaacagctgctttattggaaatgaggactcatctgatagaatcccctgaaagcagtagccaccatgttcaaccatctgtcatgactgtttggcaaatggaaaccgctggagaaacaaaattgctatttaccaggaataatcacaatagaaggtcttattgttcagtgaaataataagatgcaacatttgttgaggccttatgattcagcagcttggtcacttgattagaaaaataaaccattgtttcttcaattgtgactgttaattttaaagcaacttatgtgttcgatcatgtatgagatagaaaaatttttattactcaaagtaaaataaatggaaatatcactg

SEQ ID NO: 360897 - DNA, 2276 bp, Homo sapiens
gcacaagaccgctctacagtctcatccaagacttgaagagctcccgacttgtaatactacttgtgtttaccagggactgttgacactgcttcgcttccgaagaccgttagggacgtgggattagatttcctcgcgttataacgaatcggcgtctaagggtttaagtgtcacttgacattactgctcccacgtgttctttcccatctggcggccgcggctcctgtccagaccctgaccctccctcccaaggctcaaccgtcccccaacaaccgccagccttgtactgatgtcggctgcgagagcctgtgcttaagtaagaatcaggccttattggagacattcaagcaaaggttggacaactacttttccagaacagaaaggaaactcatgcatcagaaaaggtgactaataaaggtaccagaagaatatggctgcacaaataccagaatctgatcagataaaacagtttaaggaatttctggggacctacaataaacttacagagacctgctttttggactgtgttaaagacttcacaacaagagaagtaaaacctgaagagaccacctgttcagaacattgcttacagaaatatttaaaaatgacacaaagaatatccatgagatttcaggaatatcatattcagcagaatgaagccctggcagccaaagcaggactccttggccaaccacgatagagaagtcctgatggatgaacttttgatgaaagattgccaacagctgctttattggaaatgaggactcatctgatagaatcccctgaaagcagtagccaccatgttcaaccatctgtcatgactgtttggcaaatggaaaccgctggagaaacaaaattgctatttaccaggaataatcacaatagaaggtcttattgttcagtgaaataataagatgcaacatttgttgaggccttatgattcagcagcttggtcacttgattagaaaaataaaccattgtttcttcaattgtgactgttaattttaaagcaacttatgtgttcgatcatgtatgagatagaaaaatttttattactcaaagtaaaataaatggaaatatcactgagcagttgtttatactgtatggtaccatagtattctcactggactgtggatacgttgaaatgtttttcaatcaggatcatcctccaagcagtcctgttcattcatgtctgcctcaaattgctggtgaatacataaaatagttacttgctaatcatttcaatgcatgatccttttcttgcctcccttgtgtcagggtgggcattacatatacttttctttttttttttttttgagacggagttttgctttcgtcacccaggatggagtgcaacggcacaatctcagctcactgcaacctccacctccccagttcaagcaattctgctgcttcagcctcccaagtagctgggattacaggtgtgtgccaccatgcccggctaacttttgtatttttagtagaaatggggtttcaccacattggccaggctggtctcgaacttctgacctcaggtgatccgcctgcctcagcctcccaaagtgctaggattacaggcgtgagccaccgcgcctgggcacatatcttacctacattttcgtatatcttcaggaaacaatcccatctgccctagtttgggaatgtttaagagttgactgttatactgtaatggagttcatgtttgtgttttgttcaaaagctgacagtcaaatatgatagattccaaggcttgccaatgataaaaagggaaccaaagttaatgtcttatgcctaatgaatcctgaaatgaatccaagcatttgcaggaaattctagttgatgcatacatacaccaagcagtttagtaaaatggaagtggactaaaacttactaatcaactggcttatgaatggatttcatttgataccattttaaacctatatttaagagaatgctaattagcctgtatgtttaaatttaccaaagtgatttctatgttttgtatgttaatggaagtagaagcaatgttctgctttaaaattgaactgttgaaatacggataatacaagaaaatatacaatttattatagtcaaaggaaaatgaagaataggcttgcttcgtgttaaagcagccaaaaattcagagatttcacttatttaagattttgggcaattcacacacatactttgatatttctgtgtagtcaagcataacatagctatttactgtgtacatttcacaaagataattaaatatgtgctcacctggcaaataaggg

SEQ ID NO: 360898 - DNA, 1082 bp, Homo sapiens
gcacaagaccgctctacagtctcatccaagacttgaagagctcccgacttgtaatactacttgtgtttaccagggactgttgacactgcttcgcttccgaagaccgttagggacgtgggattagatttcctcgcgttataacgaatcggcgtctaagggtttaagtgtcacttgacattactgctcccacgtgttctttcccatctggcggccgcggctcctgtccagaccctgaccctccctcccaaggctcaaccgtcccccaacaaccgccagccttgtactgatgtcggctgcgagagcctgtgcttaagtaagaatcaggccttattggagacattcaagcaaaggttggacaactacttttccagaacagaaaggaaactcatgcatcagaaaaggtgactaataaaggtaccagaagaatatggctgcacaaataccagaatctgatcagataaaacagtttaaggaatttctggggacctacaataaacttacagagacctgctttttggactgtgttaaagacttcacaacaagagaagtaaaacctgaagagaccacctgttcagaacattgcttacagaaatatttaaaaatgacacaaagaatatccatgagatttcaggaatatcatattcagcagaatgaagccctggcagccaaagcaggactccttggccaaccacgatagagaagtcctgatggatgaacttttgatgaaagattgccaacagctgctttattggaaatgaggactcatctgatagaatcccctgaaagcagtagccaccatgttcaaccatctgtcatgactgtttggcaaatggaaaccgctggagaaacaaaattgctatttaccaggaataatcacaatagaaggtcttattgttcagtgaaataataagatgcaacatttgttgaggccttatgattcagcagcttggtcacttgattagaaaaataaaccattgtttcttcaattgtgactgttaattttaaagcaacttatgtgttcgatcatgtatgagatagaaaaatttttattactcaaagtaaaataaatggaaatatcactg

SEQ ID NO: 360899 - DNA, 986 bp, Homo sapiens
gcacaagaccgctctacagtctcatccaagacttgaagagctcccgacttgtaatactacttgtgtttaccagggactgttgacactgcttcgcttccgaagaccgttagggacgtgggattagatttcctcgcgttataacgaatcggcgtctaagggtttaagtgtcacttgacattactgctcccacgtgttctttcccatctggcggccgcggctcctgtccagaccctgaccctccctcccaaggctcaaccgtcccccaacaaccgccagccttgtactgatgtcggctgcgagagcctgtgcttaagtaagaatcaggccttattggagacattcaagcaaaggttggacaactacttttccagaacagaaaggaaactcatgcatcagaaaaggtgactaataaaggtaccagaagaatatggctgcacaaataccagaatctgatcagataaaacagtttaaggaatttctggggacctacaataaacttacagagacctgctttttggactgtgttaaagacttcacaacaagagaagtaaaacctgaagagaccacctgttcagaacattgcttacagaaatatttaaaaatgacacaaagaatatccatgagatttcaggaatatcatattcagcagaatgaagccctggcagccaaagcaggactccttggccaaccacgatagagaagtcctgatggatgaacttttgatgaaagattgccaacagctgctttattggaaatgaggactcatctgatagaatcccctgaaagcagtagccaccatgttcaaccatctgtcatgactgtttggcaaatggaaaccgctggagaaacaaaattgctatttaccaggaataatcacaatagaaggtcttattgttcagtgaaataataagatgcaacatttgttgaggccttatgattcagcagcttggtcacttgattagaaaaataaaccattgtttcttcaa

SEQ ID NO: 360900 - DNA, 1270 bp, Homo sapiens
gcacaagaccgctctacagtctcatccaagacttgaagagctcccgacttgtaatactacttgtgtttaccagggactgttgacactgcttcgcttccgaagaccgttagggacgtgggattagatttcctcgcgttataacgaatcggcgtctaagggtttaagtgtcacttgacattactgctcccacgtgttctttcccatctggcggccgcggctcctgtccagaccctgaccctccctcccaaggctcaaccgtcccccaacaaccgccagccttgtactgatgtcggctgcgagagcctgtgcttaagtaagaatcaggccttattggagacattcaagcaaaggttggacaactacttttccagaacagaaaggaaactcatgcatcagaaaaggtgactaataaaggtaccagaagaatatggctgcacaaataccagaatctgatcagataaaacagtttaaggaatttctggggacctacaataaacttacagagacctgctttttggactgtgttaaagacttcacaacaagagaagtaaaacctgaagagaccacctgttcagaacattgcttacagaaatatttaaaaatgacacaaagaatatccatgagatttcaggaatatcatattcagcagaatgaagccctggcagccaaagcaggactccttggccaaccacgatagagaagtcctgatggatgaacttttgatgaaagattgccaacagctgctttattggaaatgaggactcatctgatagaatcccctgaaagcagtagccaccatgttcaaccatctgtcatgactgtttggcaaatggaaaccgctggagaaacaaaattgctatttaccaggaataatcacaatagaaggtcttattgttcagtgaaataataagatgcaacatttgttgaggccttatgattcagcagcttggtcacttgattagaaaaataaaccattgtttcttcaaaaaaaaaaaaaaaaaaaaaaaaaaaaaaaaaaaaaaaaaaaaaaaaaaaaaaagaaaaaatcagaaaaagaagaaaaataaaaagaatagacaaaaagatgaatcggagagacagaatacagcaatcaaccacgaatagggacacagacagaagaaaagagcaaacgcgagggaatcagtggtgcacggacagcaggggcagcgcgctcagaacgcccacaccccacaccatgtcgtgatgcaacgggttacaagaggagcgaggaaggggtgcccgcgcggtg

SEQ ID NO: 360901 - DNA, 1034 bp, Homo sapiens
gcacaagaccgctctacagtctcatccaagacttgaagagctcccgacttgtaatactacttgtgtttaccagggactgttgacactgcttcgcttccgaagaccgttagggacgtgggattagatttcctcgcgttataacgaatcggcgtctaagggtttaagtgtcacttgacattactgctcccacgtgttctttcccatctggcggccgcggctcctgtccagaccctgaccctccctcccaaggctcaaccgtcccccaacaaccgccagccttgtactgatgtcggctgcgagagcctgtgcttaagtaagaatcaggccttattggagacattcaagcaaaggttggacaactacttttccagaacagaaaggaaactcatgcatcagaaaaggtgactaataaaggtaccagaagaatatggctgcacaaataccagaatctgatcagataaaacagtttaaggaatttctggggacctacaataaacttacagagacctgctttttggactgtgttaaagacttcacaacaagagaagtaaaacctgaagagaccacctgttcagaacattgcttacagaaatatttaaaaatgacacaaagaatatccatgagatttcaggaatatcatattcagcagaatgaagccctggcagccaaagcaggactccttggccaaccacgatagagaagtcctgatggatgaacttttgatgaaagattgccaacagctgctttattggaaatgaggactcatctgatagaatcccctgaaagcagtagccaccatgttcaaccatctgtcatgactgtttggcaaatggaaaccgctggagaaacaaaattgctatttaccaggatatccatagagggctatgtcagggataatagatgacattgtggctatgatagagtggcatgttaaataactgttttaaaaaaaaaagaaaaattgggggggcaaattaaattggggggcaaaaagggaacgaagggaaagggtccaaggggtaaatgttgtacgg

SEQ ID NO: 360902 - DNA, 2188 bp, Homo sapiens
gcacaagaccgctctacagtctcatccaagacttgaagagctcccgacttgtaatactacttgtgtttaccagggactgttgacactgcttcgcttccgaagaccgttagggacgtgggattagatttcctcgcgttataacgaatcggcgtctaagggtttaagtgtcacttgacattactgctcccacgtgttctttcccatctggcggccgcggctcctgtccagaccctgaccctccctcccaaggctcaaccgtcccccaacaaccgccagccttgtactgatgtcggctgcgagagcctgtgcttaagtgactaataaaggtaccagaagaatatggctgcacaaataccagaatctgatcagataaaacagtttaaggaatttctggggacctacaataaacttacagagacctgctttttggactgtgttaaagacttcacaacaagagaagtaaaacctgaagagaccacctgttcagaacattgcttacagaaatatttaaaaatgacacaaagaatatccatgagatttcaggaatatcatattcagcagaatgaagccctggcagccaaagcaggactccttggccaaccacgatagagaagtcctgatggatgaacttttgatgaaagattgccaacagctgctttattggaaatgaggactcatctgatagaatcccctgaaagcagtagccaccatgttcaaccatctgtcatgactgtttggcaaatggaaaccgctggagaaacaaaattgctatttaccaggaataatcacaatagaaggtcttattgttcagtgaaataataagatgcaacatttgttgaggccttatgattcagcagcttggtcacttgattagaaaaataaaccattgtttcttcaattgtgactgttaattttaaagcaacttatgtgttcgatcatgtatgagatagaaaaatttttattactcaaagtaaaataaatggaaatatcactgagcagttgtttatactgtatggtaccatagtattctcactggactgtggatacgttgaaatgtttttcaatcaggatcatcctccaagcagtcctgttcattcatgtctgcctcaaattgctggtgaatacataaaatagttacttgctaatcatttcaatgcatgatccttttcttgcctcccttgtgtcagggtgggcattacatatacttttctttttttttttttttgagacggagttttgctttcgtcacccaggatggagtgcaacggcacaatctcagctcactgcaacctccacctccccagttcaagcaattctgctgcttcagcctcccaagtagctgggattacaggtgtgtgccaccatgcccggctaacttttgtatttttagtagaaatggggtttcaccacattggccaggctggtctcgaacttctgacctcaggtgatccgcctgcctcagcctcccaaagtgctaggattacaggcgtgagccaccgcgcctgggcacatatcttacctacattttcgtatatcttcaggaaacaatcccatctgccctagtttgggaatgtttaagagttgactgttatactgtaatggagttcatgtttgtgttttgttcaaaagctgacagtcaaatatgatagattccaaggcttgccaatgataaaaagggaaccaaagttaatgtcttatgcctaatgaatcctgaaatgaatccaagcatttgcaggaaattctagttgatgcatacatacaccaagcagtttagtaaaatggaagtggactaaaacttactaatcaactggcttatgaatggatttcatttgataccattttaaacctatatttaagagaatgctaattagcctgtatgtttaaatttaccaaagtgatttctatgttttgtatgttaatggaagtagaagcaatgttctgctttaaaattgaactgttgaaatacggataatacaagaaaatatacaatttattatagtcaaaggaaaatgaagaataggcttgcttcgtgttaaagcagccaaaaattcagagatttcacttatttaagattttgggcaattcacacacatactttgatatttctgtgtagtcaagcataacatagctatttactgtgtacatttcacaaagataattaaatatgtgctcacctggcaaataaggg

SEQ ID NO: 360903 - DNA, 2298 bp, Homo sapiens
gcacaagaccgctctacagtctcatccaagacttgaagagctcccgacttgtaatactacttgtgtttaccagggactgttgacactgcttcgcttccgaagaccgttagggacgtgggattagatttcctcgcgttataacgaatcggcgtctaagggtttaagtgtcacttgacattactgctcccacgtgttctttcccatctggcggccgcggctcctgtccagaccctgaccctccctcccaaggctcaaccgtcccccaacaaccgccagccttgtactgatgtcggctgcgagagcctgtgcttaagtaagaatcaggccttattggagacattcaagcaaaggttggacaactacttttccagaacagaaaggaaactcatgcatcagaaaaggtttcagggatataatcagaaggtgactaataaaggtaccagaagaatatggctgcacaaataccagaatctgatcagataaaacagtttaaggaatttctggggacctacaataaacttacagagacctgctttttggactgtgttaaagacttcacaacaagagaagtaaaacctgaagagaccacctgttcagaacattgcttacagaaatatttaaaaatgacacaaagaatatccatgagatttcaggaatatcatattcagcagaatgaagccctggcagccaaagcaggactccttggccaaccacgatagagaagtcctgatggatgaacttttgatgaaagattgccaacagctgctttattggaaatgaggactcatctgatagaatcccctgaaagcagtagccaccatgttcaaccatctgtcatgactgtttggcaaatggaaaccgctggagaaacaaaattgctatttaccaggaataatcacaatagaaggtcttattgttcagtgaaataataagatgcaacatttgttgaggccttatgattcagcagcttggtcacttgattagaaaaataaaccattgtttcttcaattgtgactgttaattttaaagcaacttatgtgttcgatcatgtatgagatagaaaaatttttattactcaaagtaaaataaatggaaatatcactgagcagttgtttatactgtatggtaccatagtattctcactggactgtggatacgttgaaatgtttttcaatcaggatcatcctccaagcagtcctgttcattcatgtctgcctcaaattgctggtgaatacataaaatagttacttgctaatcatttcaatgcatgatccttttcttgcctcccttgtgtcagggtgggcattacatatacttttctttttttttttttttgagacggagttttgctttcgtcacccaggatggagtgcaacggcacaatctcagctcactgcaacctccacctccccagttcaagcaattctgctgcttcagcctcccaagtagctgggattacaggtgtgtgccaccatgcccggctaacttttgtatttttagtagaaatggggtttcaccacattggccaggctggtctcgaacttctgacctcaggtgatccgcctgcctcagcctcccaaagtgctaggattacaggcgtgagccaccgcgcctgggcacatatcttacctacattttcgtatatcttcaggaaacaatcccatctgccctagtttgggaatgtttaagagttgactgttatactgtaatggagttcatgtttgtgttttgttcaaaagctgacagtcaaatatgatagattccaaggcttgccaatgataaaaagggaaccaaagttaatgtcttatgcctaatgaatcctgaaatgaatccaagcatttgcaggaaattctagttgatgcatacatacaccaagcagtttagtaaaatggaagtggactaaaacttactaatcaactggcttatgaatggatttcatttgataccattttaaacctatatttaagagaatgctaattagcctgtatgtttaaatttaccaaagtgatttctatgttttgtatgttaatggaagtagaagcaatgttctgctttaaaattgaactgttgaaatacggataatacaagaaaatatacaatttattatagtcaaaggaaaatgaagaataggcttgcttcgtgttaaagcagccaaaaattcagagatttcacttatttaagattttgggcaattcacacacatactttgatatttctgtgtagtcaagcataacatagctatttactgtgtacatttcacaaagataattaaatatgtgctcacctggcaaataaggg

SEQ ID NO: 360904 - DNA, 2200 bp, Homo sapiens
gcacaagaccgctctacagtctcatccaagacttgaagagctcccgacttgtaatactacttgtgtttaccagggactgttgacactgcttcgcttccgaagaccgttagggacgtgggattagatttcctcgcgttataacgaatcggcgtctaagggtttaagtgtcacttgacattactgctcccacgtgttctttcccatctggcggccgcggctcctgtccagaccctgaccctccctcccaaggctcaaccgtcccccaacaaccgccagccttgtactgatgtcggctgcgagagcctgtgcttaagtaagaatcaggccttattggagacattcaagcaaaggttggacaactacttttccagaacagaaaggaaactcatgcatcagaaaaggtgactaataaaggtaccagaagaatatggctgcacaaataccagaatctgatcagataaaacagtttaaggaatttctggggacctacaataaacttacagagacctgctttttggactgtgttaaagacttcacaacaagagaagtaaaacctgaagagatattcagcagaatgaagccctggcagccaaagcaggactccttggccaaccacgatagagaagtcctgatggatgaacttttgatgaaagattgccaacagctgctttattggaaatgaggactcatctgatagaatcccctgaaagcagtagccaccatgttcaaccatctgtcatgactgtttggcaaatggaaaccgctggagaaacaaaattgctatttaccaggaataatcacaatagaaggtcttattgttcagtgaaataataagatgcaacatttgttgaggccttatgattcagcagcttggtcacttgattagaaaaataaaccattgtttcttcaattgtgactgttaattttaaagcaacttatgtgttcgatcatgtatgagatagaaaaatttttattactcaaagtaaaataaatggaaatatcactgagcagttgtttatactgtatggtaccatagtattctcactggactgtggatacgttgaaatgtttttcaatcaggatcatcctccaagcagtcctgttcattcatgtctgcctcaaattgctggtgaatacataaaatagttacttgctaatcatttcaatgcatgatccttttcttgcctcccttgtgtcagggtgggcattacatatacttttctttttttttttttttgagacggagttttgctttcgtcacccaggatggagtgcaacggcacaatctcagctcactgcaacctccacctccccagttcaagcaattctgctgcttcagcctcccaagtagctgggattacaggtgtgtgccaccatgcccggctaacttttgtatttttagtagaaatggggtttcaccacattggccaggctggtctcgaacttctgacctcaggtgatccgcctgcctcagcctcccaaagtgctaggattacaggcgtgagccaccgcgcctgggcacatatcttacctacattttcgtatatcttcaggaaacaatcccatctgccctagtttgggaatgtttaagagttgactgttatactgtaatggagttcatgtttgtgttttgttcaaaagctgacagtcaaatatgatagattccaaggcttgccaatgataaaaagggaaccaaagttaatgtcttatgcctaatgaatcctgaaatgaatccaagcatttgcaggaaattctagttgatgcatacatacaccaagcagtttagtaaaatggaagtggactaaaacttactaatcaactggcttatgaatggatttcatttgataccattttaaacctatatttaagagaatgctaattagcctgtatgtttaaatttaccaaagtgatttctatgttttgtatgttaatggaagtagaagcaatgttctgctttaaaattgaactgttgaaatacggataatacaagaaaatatacaatttattatagtcaaaggaaaatgaagaataggcttgcttcgtgttaaagcagccaaaaattcagagatttcacttatttaagattttgggcaattcacacacatactttgatatttctgtgtagtcaagcataacatagctatttactgtgtacatttcacaaagataattaaatatgtgctcacctggcaaataaggg

SEQ ID NO: 360905 - DNA, 1006 bp, Homo sapiens
gcacaagaccgctctacagtctcatccaagacttgaagagctcccgacttgtaatactacttgtgtttaccagggactgttgacactgcttcgcttccgaagaccgttagggacgtgggattagatttcctcgcgttataacgaatcggcgtctaagggtttaagtgtcacttgacattactgctcccacgtgttctttcccatctggcggccgcggctcctgtccagaccctgaccctccctcccaaggctcaaccgtcccccaacaaccgccagccttgtactgatgtcggctgcgagagcctgtgcttaagtaagaatcaggccttattggagacattcaagcaaaggttggacaactacttttccagaacagaaaggaaactcatgcatcagaaaaggtgactaataaaggtaccagaagaatatggctgcacaaataccagaatctgatcagataaaacagtttaaggaatttctggggacctacaataaacttacagagacctgctttttggactgtgttaaagacttcacaacaagagaagtaaaacctgaagagatattcagcagaatgaagccctggcagccaaagcaggactccttggccaaccacgatagagaagtcctgatggatgaacttttgatgaaagattgccaacagctgctttattggaaatgaggactcatctgatagaatcccctgaaagcagtagccaccatgttcaaccatctgtcatgactgtttggcaaatggaaaccgctggagaaacaaaattgctatttaccaggaataatcacaatagaaggtcttattgttcagtgaaataataagatgcaacatttgttgaggccttatgattcagcagcttggtcacttgattagaaaaataaaccattgtttcttcaattgtgactgttaattttaaagcaacttatgtgttcgatcatgtatgagatagaaaaatttttattactcaaagtaaaataaatggaaatatcactg

SEQ ID NO: 360906 - DNA, 616 bp, Homo sapiens
gcacaagaccgctctacagtctcatccaagacttgaagagctcccgacttgtaatactacttgtgtttaccagggactgttgacactgcttcgcttccgaagaccgttagggacgtgggattagatttcctcgcgttataacgaatcggcgtctaagggtttaagtgtcacttgacattactgctcccacgtgttctttcccatctggcggccgcggctcctgtccagaccctgaccctccctcccaaggctcaaccgtcccccaacaaccgccagccttgtactgatgtcggctgcgagagcctgtgcttaagtaagaatcaggccttattggagacattcaagcaaaggttggacaactacttttccagaacagaaaggaaactcatgcatcagaaaaggtttcagggatataatcagaaggtgactaataaaggtaccagaagaatatggctgcacaaataccagaatctgatcagataaaacagtttaaggaatttctggggacctacaataaacttacagagacctgctttttggactgtgttaaagacttcacaacaagagaagtaaaacctgaagaggtatgaaaagtgttactcactaaaattctaca

SEQ ID NO: 360907 - DNA, 687 bp, Homo sapiens
gcacaagaccgctctacagtctcatccaagacttgaagagctcccgacttgtaatactacttgtgtttaccagggactgttgacactgcttcgcttccgaagaccgttagggacgtgggattagatttcctcgcgttataacgaatcggcgtctaagggtttaagtgtcacttgacattactgctcccacgtgttctttcccatctggcggccgcggctcctgtccagaccctgaccctccctcccaaggctcaaccgtcccccaacaaccgccagccttgtactgatgtcggctgcgagagcctgtgcttaactgggcaacagagtgagaccctgtgtcaaaaaaaaaaaaattagaatagagttgtgacaattatatgaaaggacatttgaaaatcctgcttgtgctgcttcttcacttgaaataatttattatttcatatatgggaaataatattaacaatttattattaataattattgatttatatcaataaatgatagtgtgacttagttatggcttaatatgaatataattagattatattataattaaaatatgattaatttatattaatataaatcatttattatttcccatatgaactgccattgactgattttcttgtcttcaacttcctttctccacactggaaccagaattgtcttatttaaaaaataaaacca

SEQ ID NO: 360908 - DNA, 401 bp, Homo sapiens
aaatattcaactagaaaataaaactattctgtagatcatactgtacccatttaagttagcataataactatgatttcaagtgttatagtatattttgtctaaatataaaataccagtaatttaagtttcaaagcatctttgttttaaaaaccaaatactaaagaacattctggtttgtttgtagtttaaggaatttctggggacctacaataaacttacagagacctgctttttggactgtgttaaagacttcacaacaagagaagtaaaacctgaagaggtatgaaaagtgttactcactaaaattctacaagccttcataaacactctaagtaggatccccttaagcatttcacttgttcctacttattacaggaatttagactaccttttatgttcca

SEQ ID NO: 360909 - DNA, 399 bp, Homo sapiens
tgcccaggctggtctggaactcctggtctcaagtgatcctcccatcttggcctcccaaagtgctgggattacaggcgtgagccactgtgcctggctccccgaaactatgcttttgcttgggtctttcagctggttcatctcttcagcactgctgaataaatttagccagatgattggtgttttgggagacagaagctccctaaagacagaagcaagccaccatacttacatttcaagtccctggtggcagatggagaaaaaggacctaccccttcatttttcacccctcacgcctctttcaggtgttggtagaaattgaccaagtgaagtccagatcactgctccgatctctcagaacagattagagatcactgagccaggatcctctagatcaccagc

SEQ ID NO: 360910 - DNA, 241 bp, Homo sapiens
ctattttatttatataaaaataaaatataataaataaaaaaaaaaaaaaaaaaaaaaaaaaaaaaaaaaaaaaaaaaaaaaaaaaaaaaaaaaaaaaaaaaagacttggttcatttgtataatcaaaaagagttgtaaattaaagatgtattatttatcagagaagactttttagataatttttttaaaggatcagatcttgaaaatggaataaataactactgtgaaatgcaaaaaaaaa

SEQ ID NO: 360911 - DNA, 2766 bp, Homo sapiens
aactgagtgcgctgagcggggaagcgcaaaggggcaagttacccgtcctggcgtttctggggttcgcctcggaggctagcctcggtgctctcgcaggctcgctcgcttctgcatccccgttgccgcccggagccaactcttaagttctggacgccaggcctgaggcagttccgccatggacttctccaagttcctggcagacgacttcgacgtgaaggagtggatcaatgcggccttcagggccggctccaaggaggcggcgtccgggaaggcggatggccacgcagccaccctggtgatgaagctgcagctgttcatccaagaggtgaaccacgccgtggaggaaacaagtcaccaagctctccagaacatgcccaaagtgctccgtgatgttgaagccctaaaacaggaggcatctttcctgaaagaacagatgattcttgtcaaggaggacattaaaaaatttgaacaggacacatctcaatccatgcaggtgttggtagaaattgaccaagtgaagtccagaatgcaacttgctgccgaatctcttcaggaagcagataagtggagcacgttgagcgccgatattgaggagacatttaagactcaggacatagctgtgatttctgccaagctaacaggtatgcagaacagcttaatgatgcttgttgatacaccagactactcagaaaagtgtgtgcacttggaggcactgaagaacaggctggaggccctagccagtccacagattgtagcggcattcacctctcaggctgtagatcagtccaaagtgtttgtgaaggtgtttactgaaattgaccggatgccccagctcctggcctactactacaagtgtcacaaggtgcagcttttagcagcctggcaagagctgtgtcaaagtgacctatccctggaccggcagcttaccggactctatgatgccttgcttggtgcttggcacacacaaatccagtgggctacacaggttttccagaagccccacgaggtggtaatggtgctgctgattcagaccctgggggccctcatgccctcgctgccctcctgcctcagcaacggcgtggagagggcagggcccgagcaggagctcaccaggctgctggagttctacgacgccaccgcccacttcgccaagggcttggagatggcactgctcccccacctacatgaacacaatctggtaaaagtcacggagctggtggatgctgtgtatgatccatacaaaccctaccagctgaagtatggcgacatggaagagagcaacctcctcatccagatgagtgctgtgcctctggagcatggggaagtgattgactgtgtgcaggagctgagccactccgtgaacaagctgtttggtctggcgtctgcagccgttgacagatgcgtcagattcaccaatggcctggggacctgcggcctgttgtcagccctgaaatccctctttgccaagtatgtgtctgatttcaccagcactctccagtccatacgaaagaagtgcaaactggaccacattcctcccaactccctcttccaggaagattggacggcttttcagaactccattaggataatagccacctgtggagagcttttgcggcattgtggggacttcgagcagcagctagccaacaggattttgtccacagctgggaagtatctatctgattcctgcagcccccggagcctggctggttttcaggagagcatcttgacagacaagaagaactctgccaagaacccatggcaagaatataattacctccagaaagataaccctgctgaatatgccagtttaatggaaatactttatacccttaaggaaaaagggtcaagcaaccacaacctgctggctgcacctcgagcagcgctgactcggcttaaccagcaggcccaccagctggctttcgattccgtgttcctgcgcatcaaacaacagctgttgcttatttcgaagatggacagctggaatacggctggcatcggagaaaccctcacagatgaactgcccgcctttagtctcacccctctcgagtacatcagcaacatcgggcagtacatcatgtccctccccctgaatcttgagccatttgtgactcaggaggactctgccttagagttggcattgcacgctggaaagctgccatttcctcctgagcagggggatgaattgcccgagctggacaacatggctgacaactggctgggctcgatcgccagagccacaatgcagacctactgtgatgcgatcctacagatccctgagctgagcccacactctgccaagcagctggccactgacatcgactatctgatcaacgtgatggatgccctgggcctgcagccgtcccgcaccctccagcacatcgtgacgctactgaagacccaggcctgaggactatagacaggtcagcaaaggcctgccccgtcgcctggccaccaccgtggccaccatgcggagtgtgaattactgaccccaccacacaccggaccaccaagagagccagggctgctgtttcgcgactcaccagcacagatttgctcagaaactctgcccaagattgggcagaagttactttaaaaagacttggttcagctggtcacggtggctcacgcctgtaatcccagcactttgggaggccaagccagatggatcatgaagccaggagttcgagaccagcctgaccaacatggtgaaaccccatctctactaaaaatacaaaaattaacagcagagcgagactctgtctc

SEQ ID NO: 360912 - DNA, 1681 bp, Homo sapiens
tgagctggccccccgttcgatggccatggaagagagcaacctcctcatccagatgagtgctgtgcctctggagcatggggaagtgattgactgtgtgcaggagctgagccactccgtgaacaagctgtttggtctggcgtctgcagccgttgacagatgcgtcagattcaccaatggcctggggacctgcggcctgttgtcagccctgaaatccctctttgccaagtatgtgtctgatttcaccagcactctccagtccatacgaaagaagtgcaaactggaccacattcctcccaactccctcttccaggaagattggacggcttttcagaactccattaggataatagccacctgtggagagcttttgcggcattgtggggacttcgagcagcagctagccaacaggattttgtccacagctgggaagtatctatctgattcctgcagcccccggagcctggctggttttcaggagagcatcttgacagacaagaagaactctgccaagaacccatggcaagaatataattacctccagaaagataaccctgctgaatatgccagtttaatggaaatactttatacccttaaggaaaaagggtcaagcaaccacaacctgctggctgcacctcgagcagcgctgactcggcttaaccagcaggcccaccagctggctttcgattccgtgttcctgcgcatcaaacaacagctgttgcttatttcgaagatggacagctggaatacggctggcatcggagaaaccctcacagatgaactgcccgcctttagtctcacccctctcgagtacatcagcaacatcgggcagtacatcatgtccctccccctgaatcttgagccatttgtgactcaggaggactctgccttagagttggcattgcacgctggaaagctgccatttcctcctgagcagggggatgaattgcccgagctggacaacatggctgacaactggctgggctcgatcgccagagccacaatgcagacctactgtgatgcgatcctacagatccctgagctgagcccacactctgccaagcagctggccactgacatcgactatctgatcaacgtgatggatgccctgggcctgcagccgtcccgcaccctccagcacatcgtgacgctactgaagacccaggcctgaggactatagacaggtcagcaaaggcctgccccgtcgcctggccaccaccgtggccaccatgcggagtgtgaattactgaccccaccacacaccggaccaccaagagagccagggctgctgtttcgcgactcaccagcacagatttgctcagaaactctgcccaagattgggcagaagttactttaaaaagacttggttcagctggtcacggtggctcacgcctgtaatcccagcactttgggaggccaagccagatggatcatgaagccaggagttcgagaccagcctgaccaacatggtgaaaccccatctctactaaaaatacaaaaattaacagcagagcgagactctgtctcaaaaaaaaaaaaaaaaaagacttggttcatttgtataatcaaaaagagttgtaaattaaagatgtattatttatcagagaagactttttagataatttttttaaaggatcagatcttgaaaatggaataaataactactgtgaaatgcaaaaaaaaa

SEQ ID NO: 360913 - DNA, 2249 bp, Homo sapiens
atacatactcgttgcctttaccaccccaggactgggtgcagtggcacaatcacagctcacttcaaccttgatctcccaggctcaagcgatcctcccacctcagcttcccagtagttgggactacaggtgcatgtcaccatgccaggctaattttttgtagagatggggtttcgccatgttgaccaggctggtctcaaactcctgggctggagcaatctgcccacgtctgccatccaaagtactgggattacaggcttgagccactgcacccagcccccttttgctacattctttggagcgtctgataaggagaatttgaatcgtagctcgagagccagaggaagagatgccatcttaataatcacagaaaaagaggaaagcaatgaaaaacattaggatcaagtagacagacattcgatcatgcttttctgccaggagtgaatttccatgatcccactgatgacttagactgttctcccttgattcaggctctagagaagcattcaaacgttgggactatatttctgacatcgttattaagtgattttactacagatgagaaggcttggaggtcttcccctatctcagcattgtctgttctaaagcctaatgcagctttgtctgtatttgctgaccaggagcatggggaagtgattgactgtgtgcaggagctgagccactccgtgaacaagctgtttggtctggcgtctgcagccgttgacagatgcgtcagattcaccaatggcctggggacctgcggcctgttgtcagccctgaaatccctctttgccaagtatgtgtctgatttcaccagcactctccagtccatacgaaagaagtgcaaactggaccacattcctcccaactccctcttccaggaagattggacggcttttcagaactccattaggataatagccacctgtggagagcttttgcggcattgtggggacttcgagcagcagctagccaacaggattttgtccacagctgggaagtatctatctgattcctgcagcccccggagcctggctggttttcaggagagcatcttgacagacaagaagaactctgccaagaacccatggcaagaatataattacctccagaaagataaccctgctgaatatgccagtttaatggaaatactttatacccttaaggaaaaagggtcaagcaaccacaacctgctggctgcacctcgagcagcgctgactcggcttaaccagcaggcccaccagctggctttcgattccgtgttcctgcgcatcaaacaacagctgttgcttatttcgaagatggacagctggaatacggctggcatcggagaaaccctcacagatgaactgcccgcctttagtctcacccctctcgagtacatcagcaacatcgggcagtacatcatgtccctccccctgaatcttgagccatttgtgactcaggaggactctgccttagagttggcattgcacgctggaaagctgccatttcctcctgagcagggggatgaattgcccgagctggacaacatggctgacaactggctgggctcgatcgccagagccacaatgcagacctactgtgatgcgatcctacagatccctgagctgagcccacactctgccaagcagctggccactgacatcgactatctgatcaacgtgatggatgccctgggcctgcagccgtcccgcaccctccagcacatcgtgacgctactgaagacccaggcctgaggactatagacaggtcagcaaaggcctgccccgtcgcctggccaccaccgtggccaccatgcggagtgtgaattactgaccccaccacacaccggaccaccaagagagccagggctgctgtttcgcgactcaccagcacagatttgctcagaaactctgcccaagattgggcagaagttactttaaaaagacttggttcagctggtcacggtggctcacgcctgtaatcccagcactttgggaggccaagccagatggatcatgaagccaggagttcgagaccagcctgaccaacatggtgaaaccccatctctactaaaaatacaaaaattaacagcagagcgagactctgtctcaaaaaaaaaaaaaaaaaagacttggttcatttgtataatcaaaaagagttgtaaattaaagatgtattatttatcagagaagactttttagataatttttttaaaggatcagatcttgaaaatggaataaataactactgtgaaatgcaaaaaaaaa

SEQ ID NO: 360914 - DNA, 2122 bp, Homo sapiens
aactgagtgcgctgagcggggaagcgcaaaggggcaagttacccgtcctggcgtttctggggttcgcctcggaggctagcctcggtgctctcgcaggctcgctcgcttctgcatccccgttgccgcccggagccaactcttaagttctggacgccaggcctgaggcagttccgccatggacttctccaagttcctggcagacgacttcgacgtgaaggagtggatcaatgcggccttcagggccggctccaaggaggcggcgtccgggaaggcggatggccacgcagccaccctggtgatgaagctgcagctgttcatccaagaggtgaaccacgccgtggaggaaacaagtcaccaagctctccagaacatgcccaaagtgctccgtgatgttgaagccctaaaacaggaggcatctttcctgaaagaacagatgattcttgtcaaggaggacattaaaaaatttgaacaggacacatctcaatccatgcaggtgttggtagaaattgaccaagtgaagtccagaatgcaacttgctgccgaatctcttcaggaagcagataagtggagcacgttgagcgccgatattgaggagacatttaagactcaggacatagctgtgatttctgccaagctaacaggtatgcagaacagcttaatgatgcttgttgatacaccagactactcagaaaagtgtgtgcacttggaggcactgaagaacaggctggaggccctagccagtccacagattgtagcggcattcacctctcaggctgtagatcagtccaaagtgtttgtgaaggtgtttactgaaattgaccggatgccccagctcctggcctactactacaagtgtcacaaggtgcagcttttagcagcctggcaagagctgtgtcaaagtgacctatccctggaccggcagcttaccggactctatgatgccttgcttggtgcttggcacacacaaatccagtgggctacacaggttttccagaagccccacgaggtggtaatggtgctgctgattcagaccctgggggccctcatgccctcgctgccctcctgcctcagcaacggcgtggagagggcagggcccgagcaggagctcaccaggctgctggagttctacgacgccaccgcccacttcgccaagggcttggagatggcactgctcccccacctacatgaacacaatctggtaaaagtcacggagctggtggatgctgtgtatgatccatacaaaccctaccagctgaagtatggcgacatggaagagagcaacctcctcatccagatgagtgctgtgcctctggagcatggggaagtgattgactgtgtgcaggagctgagccactccgtgaacaagctgtttggtctggcgtctgcagccgttgacagatgcgtcagattcaccaatggcctggggacctgcggcctgttgtcagccctgaaatccctctttgccaagtatgtgtctgatttcaccagcactctccagtccatacgaaagaagtgcaaactggaccacattcctcccaactccctcttccaggaagattggacggcttttcagaactccattaggataatagccacctgtggagagcttttgcggcattgtggggacttcgagcagcagctagccaacaggattttgtccacagctgggaagtatctatctgattcctgcagcccccggagcctggctggttttcaggagagcatcttgacagacaagaagaactctgccaagaacccatggcaagaatataattacctccagaaagataaccctgctgaatatgccagtttaatggaaatactttatacccttaaggaaaaagggtcaagcaaccacaacctgctggctgcacctcgagcagcgctgactcggcttaaccagcaggcccaccagctggctttcgattccgtgttcctgcgcatcaaacaacagctgttgcttatttcgaagatggacgtgagtttctcactgaccacatcaatttttcccgggtcctgcctccaactcaagcatactgagtgtgggcttaaccctccctgttccaagagctttgggaagatcccgctttaactttcccaagccggaaagagccactttcca

SEQ ID NO: 360915 - DNA, 1591 bp, Homo sapiens
aactgagtgcgctgagcggggaagcgcaaaggggcaagttacccgtcctggcgtttctggggttcgcctcggaggctagcctcggtgctctcgcaggctcgctcgcttctgcatccccgttgccgcccggagccaactcttaagttctggacgccaggcctgaggcagttccgccatggacttctccaagttcctggcagacgacttcgacgtgaaggagtggatcaatgcggccttcagggccggctccaaggaggcggcgtccgggaaggcggatggccacgcagccaccctggtgatgaagctgcagctgttcatccaagaggtgaaccacgccgtggaggaaacaagtcaccaagctctccagaacatgcccaaagtgctccgtgatgttgaagccctaaaacaggaggcatctttcctgaaagaacagatgattcttgtcaaggaggacattaaaaaatttgaacaggacacatctcaatccatgcaggtgttggtagaaattgaccaagtgaagtccagaatgcaacttgctgccgaatctcttcaggaagcagataagtggagcacgttgagcgccgatattgaggagacatttaagactcaggacatagctgtgatttctgccaagctaacaggtatgcagaacagcttaatgatgcttgttgatacaccagactactcagaaaagtgtgtgcacttggaggcactgaagaacaggctggaggccctagccagtccacagattgtagcggcattcacctctcaggctgtagatcagtccaaagtgtttgtgaaggtgtttactgaaattgaccggatgccccagctcctggcctactactacaagtgtcacaaggtgcagcttttagcagcctggcaagagctgtgtcaaagtgacctatccctggaccggcagcttaccggactctatgatgccttgcttggtgcttggcacacacaaatccagtgggctacacaggttttccagaagccccacgaggtggtaatggtgctgctgattcagaccctgggggccctcatgccctcgctgccctcctgcctcagcaacggcgtggagagggcagggcccgagcaggagctcaccaggctgctggagttctacgacgccaccgcccacttcgccaagggcttggagatggcactgctcccccacctacatgaacacaatctggtaaaagtcacggagctggtggatgctgtgtatgatccatacaaaccctaccagctgaagtatggcgacatggaagagagcaacctcctcatccagatgagtgctgtgcctctggtaaagtcgcagtgtcctggggccactgaggaagcattctgttagccagggtcttggccacgtctgggagagggctgggggttgggatccggggtgctgaaatatgacctttaagcacttgtgggctcttgtaatcccaatgtaaaatgagaccatatatttgctaccaattttctattgattgatggattgagacagagtctccatctgtcgcccaggctggagtgtagtggtgcgattgattacaactcactgcagccttgatctcctgggctcaag

SEQ ID NO: 360916 - DNA, 854 bp, Homo sapiens
ggatgggagtgatgttggttagttctttattaaattagagttcctagactcgagccaagctcacagtctggtctgacactgtgggaagaacctggtgagtaaagggcctattgagggcagggttggcgccccacatctagggacttggcagggcagcttctctgtttcgtattcaggggaggccctgtggggctctgacctgcttggtgctgagtctgtggagctctgtctgtctcctctccgcccccacagactatctgatcaacgtgatggatgccctgggcctgcagccgtcccgcaccctccagcacatcgtgacgctactgaagacccaggcctgaggactatagacaggtcagcaaaggcctgccccgtcgcctggccaccaccgtggccaccatgcggagtgtgaattactgaccccaccacacaccggaccaccaagagagccagggctgctgtttcgcgactcaccagcacagatttgctcagaaactctgcccaagattgggcagaagttactttaaaaagacttggttcagctggtcacggtggctcacgcctgtaatcccagcactttgggaggccaagccagatggatcatgaagccaggagttcgagaccagcctgaccaacatggtgaaaccccatctctactaaaaatacaaaaattaacagcagagcgagactctgtctcaaaaaaaaaaaaaaaaaagacttggttcatttgtataatcaaaaagagttgtaaattaaagatgtattatttatcagagaagactttttagataatttttttaaaggatcagatcttgaaaatggaataaataactactgtgaaatgcaaaaaaaaa

SEQ ID NO: 360917 - DNA, 984 bp, Homo sapiens
atacatactcgttgcctttaccaccccaggactgggtgcagtggcacaatcacagctcacttcaaccttgatctcccaggctcaagcgatcctcccacctcagcttcccagtagttgggactacaggtgcatgtcaccatgccaggctaattttttgtagagatggggtttcgccatgttgaccaggctggtctcaaactcctgggctggagcaatctgcccacgtctgccatccaaagtactgggattacaggcttgagccactgcacccagcccccttttgctacattctttggagcgtctgataaggagaatttgaatcgtagctcgagagccagaggaagagatgccatcttaataatcacagaaaaagaggaaagcaatgaaaaacattaggatcaagtagacagacattcgatcatgcttttctgccaggagtgaatttccatgatcccactgatgacttagactgttctcccttgattcaggctctagagaagcattcaaacgttgggactatatttctgacatcgttattaagtgattttactacagatgagaaggcttggaggtcttcccctatctcagcattgtctgttctaaagcctaatgcagctttgtctgtatttgctgaccaggagcatggggaagtgattgactgtgtgcaggagctgagccactccgtgaacaagctgtttggtctggcgtctgcagccgttgacagatgcgtcagattcaccaatggcctggggacctgcggcctgttgtcagccctgaaatccctctttgccaagtaaggctggggaactggggaccagacgggccacattggagcagtgtctgtcccagataaaaatgcacgtgttctgtatttgttctctgaaccctgggaaacacttgcacctgaacccaagaggatgttgttaaggatattcatagtggcattgtttgtaatggtggaacatttgaaacaacgtaaatgtc

SEQ ID NO: 360918 - DNA, 342 bp, Homo sapiens
acctatgttgacgtacccaataaggttccctttgttctgtctctgcaggtgcagcttttagcagcctggcaagagctgtgtcaaagtgacctatccctggaccggcagcttaccggactctatgatgccttgcttggtgcttggcacacacaaatccagtgggctacacaggtaacagctcatttttgttctagggagaacagagtctgtggtgacaagggaacgggtgactgcctcgggagtggccaccctcaactgcagagcacagctcaaagaacttccccgtttgttgctgtcattcaaggggttaaaaaataaccagttaggccgggtgcggtggct

SEQ ID NO: 360919 - DNA, 654 bp, Homo sapiens
ctgaactgattgtaggagaagcttccatgaatgataaaagctgcttaacaaaatatagtcccctctggagatcaaatggggaaagttctagtagagcgcctcttgattgttgctttcccacagttaatttcagattctttgttcattatcgttttacatttctgattccctaaagatgaacacaatctggtaaaagtcacggagctggtggatgctgtgtatgatccatacaaaccctaccagctgaagtatggcgacatggaagagagcaacctcctcatccagatgagtgctgtgcctctggtaaagtcgcagtgtcctggggccactgaggaagcattctgttagccagggtcttggccacgtctgggagagggctgggggttgggatccggggtgctgaaatatgacctttaagcacttgtgggctcttgtaatcccaatgtaaaatgagaccatatatttgctaccaattttctattgattgatggattgagacagagtctccatctgtcgcccaggctggagtgtagtggtgcgattgattacaactcactgcagccttgatctcctgggctcaagtgatcctcctgcctcagcctcctgagtagctgggactccaggcatgcaccaccacgcctggctcatttttgt

SEQ ID NO: 360920 - DNA, 938 bp, Homo sapiens
aatattgaggtcattataagaaggatgaatctataatctatatgcaagctaccagtgattcttttttagggtactgccataacaagcatcgccacatactagaaagatcagacttgggatcacccgaggtctagcaattttgtctctctgccgtttgccttcacacaaatgtacccataaagtaataacccgtatgtgtcaatgtcaggctaacagcgctttcttttgtttcagatcgggcagtacatcatgtccctccccctgaatcttgagccatttgtgactcaggaggactctgccttagagttggcattgcacgctggaaagctgccatttcctcctgagcagggggatgaattgcccgagctggacaacatggctgacaactggctgggctcgatcgccagagccacaatgcagacctactgtgatgcgatcctacagatccctgagctgagcccacactctgccaagcagctggccactgacatcgactatctgatcaacgtgatggatgccctgggcctgcagccgtcccgcaccctccagcacatcgtgacgctactgaagacccaggcctgaggactatagacaggtcagcaaaggcctgccccgtcgcctggccaccaccgtggccaccatgcggagtgtgaattactgaccccaccacacaccggaccaccaagagagccagggctgctgtttcgcgactcaccagcacagatttgctcagaaactctgcccaagattgggcagaagttactttaaaaagacttggttcagctggtcacggtggctcacgcctgtaatcccagcactttgggaggccaagccagatggatcatgaagccaggagttcgagaccagcctgaccaacatggtgaaaccccatctctactaaaaatacaaaaattaacagcagagcgagactctgtctc

SEQ ID NO: 360921 - DNA, 2923 bp, Homo sapiens
aactgagtgcgctgagcggggaagcgcaaaggggcaagttacccgtcctggcgtttctggggttcgcctcggaggctagcctcggtgctctcgcaggctcgctcgcttctgcatccccgttgccgcccggagccaactcttaagttctggacgccaggcctgaggcagttccgccatggacttctccaagttcctggcagacgacttcgacgtgaaggagtggatcaatgcggccttcagggccggctccaaggaggcggcgtccgggaaggcggatggccacgcagccaccctggtgatgaagctgcagctgttcatccaagaggtgaaccacgccgtggaggaaacaagtcaccaagctctccagaacatgcccaaagtgctccgtgatgttgaagccctaaaacaggaggcatctttcctgaaagaacagatgattcttgtcaaggaggacattaaaaaatttgaacaggacacatctcaatccatgcaggtgttggtagaaattgaccaagtgaagtccagaatgcaacttgctgccgaatctcttcaggaagcagataagtggagcacgttgagcgccgatattgaggagacatttaagactcaggacatagctgtgatttctgccaagctaacaggtatgcagaacagcttaatgatgcttgttgatacaccagactactcagaaaagtgtgtgcacttggaggcactgaagaacaggctggaggccctagccagtccacagattgtagcggcattcacctctcaggctgtagatcagtccaaagtgtttgtgaaggtgtttactgaaattgaccggatgccccagctcctggcctactactacaagtgtcacaaggtgcagcttttagcagcctggcaagagctgtgtcaaagtgacctatccctggaccggcagcttaccggactctatgatgccttgcttggtgcttggcacacacaaatccagtgggctacacaggttttccagaagccccacgaggtggtaatggtgctgctgattcagaccctgggggccctcatgccctcgctgccctcctgcctcagcaacggcgtggagagggcagggcccgagcaggagctcaccaggctgctggagttctacgacgccaccgcccacttcgccaagggcttggagatggcactgctcccccacctacatgaacacaatctggtaaaagtcacggagctggtggatgctgtgtatgatccatacaaaccctaccagctgaagtatggcgacatggaagagagcaacctcctcatccagatgagtgctgtgcctctggagcatggggaagtgattgactgtgtgcaggagctgagccactccgtgaacaagctgtttggtctggcgtctgcagccgttgacagatgcgtcagattcaccaatggcctggggacctgcggcctgttgtcagccctgaaatccctctttgccaagtatgtgtctgatttcaccagcactctccagtccatacgaaagaagtgcaaactggaccacattcctcccaactccctcttccaggaagattggacggcttttcagaactccattaggataatagccacctgtggagagcttttgcggcattgtggggacttcgagcagcagctagccaacaggattttgtccacagctgggaagtatctatctgattcctgcagcccccggagcctggctggttttcaggagagcatcttgacagacaagaagaactctgccaagaacccatggcaagaatataattacctccagaaagataaccctgctgaatatgccagtttaatggaaatactttatacccttaaggaaaaagggtcaagcaaccacaacctgctggctgcacctcgagcagcgctgactcggcttaaccagcaggcccaccagctggctttcgattccgtgttcctgcgcatcaaacaacagctgttgcttatttcgaagatggacagctggaatacggctggcatcggagaaaccctcacagatgaactgcccgcctttagtctcacccctctcgagtacatcagcaacatcgggcagtacatcatgtccctccccctgaatcttgagccatttgtgactcaggaggactctgccttagagttggcattgcacgctggaaagctgccatttcctcctgagcagggggatgaattgcccgagctggacaacatggctgacaactggctgggctcgatcgccagagccacaatgcagacctactgtgatgcgatcctacagatccctgagctgagcccacactctgccaagcagctggccactgacatcgactatctgatcaacgtgatggatgccctgggcctgcagccgtcccgcaccctccagcacatcgtgacgctactgaagacccaggcctgaggactatagacaggtcagcaaaggcctgccccgtcgcctggccaccaccgtggccaccatgcggagtgtgaattactgaccccaccacacaccggaccaccaagagagccagggctgctgtttcgcgactcaccagcacagatttgctcagaaactctgcccaagattgggcagaagttactttaaaaagacttggttcagctggtcacggtggctcacgcctgtaatcccagcactttgggaggccaagccagatggatcatgaagccaggagttcgagaccagcctgaccaacatggtgaaaccccatctctactaaaaatacaaaaattaacagcagagcgagactctgtctcaaaaaaaaaaaaaaaaaagacttggttcatttgtataatcaaaaagagttgtaaattaaagatgtattatttatcagagaagactttttagataatttttttaaaggatcagatcttgaaaatggaataaataactactgtgaaatgcaaaaaaaaa

SEQ ID NO: 360922 - DNA, 2732 bp, Homo sapiens
tgcccaggctggtctggaactcctggtctcaagtgatcctcccatcttggcctcccaaagtgctgggattacaggcgtgagccactgtgcctggctccccgaaactatgcttttgcttgggtctttcagctggttcatctcttcagcactgctgaataaatttagccagatgattggtgttttgggagacagaagctccctaaagacagaagcaagccaccatacttacatttcaagtccctggtggcagatggagaaaaaggacctaccccttcatttttcacccctcacgcctctttcaggtgttggtagaaattgaccaagtgaagtccagaatgcaacttgctgccgaatctcttcaggaagcagataagtggagcacgttgagcgccgatattgaggagacatttaagactcaggacatagctgtgatttctgccaagctaacaggtatgcagaacagcttaatgatgcttgttgatacaccagactactcagaaaagtgtgtgcacttggaggcactgaagaacaggctggaggccctagccagtccacagattgtagcggcattcacctctcaggctgtagatcagtccaaagtgtttgtgaaggtgtttactgaaattgaccggatgccccagctcctggcctactactacaagtgtcacaaggtgcagcttttagcagcctggcaagagctgtgtcaaagtgacctatccctggaccggcagcttaccggactctatgatgccttgcttggtgcttggcacacacaaatccagtgggctacacaggttttccagaagccccacgaggtggtaatggtgctgctgattcagaccctgggggccctcatgccctcgctgccctcctgcctcagcaacggcgtggagagggcagggcccgagcaggagctcaccaggctgctggagttctacgacgccaccgcccacttcgccaagggcttggagatggcactgctcccccacctacatgaacacaatctggtaaaagtcacggagctggtggatgctgtgtatgatccatacaaaccctaccagctgaagtatggcgacatggaagagagcaacctcctcatccagatgagtgctgtgcctctggagcatggggaagtgattgactgtgtgcaggagctgagccactccgtgaacaagctgtttggtctggcgtctgcagccgttgacagatgcgtcagattcaccaatggcctggggacctgcggcctgttgtcagccctgaaatccctctttgccaagtatgtgtctgatttcaccagcactctccagtccatacgaaagaagtgcaaactggaccacattcctcccaactccctcttccaggaagattggacggcttttcagaactccattaggataatagccacctgtggagagcttttgcggcattgtggggacttcgagcagcagctagccaacaggattttgtccacagctgggaagtatctatctgattcctgcagcccccggagcctggctggttttcaggagagcatcttgacagacaagaagaactctgccaagaacccatggcaagaatataattacctccagaaagataaccctgctgaatatgccagtttaatggaaatactttatacccttaaggaaaaagggtcaagcaaccacaacctgctggctgcacctcgagcagcgctgactcggcttaaccagcaggcccaccagctggctttcgattccgtgttcctgcgcatcaaacaacagctgttgcttatttcgaagatggacagctggaatacggctggcatcggagaaaccctcacagatgaactgcccgcctttagtctcacccctctcgagtacatcagcaacatcgggcagtacatcatgtccctccccctgaatcttgagccatttgtgactcaggaggactctgccttagagttggcattgcacgctggaaagctgccatttcctcctgagcagggggatgaattgcccgagctggacaacatggctgacaactggctgggctcgatcgccagagccacaatgcagacctactgtgatgcgatcctacagatccctgagctgagcccacactctgccaagcagctggccactgacatcgactatctgatcaacgtgatggatgccctgggcctgcagccgtcccgcaccctccagcacatcgtgacgctactgaagacccaggcctgaggactatagacaggtcagcaaaggcctgccccgtcgcctggccaccaccgtggccaccatgcggagtgtgaattactgaccccaccacacaccggaccaccaagagagccagggctgctgtttcgcgactcaccagcacagatttgctcagaaactctgcccaagattgggcagaagttactttaaaaagacttggttcagctggtcacggtggctcacgcctgtaatcccagcactttgggaggccaagccagatggatcatgaagccaggagttcgagaccagcctgaccaacatggtgaaaccccatctctactaaaaatacaaaaattaacagcagagcgagactctgtctcaaaaaaaaaaaaaaaaaagacttggttcatttgtataatcaaaaagagttgtaaattaaagatgtattatttatcagagaagactttttagataatttttttaaaggatcagatcttgaaaatggaataaataactactgtgaaatgcaaaaaaaaa

SEQ ID NO: 360923 - DNA, 2054 bp, Homo sapiens
gtctcgatagtagtgtcctgggagatcccggatcagttatccggattatactcattagctcctgcacgtactcaatgcgggtgacctccatgaaatcgtcgtataagtcaatctgtgaatcgaggccaagcgaatagaggatgacgttgagcccagaatactcagctcagaaatgagtaatcatgtgcatagcattagtcctcgatgtaaaatggatattcgatcatgcttttctgccaggagtgaatttccatgatcccactgatgacttagactgttctcccttgattcaggctctagagaagcattcaaacgttgggactatatttctgacatcgttattaagtgattttactacagatgagaaggcttggaggtcttcccctatctcagcattgtctgttctaaagcctaatgcagctttgtctgtatttgctgaccaggagcatggggaagtgattgactgtgtgcaggagctgagccactccgtgaacaagctgtttggtctggcgtctgcagccgttgacagatgcgtcagattcaccaatggcctggggacctgcggcctgttgtcagccctgaaatccctctttgccaagtatgtgtctgatttcaccagcactctccagtccatacgaaagaagtgcaaactggaccacattcctcccaactccctcttccaggaagattggacggcttttcagaactccattaggataatagccacctgtggagagcttttgcggcattgtggggacttcgagcagcagctagccaacaggattttgtccacagctgggaagtatctatctgattcctgcagcccccggagcctggctggttttcaggagagcatcttgacagacaagaagaactctgccaagaacccatggcaagaatataattacctccagaaagataaccctgctgaatatgccagtttaatggaaatactttatacccttaaggaaaaagggtcaagcaaccacaacctgctggctgcacctcgagcagcgctgactcggcttaaccagcaggcccaccagctggctttcgattccgtgttcctgcgcatcaaacaacagctgttgcttatttcgaagatggacagctggaatacggctggcatcggagaaaccctcacagatgaactgcccgcctttagtctcacccctctcgagtacatcagcaacatcgggcagtacatcatgtccctccccctgaatcttgagccatttgtgactcaggaggactctgccttagagttggcattgcacgctggaaagctgccatttcctcctgagcagggggatgaattgcccgagctggacaacatggctgacaactggctgggctcgatcgccagagccacaatgcagacctactgtgatgcgatcctacagatccctgagctgagcccacactctgccaagcagctggccactgacatcgactatctgatcaacgtgatggatgccctgggcctgcagccgtcccgcaccctccagcacatcgtgacgctactgaagacccaggcctgaggactatagacaggtcagcaaaggcctgccccgtcgcctggccaccaccgtggccaccatgcggagtgtgaattactgaccccaccacacaccggaccaccaagagagccagggctgctgtttcgcgactcaccagcacagatttgctcagaaactctgcccaagattgggcagaagttactttaaaaagacttggttcagctggtcacggtggctcacgcctgtaatcccagcactttgggaggccaagccagatggatcatgaagccaggagttcgagaccagcctgaccaacatggtgaaaccccatctctactaaaaatacaaaaattaacagcagagcgagactctgtctcaaaaaaaaaaaaaaaaaagacttggttcatttgtataatcaaaaagagttgtaaattaaagatgtattatttatcagagaagactttttagataatttttttaaaggatcagatcttgaaaatggaataaataactactgtgaaatgcaaaaaaaaa

SEQ ID NO: 360924 - DNA, 1095 bp, Homo sapiens
aatattgaggtcattataagaaggatgaatctataatctatatgcaagctaccagtgattcttttttagggtactgccataacaagcatcgccacatactagaaagatcagacttgggatcacccgaggtctagcaattttgtctctctgccgtttgccttcacacaaatgtacccataaagtaataacccgtatgtgtcaatgtcaggctaacagcgctttcttttgtttcagatcgggcagtacatcatgtccctccccctgaatcttgagccatttgtgactcaggaggactctgccttagagttggcattgcacgctggaaagctgccatttcctcctgagcagggggatgaattgcccgagctggacaacatggctgacaactggctgggctcgatcgccagagccacaatgcagacctactgtgatgcgatcctacagatccctgagctgagcccacactctgccaagcagctggccactgacatcgactatctgatcaacgtgatggatgccctgggcctgcagccgtcccgcaccctccagcacatcgtgacgctactgaagacccaggcctgaggactatagacaggtcagcaaaggcctgccccgtcgcctggccaccaccgtggccaccatgcggagtgtgaattactgaccccaccacacaccggaccaccaagagagccagggctgctgtttcgcgactcaccagcacagatttgctcagaaactctgcccaagattgggcagaagttactttaaaaagacttggttcagctggtcacggtggctcacgcctgtaatcccagcactttgggaggccaagccagatggatcatgaagccaggagttcgagaccagcctgaccaacatggtgaaaccccatctctactaaaaatacaaaaattaacagcagagcgagactctgtctcaaaaaaaaaaaaaaaaaagacttggttcatttgtataatcaaaaagagttgtaaattaaagatgtattatttatcagagaagactttttagataatttttttaaaggatcagatcttgaaaatggaataaataactactgtgaaatgcaaaaaaaaa

SEQ ID NO: 360925 - DNA, 104 bp, Homo sapiens
aagctgcagctgttcatccaagaggtgaaccacgccgtggagggtgagccgctcggggccctggccgcgggaccctcccctgctctcggctgggcagaggtcac

SEQ ID NO: 360926 - DNA, 3806 bp, Homo sapiens
  misc_feature (3789)..(3789): n is a, c, g, or t
  misc_feature (3798)..(3798): n is a, c, g, or t
cttttatgtaatgacaccattactgcttgtgattattctgatatgatactttatctgtttttttttcctaaatatcacaagctattaaatttatttcacaattgactagtagaccactttgtcaatttggaaaacattcttgttaaagacaaacatatctacatccagaaactttctataccttgctttcaaagagacagcattctttgctagccttccaattttgactcagtgcaaaagccttagaaggatccagtgcataggtcttcatgctttcctttcaccccaagtgattatcaactttgatttttctcttcagcaataactcacttggtgtacccctacctcaggtacagcttttcaactttgcagcaaaactgtactttctagttctttttgtatttcagataccttacttgtaaaagctcttttgctctatgacctggctcaaacttaaacttggatttgaagttagaagaaatgttggaagtcatttatatatgaagaaatgttggaaggactcatatatgcatacattccttgagtgactatgaatgactgccgggcagtaacttctgggctgtggttgtaaactgtgagcactacaaaatgtttttccttattgataccatattatggtaggaaagacatggaataaaaaatttagatagtatgtcagtagttgtgtttttaaatgggtttcattagtgcttagcaattgggagcttggtggaccatctcttggttttggaccatctcttggtttctgtcagtatgtaaaccagaaacttcaaatgtgtcacaaaagatgagcagaactatcccgaggttcattaaagtcttttactctgtcctcagtgtgaaatcttaaatctttgaacaaaaaaattcactatctctctgaatcctttgtccttacaggagagaaaaatcaaagtaagttaattactgttcaagacagagaatcagaagaagagctttcttgttggcaaatctggcaacaaattgcaaatgacttaaccaggtgtcaagactccatgatcaataattctcagtgtcacaaacaaggtgatttcccttaccaggtagggacagaactgtctattcaaatttctgaagatgagaactatatagtaaataaagcagatggtcccaataatactgggaatccagagtttcctatcttgagaacccaggattcttggaggaaaacattcctgactgagtcacagagattgaacagagatcagcaaatttccataaaaaataaattatgtcaatgtaagaagggtgttgatcccatcggttggatttcacatcatgatggtcatagagtacacaaaagtgaaaaatcttatagacccaatgattatgaaaaagacaacatgaagattttgacatttgatcacaatagcatgattcacacaggacagaaatcgtaccagtgtaatgagtgtaaaaaacccttcagtgatctctccagctttgatcttcatcagcagttacaatcaggagagaagtctcttacatgtgttgagcgtggaaaaggcttctgttacagcccagttcttcctgttcatcagaagagtacatgtgggagaaaaacttaagtgtgatgagtgtggtaaggaattcagtcagggcgctcatctacagacccatcagaaagtccacgtgatagagaaaccatacaaatgtaagcaatgtgggaaaggtttcagtcgtagatcagcacttaatgttcattgcaaggtccacacggcagagaaaccttataattgtgaggagtgtgggagggccttcagtcaggcctctcatcttcaggaccatcagagactccacactggggagaagccattcaaatgtgatgcatgtggtaagagcttcagtcggaattcacatcttcaatcccatcaaagagttcatacaggagagaaaccatacaaatgtgaggagtgtggtaagggcttcatttgtagctcaaatctttacattcatcagagagtccacacaggagaaaaaccctataaatgtgaggaatgtggtaaaggctttagtcggccttcaagtcttcaggcccatcagggagttcacactggagagaagtcatacatatgtactgtatgtgggaaaggctttactctgagttcaaatcttcaagcccatcagagagtccacactggagagaagccatacaaatgcaatgagtgtgggaagagcttcaggaggaattcccattatcaagttcatctagtggtccacacaggagagaaaccctataaatgtgagatatgtgggaagggcttcagtcaaagttcgtatcttcaaatccatcagaaggcccacagtatagagaaaccttttaagtgtgaggagtgtgggcagggtttcaatcagagctcacgacttcagattcaccagctgatccatacgggtgagaaaccatacaaatgtgaagagtgtggcaagggatttagtcgtagagcagatcttaaaattcactgtaggatccacacaggagagaaaccatataattgtgaggagtgtgggaaggtcttcaggcaggcctcaaatcttttggcccatcagagagtccacagtggagaaaaaccattcaaatgtgaagaatgtgggaagagtttcggtcggagtgcacatcttcaagcccatcaaaaagtccacactggagataagccatacaaatgtgatgagtgtgggaagggcttcaagtggagcttgaaccttgacatgcatcagagggtgcacacaggagaaaaaccatataaatgtggggagtgtggtaagtacttcagtcaggcctcaagtcttcaacttcatcagagtgtccacacaggagagaaaccatacaaatgtgatgtgtgtggtaaagtcttcagtcggtcttcacaactacagtctcatcagcgagttcacactggggagaaaccttataaatgtgagatatgtggtaagagcttcagttggcgatcaaatcttacagttcatcacagaatccatgttggtgataaatcctataaaagtaataggggtggtaagaacatcagagaatccacacaggaaaaaaaatctataaaatgattctttgtgaagactcgtgtcatttgaattcttccagttatcaagtctcaaagtcagtgtttcagccgtagctcctcatgtcccagtggtccaaagacaacaaaacaatctttatgattagcatagcaagggcttctttagtcagaaccttgacctttataaaatgttacttagaagaggggtgttaagagtgaaatttttctcaggccttttataaaagtatcatggtggacatgccaaaattaagtgtccactagaatgttaactccataaagacagaaactttgttcactactgaatctacataatcttaccattgccatatacttcacaggtgctcaatatttgttaataggtcctttttgaaaattatgttgagatcacctgcagaatatcatgaatttgtaaacaggaaacctgaaagtagccttaataagattaagtcgggagaccattgaaatgtagaaaaccactcaatactgaactccccaatgttaatttggcattgtcttgtgattagatcctgtcctcctttagcctcactaatcaagttgggtcctatcttcccagatgtctagttttctactggttttataccatatagattcaattatcttttgtaacagataattgtgttcatcttgtaataactggacactacatactacacttattttttcaacactgttnaggcagggntttaagtg

SEQ ID NO: 360927 - DNA, 1035 bp, Homo sapiens
aggcacttccgcccaggaagacgacgtagcagccatcttttccctggctttggtgattcagccctgacttctcaaaaagcactgcacagaggaggaggcagcagaaccccacttcagcttcttaggactctgcacttccccagaaggaagaattaaaaatgaatatgttcaaggaagcagtgaccttcaaggacgtggctgtggccttcacggaggaggaattggggctgctgggccctgcccagaggaagctgtaccgagatgtgatggtggagaactttaggaacctgctgtcagtggggcatccacccttcaaacaagatgtatcacctatagaaagaaatgagcagctttggataatgacgacagcaacccgaagacagggaaatttagtaaaaaccaaacagttatgagttcttatagttaactgtccatctgctttgcttcttcttagccttgttgccatcacctggtccaaattgccaactgtctttcctggattattgcaacaccctttgtactgcttgccctgctcccacccctctcctcttacattctgttctttaagtggcaaagtgagtttttgttaccttgtgtcagactatgttgttcttctgctcaaaattctctgtgacttattttacatagagtaaaatccacttaatgtggctgacagagtcttacacggtgtgctttcatcccccactacctctctaaatatatcttctatactctctttctgtgaattccagccacattgtcctccctcttgcttttcagacctatcaaggatgcttctgcctcacaaccctgtgtgttcttccctctgcctgaaataatcttttacctataatccttctggtcccttcttcattcatttctttgctcagttttagtattataagaaaggcctcggccgggcacggtggcttgcgcctgtaatcccagcacttcgcgaggctgaggtgggcagatcaatcatgaggtcaggagatcgagaccaacctggctaacacggtgaaaccctgtctctac

SEQ ID NO: 360928 - DNA, 1061 bp, Homo sapiens
aggcacttccgcccaggaagacgacgtagcagccatcttttccctggctttggtgattcagaaactcccgttctgtggcgaaattctccctgacttctcaaaaagcactgcacagaggaggaggcagcagaaccccacttcagcttcttaggactctgcacttccccagaaggaagaattaaaaatgaatatgttcaaggaagcagtgaccttcaaggacgtggctgtggccttcacggaggaggaattggggctgctgggccctgcccagaggaagctgtaccgagatgtgatggtggagaactttaggaacctgctgtcagtggggcatccacccttcaaacaagatgtatcacctatagaaagaaatgagcagctttggataatgacgacagcaacccgaagacagggaaatttagtaaaaaccaaacagttatgagttcttatagttaactgtccatctgctttgcttcttcttagccttgttgccatcacctggtccaaattgccaactgtctttcctggattattgcaacaccctttgtactgcttgccctgctcccacccctctcctcttacattctgttctttaagtggcaaagtgagtttttgttaccttgtgtcagactatgttgttcttctgctcaaaattctctgtgacttattttacatagagtaaaatccacttaatgtggctgacagagtcttacacggtgtgctttcatcccccactacctctctaaatatatcttctatactctctttctgtgaattccagccacattgtcctccctcttgcttttcagacctatcaaggatgcttctgcctcacaaccctgtgtgttcttccctctgcctgaaataatcttttacctataatccttctggtcccttcttcattcatttctttgctcagttttagtattataagaaaggcctcggccgggcacggtggcttgcgcctgtaatcccagcacttcgcgaggctgaggtgggcagatcaatcatgaggtcaggagatcgagaccaacctggctaacacggtgaaaccctgtctctac

SEQ ID NO: 360929 - DNA, 3687 bp, Homo sapiens
  misc_feature (3670)..(3670): n is a, c, g, or t
  misc_feature (3679)..(3679): n is a, c, g, or t
caagtcctgtgagcaagataagaatctatagaaccaagatgctcattttcagaagaaatatgttcaaggaagcagtgaccttcaaggacgtggctgtggccttcacggaggaggaattggggctgctgggccctgcccagaggaagctgtaccgagatgtgatggtggagaactttaggaacctgctgtcagtggggcatccacccttcaaacaagatgtatcacctatagaaagaaatgagcagctttggataatgacgacagcaacccgaagacagggaaatttagataccttacttgtaaaagctcttttgctctatgacctggctcaaacttaaacttggatttgaagttagaagaaatgttggaagtcatttatatatgaagaaatgttggaaggactcatatatgcatacattccttgagtgactatgaatgactgccgggcagtaacttctgggctgtggttgtaaactgtgagcactacaaaatgtttttccttattgataccatattatggtaggaaagacatggaataaaaaatttagatagtatgtcagtagttgtgtttttaaatgggtttcattagtgcttagcaattgggagcttggtggaccatctcttggttttggaccatctcttggtttctgtcagtatgtaaaccagaaacttcaaatgtgtcacaaaagatgagcagaactatcccgaggttcattaaagtcttttactctgtcctcagtgtgaaatcttaaatctttgaacaaaaaaattcactatctctctgaatcctttgtccttacaggagagaaaaatcaaagtaagttaattactgttcaagacagagaatcagaagaagagctttcttgttggcaaatctggcaacaaattgcaaatgacttaaccaggtgtcaagactccatgatcaataattctcagtgtcacaaacaaggtgatttcccttaccaggtagggacagaactgtctattcaaatttctgaagatgagaactatatagtaaataaagcagatggtcccaataatactgggaatccagagtttcctatcttgagaacccaggattcttggaggaaaacattcctgactgagtcacagagattgaacagagatcagcaaatttccataaaaaataaattatgtcaatgtaagaagggtgttgatcccatcggttggatttcacatcatgatggtcatagagtacacaaaagtgaaaaatcttatagacccaatgattatgaaaaagacaacatgaagattttgacatttgatcacaatagcatgattcacacaggacagaaatcgtaccagtgtaatgagtgtaaaaaacccttcagtgatctctccagctttgatcttcatcagcagttacaatcaggagagaagtctcttacatgtgttgagcgtggaaaaggcttctgttacagcccagttcttcctgttcatcagaagagtacatgtgggagaaaaacttaagtgtgatgagtgtggtaaggaattcagtcagggcgctcatctacagacccatcagaaagtccacgtgatagagaaaccatacaaatgtaagcaatgtgggaaaggtttcagtcgtagatcagcacttaatgttcattgcaaggtccacacggcagagaaaccttataattgtgaggagtgtgggagggccttcagtcaggcctctcatcttcaggaccatcagagactccacactggggagaagccattcaaatgtgatgcatgtggtaagagcttcagtcggaattcacatcttcaatcccatcaaagagttcatacaggagagaaaccatacaaatgtgaggagtgtggtaagggcttcatttgtagctcaaatctttacattcatcagagagtccacacaggagaaaaaccctataaatgtgaggaatgtggtaaaggctttagtcggccttcaagtcttcaggcccatcagggagttcacactggagagaagtcatacatatgtactgtatgtgggaaaggctttactctgagttcaaatcttcaagcccatcagagagtccacactggagagaagccatacaaatgcaatgagtgtgggaagagcttcaggaggaattcccattatcaagttcatctagtggtccacacaggagagaaaccctataaatgtgagatatgtgggaagggcttcagtcaaagttcgtatcttcaaatccatcagaaggcccacagtatagagaaaccttttaagtgtgaggagtgtgggcagggtttcaatcagagctcacgacttcagattcaccagctgatccatacgggtgagaaaccatacaaatgtgaagagtgtggcaagggatttagtcgtagagcagatcttaaaattcactgtaggatccacacaggagagaaaccatataattgtgaggagtgtgggaaggtcttcaggcaggcctcaaatcttttggcccatcagagagtccacagtggagaaaaaccattcaaatgtgaagaatgtgggaagagtttcggtcggagtgcacatcttcaagcccatcaaaaagtccacactggagataagccatacaaatgtgatgagtgtgggaagggcttcaagtggagcttgaaccttgacatgcatcagagggtgcacacaggagaaaaaccatataaatgtggggagtgtggtaagtacttcagtcaggcctcaagtcttcaacttcatcagagtgtccacacaggagagaaaccatacaaatgtgatgtgtgtggtaaagtcttcagtcggtcttcacaactacagtctcatcagcgagttcacactggggagaaaccttataaatgtgagatatgtggtaagagcttcagttggcgatcaaatcttacagttcatcacagaatccatgttggtgataaatcctataaaagtaataggggtggtaagaacatcagagaatccacacaggaaaaaaaatctataaaatgattctttgtgaagactcgtgtcatttgaattcttccagttatcaagtctcaaagtcagtgtttcagccgtagctcctcatgtcccagtggtccaaagacaacaaaacaatctttatgattagcatagcaagggcttctttagtcagaaccttgacctttataaaatgttacttagaagaggggtgttaagagtgaaatttttctcaggccttttataaaagtatcatggtggacatgccaaaattaagtgtccactagaatgttaactccataaagacagaaactttgttcactactgaatctacataatcttaccattgccatatacttcacaggtgctcaatatttgttaataggtcctttttgaaaattatgttgagatcacctgcagaatatcatgaatttgtaaacaggaaacctgaaagtagccttaataagattaagtcgggagaccattgaaatgtagaaaaccactcaatactgaactccccaatgttaatttggcattgtcttgtgattagatcctgtcctcctttagcctcactaatcaagttgggtcctatcttcccagatgtctagttttctactggttttataccatatagattcaattatcttttgtaacagataattgtgttcatcttgtaataactggacactacatactacacttattttttcaacactgttnaggcagggntttaagtg

SEQ ID NO: 360930 - DNA, 1204 bp, Homo sapiens
aggcacttccgcccaggaagacgacgtagcagccatcttttccctggctttggtgattcagaaactcccgttctgtggcgaaattctgtgagtccatgaagctggattgtccctgacctcttttgaggaaggagagggttgcttctaactggtcctgggagatgccactgtgatgtatccgggatgaagacacaatcctggttacttcatagcctgtttttcttccccagccctgacttctcaaaaagcactgcacagaggaggaggcagcagaaccccacttcagcttcttaggactctgcacttccccagaaggaagaattaaaaatgaatatgttcaaggaagcagtgaccttcaaggacgtggctgtggccttcacggaggaggaattggggctgctgggccctgcccagaggaagctgtaccgagatgtgatggtggagaactttaggaacctgctgtcagtggggcatccacccttcaaacaagatgtatcacctatagaaagaaatgagcagctttggataatgacgacagcaacccgaagacagggaaatttagtaaaaaccaaacagttatgagttcttatagttaactgtccatctgctttgcttcttcttagccttgttgccatcacctggtccaaattgccaactgtctttcctggattattgcaacaccctttgtactgcttgccctgctcccacccctctcctcttacattctgttctttaagtggcaaagtgagtttttgttaccttgtgtcagactatgttgttcttctgctcaaaattctctgtgacttattttacatagagtaaaatccacttaatgtggctgacagagtcttacacggtgtgctttcatcccccactacctctctaaatatatcttctatactctctttctgtgaattccagccacattgtcctccctcttgcttttcagacctatcaaggatgcttctgcctcacaaccctgtgtgttcttccctctgcctgaaataatcttttacctataatccttctggtcccttcttcattcatttctttgctcagttttagtattataagaaaggcctcggccgggcacggtggcttgcgcctgtaatcccagcacttcgcgaggctgaggtgggcagatcaatcatgaggtcaggagatcgagaccaacctggctaacacggtgaaaccctgtctctac

SEQ ID NO: 360931 - DNA, 1001 bp, Homo sapiens
aggcacttccgcccaggaagacgacgtagcagccatcttttccctggctttggtgattcagaaactcccgttctgtggcgaaattctgtgagtccatgaagctggattgtccctgacctcttttgaggaaggagagggttgcttctaactggtcctgggagatgccactgtgatgtatccgggatgaagacacaatcctggttacttcatagcctgtttttcttccccagccctgacttctcaaaaagcactgcacagaggaggaggcagcagaaccccacttcagcttcttaggactctgcacttccccagaaggaagaattaaaaatgaatatgttcaaggaagcagtgaccttcaaggacgtggctgtggccttcacggaggaggaattggggctgctgggccctgcccagaggaagctgtaccgagatgtgatggtggagaactttaggaacctgctgtcagtgggtgaggacagcctccctctggaatatctttgtgcccttggagttttaaggctttgtggcccttgaaattgttccctgagtgtgggaatctgactttcctaatttttgtgggatgcagagacactggatgtttctggtctttctgaacagaatattttaggtctttttcatttgtgttttatagaagaactgtaaatgaacagaatactgctatgccttgtctattctttttcatgttttacacctgtcccagtattgaattataaaaccaacttattgaatgtcatcagcagattttaatgaaataaaatagggtagaaaatactagaactccttaggaagaatggcacacactgcagcaaaaactctggccaattgcttgagtgatgtgagaaccaatgggagatttaaggaaaacagacattagttaaaaataggttattcaaacttggttttcataatatgtatttacgcatgtgtgtctgggtcatgaaataaatggtgtttctttactgaagtcacaatttaaataa

SEQ ID NO: 360932 - DNA, 3487 bp, Homo sapiens
  misc_feature (3470)..(3470): n is a, c, g, or t
  misc_feature (3479)..(3479): n is a, c, g, or t
ggaacctttcaaacttccccgaaatgcacttgtggtcagcagctagcggtcttttgtttggggaaaaaaaggagtagcggctaagagcggagccctgacttctcaaaaagcactgcacagaggaggaggcagcagaaccccacgggctgttttgggagagggactgagtacagtgcaacactactcaaactgtggttcacaaagcagcaacattggcatcacccaggtagaaaggctcattcttgagccctaccgaaggccttctgatttagcatttttgcagataggacccagaaatctgcatttcaacaaaatcccaagttcagcttcttaggactctgcacttccccagaaggaagaattaaaaatgaatatgttcaaggaagcagtgaccttcaaggacgtggctgtggccttcacggaggaggaattggggctgctgggccctgcccagaggaagctgtaccgagatgtgatggtggagaactttaggaacctgctgtcagtggggcatccacccttcaaacaagatgtatcacctatagaaagaaatgagcagctttggataatgacgacagcaacccgaagacagggaaatttaggagagaaaaatcaaagtaagttaattactgttcaagacagagaatcagaagaagagctttcttgttggcaaatctggcaacaaattgcaaatgacttaaccaggtgtcaagactccatgatcaataattctcagtgtcacaaacaaggtgatttcccttaccaggtagggacagaactgtctattcaaatttctgaagatgagaactatatagtaaataaagcagatggtcccaataatactgggaatccagagtttcctatcttgagaacccaggattcttggaggaaaacattcctgactgagtcacagagattgaacagagatcagcaaatttccataaaaaataaattatgtcaatgtaagaagggtgttgatcccatcggttggatttcacatcatgatggtcatagagtacacaaaagtgaaaaatcttatagacccaatgattatgaaaaagacaacatgaagattttgacatttgatcacaatagcatgattcacacaggacagaaatcgtaccagtgtaatgagtgtaaaaaacccttcagtgatctctccagctttgatcttcatcagcagttacaatcaggagagaagtctcttacatgtgttgagcgtggaaaaggcttctgttacagcccagttcttcctgttcatcagaagagtacatgtgggagaaaaacttaagtgtgatgagtgtggtaaggaattcagtcagggcgctcatctacagacccatcagaaagtccacgtgatagagaaaccatacaaatgtaagcaatgtgggaaaggtttcagtcgtagatcagcacttaatgttcattgcaaggtccacacggcagagaaaccttataattgtgaggagtgtgggagggccttcagtcaggcctctcatcttcaggaccatcagagactccacactggggagaagccattcaaatgtgatgcatgtggtaagagcttcagtcggaattcacatcttcaatcccatcaaagagttcatacaggagagaaaccatacaaatgtgaggagtgtggtaagggcttcatttgtagctcaaatctttacattcatcagagagtccacacaggagaaaaaccctataaatgtgaggaatgtggtaaaggctttagtcggccttcaagtcttcaggcccatcagggagttcacactggagagaagtcatacatatgtactgtatgtgggaaaggctttactctgagttcaaatcttcaagcccatcagagagtccacactggagagaagccatacaaatgcaatgagtgtgggaagagcttcaggaggaattcccattatcaagttcatctagtggtccacacaggagagaaaccctataaatgtgagatatgtgggaagggcttcagtcaaagttcgtatcttcaaatccatcagaaggcccacagtatagagaaaccttttaagtgtgaggagtgtgggcagggtttcaatcagagctcacgacttcagattcaccagctgatccatacgggtgagaaaccatacaaatgtgaagagtgtggcaagggatttagtcgtagagcagatcttaaaattcactgtaggatccacacaggagagaaaccatataattgtgaggagtgtgggaaggtcttcaggcaggcctcaaatcttttggcccatcagagagtccacagtggagaaaaaccattcaaatgtgaagaatgtgggaagagtttcggtcggagtgcacatcttcaagcccatcaaaaagtccacactggagataagccatacaaatgtgatgagtgtgggaagggcttcaagtggagcttgaaccttgacatgcatcagagggtgcacacaggagaaaaaccatataaatgtggggagtgtggtaagtacttcagtcaggcctcaagtcttcaacttcatcagagtgtccacacaggagagaaaccatacaaatgtgatgtgtgtggtaaagtcttcagtcggtcttcacaactacagtctcatcagcgagttcacactggggagaaaccttataaatgtgagatatgtggtaagagcttcagttggcgatcaaatcttacagttcatcacagaatccatgttggtgataaatcctataaaagtaataggggtggtaagaacatcagagaatccacacaggaaaaaaaatctataaaatgattctttgtgaagactcgtgtcatttgaattcttccagttatcaagtctcaaagtcagtgtttcagccgtagctcctcatgtcccagtggtccaaagacaacaaaacaatctttatgattagcatagcaagggcttctttagtcagaaccttgacctttataaaatgttacttagaagaggggtgttaagagtgaaatttttctcaggccttttataaaagtatcatggtggacatgccaaaattaagtgtccactagaatgttaactccataaagacagaaactttgttcactactgaatctacataatcttaccattgccatatacttcacaggtgctcaatatttgttaataggtcctttttgaaaattatgttgagatcacctgcagaatatcatgaatttgtaaacaggaaacctgaaagtagccttaataagattaagtcgggagaccattgaaatgtagaaaaccactcaatactgaactccccaatgttaatttggcattgtcttgtgattagatcctgtcctcctttagcctcactaatcaagttgggtcctatcttcccagatgtctagttttctactggttttataccatatagattcaattatcttttgtaacagataattgtgttcatcttgtaataactggacactacatactacacttattttttcaacactgttnaggcagggntttaagtg

SEQ ID NO: 360933 - DNA, 3278 bp, Homo sapiens
  misc_feature (3261)..(3261): n is a, c, g, or t
  misc_feature (3270)..(3270): n is a, c, g, or t
aggcacttccgcccaggaagacgacgtagcagccatcttttccctggctttggtgattcagccctgacttctcaaaaagcactgcacagaggaggaggcagcagaaccccacttcagcttcttaggactctgcacttccccagaaggaagaattaaaaatgaatatgttcaaggaagcagtgaccttcaaggacgtggctgtggccttcacggaggaggaattggggctgctgggccctgcccagaggaagctgtaccgagatgtgatggtggagaactttaggaacctgctgtcagtggggcatccacccttcaaacaagatgtatcacctatagaaagaaatgagcagctttggataatgacgacagcaacccgaagacagggaaatttaggagagaaaaatcaaagtaagttaattactgttcaagacagagaatcagaagaagagctttcttgttggcaaatctggcaacaaattgcaaatgacttaaccaggtgtcaagactccatgatcaataattctcagtgtcacaaacaaggtgatttcccttaccaggtagggacagaactgtctattcaaatttctgaagatgagaactatatagtaaataaagcagatggtcccaataatactgggaatccagagtttcctatcttgagaacccaggattcttggaggaaaacattcctgactgagtcacagagattgaacagagatcagcaaatttccataaaaaataaattatgtcaatgtaagaagggtgttgatcccatcggttggatttcacatcatgatggtcatagagtacacaaaagtgaaaaatcttatagacccaatgattatgaaaaagacaacatgaagattttgacatttgatcacaatagcatgattcacacaggacagaaatcgtaccagtgtaatgagtgtaaaaaacccttcagtgatctctccagctttgatcttcatcagcagttacaatcaggagagaagtctcttacatgtgttgagcgtggaaaaggcttctgttacagcccagttcttcctgttcatcagaagagtacatgtgggagaaaaacttaagtgtgatgagtgtggtaaggaattcagtcagggcgctcatctacagacccatcagaaagtccacgtgatagagaaaccatacaaatgtaagcaatgtgggaaaggtttcagtcgtagatcagcacttaatgttcattgcaaggtccacacggcagagaaaccttataattgtgaggagtgtgggagggccttcagtcaggcctctcatcttcaggaccatcagagactccacactggggagaagccattcaaatgtgatgcatgtggtaagagcttcagtcggaattcacatcttcaatcccatcaaagagttcatacaggagagaaaccatacaaatgtgaggagtgtggtaagggcttcatttgtagctcaaatctttacattcatcagagagtccacacaggagaaaaaccctataaatgtgaggaatgtggtaaaggctttagtcggccttcaagtcttcaggcccatcagggagttcacactggagagaagtcatacatatgtactgtatgtgggaaaggctttactctgagttcaaatcttcaagcccatcagagagtccacactggagagaagccatacaaatgcaatgagtgtgggaagagcttcaggaggaattcccattatcaagttcatctagtggtccacacaggagagaaaccctataaatgtgagatatgtgggaagggcttcagtcaaagttcgtatcttcaaatccatcagaaggcccacagtatagagaaaccttttaagtgtgaggagtgtgggcagggtttcaatcagagctcacgacttcagattcaccagctgatccatacgggtgagaaaccatacaaatgtgaagagtgtggcaagggatttagtcgtagagcagatcttaaaattcactgtaggatccacacaggagagaaaccatataattgtgaggagtgtgggaaggtcttcaggcaggcctcaaatcttttggcccatcagagagtccacagtggagaaaaaccattcaaatgtgaagaatgtgggaagagtttcggtcggagtgcacatcttcaagcccatcaaaaagtccacactggagataagccatacaaatgtgatgagtgtgggaagggcttcaagtggagcttgaaccttgacatgcatcagagggtgcacacaggagaaaaaccatataaatgtggggagtgtggtaagtacttcagtcaggcctcaagtcttcaacttcatcagagtgtccacacaggagagaaaccatacaaatgtgatgtgtgtggtaaagtcttcagtcggtcttcacaactacagtctcatcagcgagttcacactggggagaaaccttataaatgtgagatatgtggtaagagcttcagttggcgatcaaatcttacagttcatcacagaatccatgttggtgataaatcctataaaagtaataggggtggtaagaacatcagagaatccacacaggaaaaaaaatctataaaatgattctttgtgaagactcgtgtcatttgaattcttccagttatcaagtctcaaagtcagtgtttcagccgtagctcctcatgtcccagtggtccaaagacaacaaaacaatctttatgattagcatagcaagggcttctttagtcagaaccttgacctttataaaatgttacttagaagaggggtgttaagagtgaaatttttctcaggccttttataaaagtatcatggtggacatgccaaaattaagtgtccactagaatgttaactccataaagacagaaactttgttcactactgaatctacataatcttaccattgccatatacttcacaggtgctcaatatttgttaataggtcctttttgaaaattatgttgagatcacctgcagaatatcatgaatttgtaaacaggaaacctgaaagtagccttaataagattaagtcgggagaccattgaaatgtagaaaaccactcaatactgaactccccaatgttaatttggcattgtcttgtgattagatcctgtcctcctttagcctcactaatcaagttgggtcctatcttcccagatgtctagttttctactggttttataccatatagattcaattatcttttgtaacagataattgtgttcatcttgtaataactggacactacatactacacttattttttcaacactgttnaggcagggntttaagtg

SEQ ID NO: 360934 - DNA, 3792 bp, Homo sapiens
  misc_feature (3775)..(3775): n is a, c, g, or t
  misc_feature (3784)..(3784): n is a, c, g, or t
aggcacttccgcccaggaagacgacgtagcagccatcttttccctggctttggtgattcagccctgacttctcaaaaagcactgcacagaggaggaggcagcagaaccccacttcagcttcttaggactctgcacttccccagaaggaagaattaaaaatgaatatgttcaaggaagcagtgaccttcaaggacgtggctgtggccttcacggaggaggaattggggctgctgggccctgcccagaggaagctgtaccgagatgtgatggtggagaactttaggaacctgctgtcagtggggcatccacccttcaaacaagatgtatcacctatagaaagaaatgagcagctttggataatgacgacagcaacccgaagacagggaaatttagataccttacttgtaaaagctcttttgctctatgacctggctcaaacttaaacttggatttgaagttagaagaaatgttggaagtcatttatatatgaagaaatgttggaaggactcatatatgcatacattccttgagtgactatgaatgactgccgggcagtaacttctgggctgtggttgtaaactgtgagcactacaaaatgtttttccttattgataccatattatggtaggaaagacatggaataaaaaatttagatagtatgtcagtagttgtgtttttaaatgggtttcattagtgcttagcaattgggagcttggtggaccatctcttggttttggaccatctcttggtttctgtcagtatgtaaaccagaaacttcaaatgtgtcacaaaagatgagcagaactatcccgaggttcattaaagtcttttactctgtcctcagtgtgaaatcttaaatctttgaacaaaaaaattcactatctctctgaatcctttgtccttacaggagagaaaaatcaaagtaagttaattactgttcaagacagagaatcagaagaagagctttcttgttggcaaatctggcaacaaattgcaaatgacttaaccaggtgtcaagactccatgatcaataattctcagtgtcacaaacaaggtgatttcccttaccaggtagggacagaactgtctattcaaatttctgaagatgagaactatatagtaaataaagcagatggtcccaataatactgggaatccagagtttcctatcttgagaacccaggattcttggaggaaaacattcctgactgagtcacagagattgaacagagatcagcaaatttccataaaaaataaattatgtcaatgtaagaagggtgttgatcccatcggttggatttcacatcatgatggtcatagagtacacaaaagtgaaaaatcttatagacccaatgattatgaaaaagacaacatgaagattttgacatttgatcacaatagcatgattcacacaggacagaaatcgtaccagtgtaatgagtgtaaaaaacccttcagtgatctctccagctttgatcttcatcagcagttacaatcaggagagaagtctcttacatgtgttgagcgtggaaaaggcttctgttacagcccagttcttcctgttcatcagaagagtacatgtgggagaaaaacttaagtgtgatgagtgtggtaaggaattcagtcagggcgctcatctacagacccatcagaaagtccacgtgatagagaaaccatacaaatgtaagcaatgtgggaaaggtttcagtcgtagatcagcacttaatgttcattgcaaggtccacacggcagagaaaccttataattgtgaggagtgtgggagggccttcagtcaggcctctcatcttcaggaccatcagagactccacactggggagaagccattcaaatgtgatgcatgtggtaagagcttcagtcggaattcacatcttcaatcccatcaaagagttcatacaggagagaaaccatacaaatgtgaggagtgtggtaagggcttcatttgtagctcaaatctttacattcatcagagagtccacacaggagaaaaaccctataaatgtgaggaatgtggtaaaggctttagtcggccttcaagtcttcaggcccatcagggagttcacactggagagaagtcatacatatgtactgtatgtgggaaaggctttactctgagttcaaatcttcaagcccatcagagagtccacactggagagaagccatacaaatgcaatgagtgtgggaagagcttcaggaggaattcccattatcaagttcatctagtggtccacacaggagagaaaccctataaatgtgagatatgtgggaagggcttcagtcaaagttcgtatcttcaaatccatcagaaggcccacagtatagagaaaccttttaagtgtgaggagtgtgggcagggtttcaatcagagctcacgacttcagattcaccagctgatccatacgggtgagaaaccatacaaatgtgaagagtgtggcaagggatttagtcgtagagcagatcttaaaattcactgtaggatccacacaggagagaaaccatataattgtgaggagtgtgggaaggtcttcaggcaggcctcaaatcttttggcccatcagagagtccacagtggagaaaaaccattcaaatgtgaagaatgtgggaagagtttcggtcggagtgcacatcttcaagcccatcaaaaagtccacactggagataagccatacaaatgtgatgagtgtgggaagggcttcaagtggagcttgaaccttgacatgcatcagagggtgcacacaggagaaaaaccatataaatgtggggagtgtggtaagtacttcagtcaggcctcaagtcttcaacttcatcagagtgtccacacaggagagaaaccatacaaatgtgatgtgtgtggtaaagtcttcagtcggtcttcacaactacagtctcatcagcgagttcacactggggagaaaccttataaatgtgagatatgtggtaagagcttcagttggcgatcaaatcttacagttcatcacagaatccatgttggtgataaatcctataaaagtaataggggtggtaagaacatcagagaatccacacaggaaaaaaaatctataaaatgattctttgtgaagactcgtgtcatttgaattcttccagttatcaagtctcaaagtcagtgtttcagccgtagctcctcatgtcccagtggtccaaagacaacaaaacaatctttatgattagcatagcaagggcttctttagtcagaaccttgacctttataaaatgttacttagaagaggggtgttaagagtgaaatttttctcaggccttttataaaagtatcatggtggacatgccaaaattaagtgtccactagaatgttaactccataaagacagaaactttgttcactactgaatctacataatcttaccattgccatatacttcacaggtgctcaatatttgttaataggtcctttttgaaaattatgttgagatcacctgcagaatatcatgaatttgtaaacaggaaacctgaaagtagccttaataagattaagtcgggagaccattgaaatgtagaaaaccactcaatactgaactccccaatgttaatttggcattgtcttgtgattagatcctgtcctcctttagcctcactaatcaagttgggtcctatcttcccagatgtctagttttctactggttttataccatatagattcaattatcttttgtaacagataattgtgttcatcttgtaataactggacactacatactacacttattttttcaacactgttnaggcagggntttaagtg

SEQ ID NO: 360935 - DNA, 3961 bp, Homo sapiens
  misc_feature (3944)..(3944): n is a, c, g, or t
  misc_feature (3953)..(3953): n is a, c, g, or t
aggcacttccgcccaggaagacgacgtagcagccatcttttccctggctttggtgattcagaaactcccgttctgtggcgaaattctgtgagtccatgaagctggattgtccctgacctcttttgaggaaggagagggttgcttctaactggtcctgggagatgccactgtgatgtatccgggatgaagacacaatcctggttacttcatagcctgtttttcttccccagccctgacttctcaaaaagcactgcacagaggaggaggcagcagaaccccacttcagcttcttaggactctgcacttccccagaaggaagaattaaaaatgaatatgttcaaggaagcagtgaccttcaaggacgtggctgtggccttcacggaggaggaattggggctgctgggccctgcccagaggaagctgtaccgagatgtgatggtggagaactttaggaacctgctgtcagtggggcatccacccttcaaacaagatgtatcacctatagaaagaaatgagcagctttggataatgacgacagcaacccgaagacagggaaatttagataccttacttgtaaaagctcttttgctctatgacctggctcaaacttaaacttggatttgaagttagaagaaatgttggaagtcatttatatatgaagaaatgttggaaggactcatatatgcatacattccttgagtgactatgaatgactgccgggcagtaacttctgggctgtggttgtaaactgtgagcactacaaaatgtttttccttattgataccatattatggtaggaaagacatggaataaaaaatttagatagtatgtcagtagttgtgtttttaaatgggtttcattagtgcttagcaattgggagcttggtggaccatctcttggttttggaccatctcttggtttctgtcagtatgtaaaccagaaacttcaaatgtgtcacaaaagatgagcagaactatcccgaggttcattaaagtcttttactctgtcctcagtgtgaaatcttaaatctttgaacaaaaaaattcactatctctctgaatcctttgtccttacaggagagaaaaatcaaagtaagttaattactgttcaagacagagaatcagaagaagagctttcttgttggcaaatctggcaacaaattgcaaatgacttaaccaggtgtcaagactccatgatcaataattctcagtgtcacaaacaaggtgatttcccttaccaggtagggacagaactgtctattcaaatttctgaagatgagaactatatagtaaataaagcagatggtcccaataatactgggaatccagagtttcctatcttgagaacccaggattcttggaggaaaacattcctgactgagtcacagagattgaacagagatcagcaaatttccataaaaaataaattatgtcaatgtaagaagggtgttgatcccatcggttggatttcacatcatgatggtcatagagtacacaaaagtgaaaaatcttatagacccaatgattatgaaaaagacaacatgaagattttgacatttgatcacaatagcatgattcacacaggacagaaatcgtaccagtgtaatgagtgtaaaaaacccttcagtgatctctccagctttgatcttcatcagcagttacaatcaggagagaagtctcttacatgtgttgagcgtggaaaaggcttctgttacagcccagttcttcctgttcatcagaagagtacatgtgggagaaaaacttaagtgtgatgagtgtggtaaggaattcagtcagggcgctcatctacagacccatcagaaagtccacgtgatagagaaaccatacaaatgtaagcaatgtgggaaaggtttcagtcgtagatcagcacttaatgttcattgcaaggtccacacggcagagaaaccttataattgtgaggagtgtgggagggccttcagtcaggcctctcatcttcaggaccatcagagactccacactggggagaagccattcaaatgtgatgcatgtggtaagagcttcagtcggaattcacatcttcaatcccatcaaagagttcatacaggagagaaaccatacaaatgtgaggagtgtggtaagggcttcatttgtagctcaaatctttacattcatcagagagtccacacaggagaaaaaccctataaatgtgaggaatgtggtaaaggctttagtcggccttcaagtcttcaggcccatcagggagttcacactggagagaagtcatacatatgtactgtatgtgggaaaggctttactctgagttcaaatcttcaagcccatcagagagtccacactggagagaagccatacaaatgcaatgagtgtgggaagagcttcaggaggaattcccattatcaagttcatctagtggtccacacaggagagaaaccctataaatgtgagatatgtgggaagggcttcagtcaaagttcgtatcttcaaatccatcagaaggcccacagtatagagaaaccttttaagtgtgaggagtgtgggcagggtttcaatcagagctcacgacttcagattcaccagctgatccatacgggtgagaaaccatacaaatgtgaagagtgtggcaagggatttagtcgtagagcagatcttaaaattcactgtaggatccacacaggagagaaaccatataattgtgaggagtgtgggaaggtcttcaggcaggcctcaaatcttttggcccatcagagagtccacagtggagaaaaaccattcaaatgtgaagaatgtgggaagagtttcggtcggagtgcacatcttcaagcccatcaaaaagtccacactggagataagccatacaaatgtgatgagtgtgggaagggcttcaagtggagcttgaaccttgacatgcatcagagggtgcacacaggagaaaaaccatataaatgtggggagtgtggtaagtacttcagtcaggcctcaagtcttcaacttcatcagagtgtccacacaggagagaaaccatacaaatgtgatgtgtgtggtaaagtcttcagtcggtcttcacaactacagtctcatcagcgagttcacactggggagaaaccttataaatgtgagatatgtggtaagagcttcagttggcgatcaaatcttacagttcatcacagaatccatgttggtgataaatcctataaaagtaataggggtggtaagaacatcagagaatccacacaggaaaaaaaatctataaaatgattctttgtgaagactcgtgtcatttgaattcttccagttatcaagtctcaaagtcagtgtttcagccgtagctcctcatgtcccagtggtccaaagacaacaaaacaatctttatgattagcatagcaagggcttctttagtcagaaccttgacctttataaaatgttacttagaagaggggtgttaagagtgaaatttttctcaggccttttataaaagtatcatggtggacatgccaaaattaagtgtccactagaatgttaactccataaagacagaaactttgttcactactgaatctacataatcttaccattgccatatacttcacaggtgctcaatatttgttaataggtcctttttgaaaattatgttgagatcacctgcagaatatcatgaatttgtaaacaggaaacctgaaagtagccttaataagattaagtcgggagaccattgaaatgtagaaaaccactcaatactgaactccccaatgttaatttggcattgtcttgtgattagatcctgtcctcctttagcctcactaatcaagttgggtcctatcttcccagatgtctagttttctactggttttataccatatagattcaattatcttttgtaacagataattgtgttcatcttgtaataactggacactacatactacacttattttttcaacactgttnaggcagggntttaagtg

SEQ ID NO: 360936 - DNA, 3790 bp, Homo sapiens
  misc_feature (6)..(6): n is a, c, g, or t
  misc_feature (3773)..(3773): n is a, c, g, or t
  misc_feature (3782)..(3782): n is a, c, g, or t
ttatgnggcggccattttttaaaaatgctttgcagggcaatgcaagtacagccaaatatccctgacttctcaaaaagcactgcacagaggaggaggcagcagaaccccacttcagcttcttaggactctgcacttccccagaaggaagaattaaaaatgaatatgttcaaggaagcagtgaccttcaaggacgtggctgtggccttcacggaggaggaattggggctgctgggccctgcccagaggaagctgtaccgagatgtgatggtggagaactttaggaacctgctgtcagtggggcatccacccttcaaacaagatgtatcacctatagaaagaaatgagcagctttggataatgacgacagcaacccgaagacagggaaatttagataccttacttgtaaaagctcttttgctctatgacctggctcaaacttaaacttggatttgaagttagaagaaatgttggaagtcatttatatatgaagaaatgttggaaggactcatatatgcatacattccttgagtgactatgaatgactgccgggcagtaacttctgggctgtggttgtaaactgtgagcactacaaaatgtttttccttattgataccatattatggtaggaaagacatggaataaaaaatttagatagtatgtcagtagttgtgtttttaaatgggtttcattagtgcttagcaattgggagcttggtggaccatctcttggttttggaccatctcttggtttctgtcagtatgtaaaccagaaacttcaaatgtgtcacaaaagatgagcagaactatcccgaggttcattaaagtcttttactctgtcctcagtgtgaaatcttaaatctttgaacaaaaaaattcactatctctctgaatcctttgtccttacaggagagaaaaatcaaagtaagttaattactgttcaagacagagaatcagaagaagagctttcttgttggcaaatctggcaacaaattgcaaatgacttaaccaggtgtcaagactccatgatcaataattctcagtgtcacaaacaaggtgatttcccttaccaggtagggacagaactgtctattcaaatttctgaagatgagaactatatagtaaataaagcagatggtcccaataatactgggaatccagagtttcctatcttgagaacccaggattcttggaggaaaacattcctgactgagtcacagagattgaacagagatcagcaaatttccataaaaaataaattatgtcaatgtaagaagggtgttgatcccatcggttggatttcacatcatgatggtcatagagtacacaaaagtgaaaaatcttatagacccaatgattatgaaaaagacaacatgaagattttgacatttgatcacaatagcatgattcacacaggacagaaatcgtaccagtgtaatgagtgtaaaaaacccttcagtgatctctccagctttgatcttcatcagcagttacaatcaggagagaagtctcttacatgtgttgagcgtggaaaaggcttctgttacagcccagttcttcctgttcatcagaagagtacatgtgggagaaaaacttaagtgtgatgagtgtggtaaggaattcagtcagggcgctcatctacagacccatcagaaagtccacgtgatagagaaaccatacaaatgtaagcaatgtgggaaaggtttcagtcgtagatcagcacttaatgttcattgcaaggtccacacggcagagaaaccttataattgtgaggagtgtgggagggccttcagtcaggcctctcatcttcaggaccatcagagactccacactggggagaagccattcaaatgtgatgcatgtggtaagagcttcagtcggaattcacatcttcaatcccatcaaagagttcatacaggagagaaaccatacaaatgtgaggagtgtggtaagggcttcatttgtagctcaaatctttacattcatcagagagtccacacaggagaaaaaccctataaatgtgaggaatgtggtaaaggctttagtcggccttcaagtcttcaggcccatcagggagttcacactggagagaagtcatacatatgtactgtatgtgggaaaggctttactctgagttcaaatcttcaagcccatcagagagtccacactggagagaagccatacaaatgcaatgagtgtgggaagagcttcaggaggaattcccattatcaagttcatctagtggtccacacaggagagaaaccctataaatgtgagatatgtgggaagggcttcagtcaaagttcgtatcttcaaatccatcagaaggcccacagtatagagaaaccttttaagtgtgaggagtgtgggcagggtttcaatcagagctcacgacttcagattcaccagctgatccatacgggtgagaaaccatacaaatgtgaagagtgtggcaagggatttagtcgtagagcagatcttaaaattcactgtaggatccacacaggagagaaaccatataattgtgaggagtgtgggaaggtcttcaggcaggcctcaaatcttttggcccatcagagagtccacagtggagaaaaaccattcaaatgtgaagaatgtgggaagagtttcggtcggagtgcacatcttcaagcccatcaaaaagtccacactggagataagccatacaaatgtgatgagtgtgggaagggcttcaagtggagcttgaaccttgacatgcatcagagggtgcacacaggagaaaaaccatataaatgtggggagtgtggtaagtacttcagtcaggcctcaagtcttcaacttcatcagagtgtccacacaggagagaaaccatacaaatgtgatgtgtgtggtaaagtcttcagtcggtcttcacaactacagtctcatcagcgagttcacactggggagaaaccttataaatgtgagatatgtggtaagagcttcagttggcgatcaaatcttacagttcatcacagaatccatgttggtgataaatcctataaaagtaataggggtggtaagaacatcagagaatccacacaggaaaaaaaatctataaaatgattctttgtgaagactcgtgtcatttgaattcttccagttatcaagtctcaaagtcagtgtttcagccgtagctcctcatgtcccagtggtccaaagacaacaaaacaatctttatgattagcatagcaagggcttctttagtcagaaccttgacctttataaaatgttacttagaagaggggtgttaagagtgaaatttttctcaggccttttataaaagtatcatggtggacatgccaaaattaagtgtccactagaatgttaactccataaagacagaaactttgttcactactgaatctacataatcttaccattgccatatacttcacaggtgctcaatatttgttaataggtcctttttgaaaattatgttgagatcacctgcagaatatcatgaatttgtaaacaggaaacctgaaagtagccttaataagattaagtcgggagaccattgaaatgtagaaaaccactcaatactgaactccccaatgttaatttggcattgtcttgtgattagatcctgtcctcctttagcctcactaatcaagttgggtcctatcttcccagatgtctagttttctactggttttataccatatagattcaattatcttttgtaacagataattgtgttcatcttgtaataactggacactacatactacacttattttttcaacactgttnaggcagggntttaagtg

SEQ ID NO: 360937 - DNA, 3943 bp, Homo sapiens
  misc_feature (3926)..(3926): n is a, c, g, or t
  misc_feature (3935)..(3935): n is a, c, g, or t
aggcacttccgcccaggaagacgacgtagcagccatcttttccctggctttggtgattcagaaactcccgttctgtggcgaaattctgtgagtccatgaagctggattgtccctgacctcttttgaggaaggagagggttgcttctaactggtcctgggagatgccactgtgatgtatccgggatgaagacacaatcctggttacttcatagcctgtttttcttccccagccctgacttctcaaaaagcactgcacagaggaggaggcagcagaaccccacttcagcttcttaggactctgcacttccccagaaggaagaattaaaaatgaatatgttcaaggacgtggctgtggccttcacggaggaggaattggggctgctgggccctgcccagaggaagctgtaccgagatgtgatggtggagaactttaggaacctgctgtcagtggggcatccacccttcaaacaagatgtatcacctatagaaagaaatgagcagctttggataatgacgacagcaacccgaagacagggaaatttagataccttacttgtaaaagctcttttgctctatgacctggctcaaacttaaacttggatttgaagttagaagaaatgttggaagtcatttatatatgaagaaatgttggaaggactcatatatgcatacattccttgagtgactatgaatgactgccgggcagtaacttctgggctgtggttgtaaactgtgagcactacaaaatgtttttccttattgataccatattatggtaggaaagacatggaataaaaaatttagatagtatgtcagtagttgtgtttttaaatgggtttcattagtgcttagcaattgggagcttggtggaccatctcttggttttggaccatctcttggtttctgtcagtatgtaaaccagaaacttcaaatgtgtcacaaaagatgagcagaactatcccgaggttcattaaagtcttttactctgtcctcagtgtgaaatcttaaatctttgaacaaaaaaattcactatctctctgaatcctttgtccttacaggagagaaaaatcaaagtaagttaattactgttcaagacagagaatcagaagaagagctttcttgttggcaaatctggcaacaaattgcaaatgacttaaccaggtgtcaagactccatgatcaataattctcagtgtcacaaacaaggtgatttcccttaccaggtagggacagaactgtctattcaaatttctgaagatgagaactatatagtaaataaagcagatggtcccaataatactgggaatccagagtttcctatcttgagaacccaggattcttggaggaaaacattcctgactgagtcacagagattgaacagagatcagcaaatttccataaaaaataaattatgtcaatgtaagaagggtgttgatcccatcggttggatttcacatcatgatggtcatagagtacacaaaagtgaaaaatcttatagacccaatgattatgaaaaagacaacatgaagattttgacatttgatcacaatagcatgattcacacaggacagaaatcgtaccagtgtaatgagtgtaaaaaacccttcagtgatctctccagctttgatcttcatcagcagttacaatcaggagagaagtctcttacatgtgttgagcgtggaaaaggcttctgttacagcccagttcttcctgttcatcagaagagtacatgtgggagaaaaacttaagtgtgatgagtgtggtaaggaattcagtcagggcgctcatctacagacccatcagaaagtccacgtgatagagaaaccatacaaatgtaagcaatgtgggaaaggtttcagtcgtagatcagcacttaatgttcattgcaaggtccacacggcagagaaaccttataattgtgaggagtgtgggagggccttcagtcaggcctctcatcttcaggaccatcagagactccacactggggagaagccattcaaatgtgatgcatgtggtaagagcttcagtcggaattcacatcttcaatcccatcaaagagttcatacaggagagaaaccatacaaatgtgaggagtgtggtaagggcttcatttgtagctcaaatctttacattcatcagagagtccacacaggagaaaaaccctataaatgtgaggaatgtggtaaaggctttagtcggccttcaagtcttcaggcccatcagggagttcacactggagagaagtcatacatatgtactgtatgtgggaaaggctttactctgagttcaaatcttcaagcccatcagagagtccacactggagagaagccatacaaatgcaatgagtgtgggaagagcttcaggaggaattcccattatcaagttcatctagtggtccacacaggagagaaaccctataaatgtgagatatgtgggaagggcttcagtcaaagttcgtatcttcaaatccatcagaaggcccacagtatagagaaaccttttaagtgtgaggagtgtgggcagggtttcaatcagagctcacgacttcagattcaccagctgatccatacgggtgagaaaccatacaaatgtgaagagtgtggcaagggatttagtcgtagagcagatcttaaaattcactgtaggatccacacaggagagaaaccatataattgtgaggagtgtgggaaggtcttcaggcaggcctcaaatcttttggcccatcagagagtccacagtggagaaaaaccattcaaatgtgaagaatgtgggaagagtttcggtcggagtgcacatcttcaagcccatcaaaaagtccacactggagataagccatacaaatgtgatgagtgtgggaagggcttcaagtggagcttgaaccttgacatgcatcagagggtgcacacaggagaaaaaccatataaatgtggggagtgtggtaagtacttcagtcaggcctcaagtcttcaacttcatcagagtgtccacacaggagagaaaccatacaaatgtgatgtgtgtggtaaagtcttcagtcggtcttcacaactacagtctcatcagcgagttcacactggggagaaaccttataaatgtgagatatgtggtaagagcttcagttggcgatcaaatcttacagttcatcacagaatccatgttggtgataaatcctataaaagtaataggggtggtaagaacatcagagaatccacacaggaaaaaaaatctataaaatgattctttgtgaagactcgtgtcatttgaattcttccagttatcaagtctcaaagtcagtgtttcagccgtagctcctcatgtcccagtggtccaaagacaacaaaacaatctttatgattagcatagcaagggcttctttagtcagaaccttgacctttataaaatgttacttagaagaggggtgttaagagtgaaatttttctcaggccttttataaaagtatcatggtggacatgccaaaattaagtgtccactagaatgttaactccataaagacagaaactttgttcactactgaatctacataatcttaccattgccatatacttcacaggtgctcaatatttgttaataggtcctttttgaaaattatgttgagatcacctgcagaatatcatgaatttgtaaacaggaaacctgaaagtagccttaataagattaagtcgggagaccattgaaatgtagaaaaccactcaatactgaactccccaatgttaatttggcattgtcttgtgattagatcctgtcctcctttagcctcactaatcaagttgggtcctatcttcccagatgtctagttttctactggttttataccatatagattcaattatcttttgtaacagataattgtgttcatcttgtaataactggacactacatactacacttattttttcaacactgttnaggcagggntttaagtg

SEQ ID NO: 360938 - DNA, 3309 bp, Homo sapiens
  misc_feature (3292)..(3292): n is a, c, g, or t
  misc_feature (3301)..(3301): n is a, c, g, or t
ggaacctttcaaacttccccgaaatgcacttgtggtcagcagctagcggtcttttgtttggggaaaaaaaggagtagcggctaagagcggagccctgacttctcaaaaagcactgcacagaggaggaggcagcagaaccccacttcagcttcttaggactctgcacttccccagaaggaagaattaaaaatgaatatgttcaaggaagcagtgaccttcaaggacgtggctgtggccttcacggaggaggaattggggctgctgggccctgcccagaggaagctgtaccgagatgtgatggtggagaactttaggaacctgctgtcagtggggcatccacccttcaaacaagatgtatcacctatagaaagaaatgagcagctttggataatgacgacagcaacccgaagacagggaaatttaggagagaaaaatcaaagtaagttaattactgttcaagacagagaatcagaagaagagctttcttgttggcaaatctggcaacaaattgcaaatgacttaaccaggtgtcaagactccatgatcaataattctcagtgtcacaaacaaggtgatttcccttaccaggtagggacagaactgtctattcaaatttctgaagatgagaactatatagtaaataaagcagatggtcccaataatactgggaatccagagtttcctatcttgagaacccaggattcttggaggaaaacattcctgactgagtcacagagattgaacagagatcagcaaatttccataaaaaataaattatgtcaatgtaagaagggtgttgatcccatcggttggatttcacatcatgatggtcatagagtacacaaaagtgaaaaatcttatagacccaatgattatgaaaaagacaacatgaagattttgacatttgatcacaatagcatgattcacacaggacagaaatcgtaccagtgtaatgagtgtaaaaaacccttcagtgatctctccagctttgatcttcatcagcagttacaatcaggagagaagtctcttacatgtgttgagcgtggaaaaggcttctgttacagcccagttcttcctgttcatcagaagagtacatgtgggagaaaaacttaagtgtgatgagtgtggtaaggaattcagtcagggcgctcatctacagacccatcagaaagtccacgtgatagagaaaccatacaaatgtaagcaatgtgggaaaggtttcagtcgtagatcagcacttaatgttcattgcaaggtccacacggcagagaaaccttataattgtgaggagtgtgggagggccttcagtcaggcctctcatcttcaggaccatcagagactccacactggggagaagccattcaaatgtgatgcatgtggtaagagcttcagtcggaattcacatcttcaatcccatcaaagagttcatacaggagagaaaccatacaaatgtgaggagtgtggtaagggcttcatttgtagctcaaatctttacattcatcagagagtccacacaggagaaaaaccctataaatgtgaggaatgtggtaaaggctttagtcggccttcaagtcttcaggcccatcagggagttcacactggagagaagtcatacatatgtactgtatgtgggaaaggctttactctgagttcaaatcttcaagcccatcagagagtccacactggagagaagccatacaaatgcaatgagtgtgggaagagcttcaggaggaattcccattatcaagttcatctagtggtccacacaggagagaaaccctataaatgtgagatatgtgggaagggcttcagtcaaagttcgtatcttcaaatccatcagaaggcccacagtatagagaaaccttttaagtgtgaggagtgtgggcagggtttcaatcagagctcacgacttcagattcaccagctgatccatacgggtgagaaaccatacaaatgtgaagagtgtggcaagggatttagtcgtagagcagatcttaaaattcactgtaggatccacacaggagagaaaccatataattgtgaggagtgtgggaaggtcttcaggcaggcctcaaatcttttggcccatcagagagtccacagtggagaaaaaccattcaaatgtgaagaatgtgggaagagtttcggtcggagtgcacatcttcaagcccatcaaaaagtccacactggagataagccatacaaatgtgatgagtgtgggaagggcttcaagtggagcttgaaccttgacatgcatcagagggtgcacacaggagaaaaaccatataaatgtggggagtgtggtaagtacttcagtcaggcctcaagtcttcaacttcatcagagtgtccacacaggagagaaaccatacaaatgtgatgtgtgtggtaaagtcttcagtcggtcttcacaactacagtctcatcagcgagttcacactggggagaaaccttataaatgtgagatatgtggtaagagcttcagttggcgatcaaatcttacagttcatcacagaatccatgttggtgataaatcctataaaagtaataggggtggtaagaacatcagagaatccacacaggaaaaaaaatctataaaatgattctttgtgaagactcgtgtcatttgaattcttccagttatcaagtctcaaagtcagtgtttcagccgtagctcctcatgtcccagtggtccaaagacaacaaaacaatctttatgattagcatagcaagggcttctttagtcagaaccttgacctttataaaatgttacttagaagaggggtgttaagagtgaaatttttctcaggccttttataaaagtatcatggtggacatgccaaaattaagtgtccactagaatgttaactccataaagacagaaactttgttcactactgaatctacataatcttaccattgccatatacttcacaggtgctcaatatttgttaataggtcctttttgaaaattatgttgagatcacctgcagaatatcatgaatttgtaaacaggaaacctgaaagtagccttaataagattaagtcgggagaccattgaaatgtagaaaaccactcaatactgaactccccaatgttaatttggcattgtcttgtgattagatcctgtcctcctttagcctcactaatcaagttgggtcctatcttcccagatgtctagttttctactggttttataccatatagattcaattatcttttgtaacagataattgtgttcatcttgtaataactggacactacatactacacttattttttcaacactgttnaggcagggntttaagtg

SEQ ID NO: 360939 - DNA, 3897 bp, Homo sapiens
  misc_feature (3880)..(3880): n is a, c, g, or t
  misc_feature (3889)..(3889): n is a, c, g, or t
aggcacttccgcccaggaagacgacgtagcagccatcttttccctggctttggtgattcagaaactcccgttctgtggcgaaattctgtgagtccatgaagctggattgtccctgacctcttttgaggaaggagagggttgcttctaactggtcctgggagatgccactgtgatgtatccgggatgaagacacaatcctggttacttcatagcctgtttttcttccccagccctgacttctcaaaaagcactgcacagaggaggaggcagcagaaccccacttcagcttcttaggactctgcacttccccagaaggaagaattaaaaatgaatatgttcaaggaagcagtgaccttcaaggacgtggctgtggccttcacggaggaggaattggggctgctgggccctgcccagaggaagctgtaccgagatgtgatggtggagaactttaggaacctgctgtcagtggggcatccacccttcaaacaagatgtatcacctatagaaagaaatgagcagctttggataatgacgacagcaacccgaagacagggaaatttagttagaagaaatgttggaagtcatttatatatgaagaaatgttggaaggactcatatatgcatacattccttgagtgactatgaatgactgccgggcagtaacttctgggctgtggttgtaaactgtgagcactacaaaatgtttttccttattgataccatattatggtaggaaagacatggaataaaaaatttagatagtatgtcagtagttgtgtttttaaatgggtttcattagtgcttagcaattgggagcttggtggaccatctcttggttttggaccatctcttggtttctgtcagtatgtaaaccagaaacttcaaatgtgtcacaaaagatgagcagaactatcccgaggttcattaaagtcttttactctgtcctcagtgtgaaatcttaaatctttgaacaaaaaaattcactatctctctgaatcctttgtccttacaggagagaaaaatcaaagtaagttaattactgttcaagacagagaatcagaagaagagctttcttgttggcaaatctggcaacaaattgcaaatgacttaaccaggtgtcaagactccatgatcaataattctcagtgtcacaaacaaggtgatttcccttaccaggtagggacagaactgtctattcaaatttctgaagatgagaactatatagtaaataaagcagatggtcccaataatactgggaatccagagtttcctatcttgagaacccaggattcttggaggaaaacattcctgactgagtcacagagattgaacagagatcagcaaatttccataaaaaataaattatgtcaatgtaagaagggtgttgatcccatcggttggatttcacatcatgatggtcatagagtacacaaaagtgaaaaatcttatagacccaatgattatgaaaaagacaacatgaagattttgacatttgatcacaatagcatgattcacacaggacagaaatcgtaccagtgtaatgagtgtaaaaaacccttcagtgatctctccagctttgatcttcatcagcagttacaatcaggagagaagtctcttacatgtgttgagcgtggaaaaggcttctgttacagcccagttcttcctgttcatcagaagagtacatgtgggagaaaaacttaagtgtgatgagtgtggtaaggaattcagtcagggcgctcatctacagacccatcagaaagtccacgtgatagagaaaccatacaaatgtaagcaatgtgggaaaggtttcagtcgtagatcagcacttaatgttcattgcaaggtccacacggcagagaaaccttataattgtgaggagtgtgggagggccttcagtcaggcctctcatcttcaggaccatcagagactccacactggggagaagccattcaaatgtgatgcatgtggtaagagcttcagtcggaattcacatcttcaatcccatcaaagagttcatacaggagagaaaccatacaaatgtgaggagtgtggtaagggcttcatttgtagctcaaatctttacattcatcagagagtccacacaggagaaaaaccctataaatgtgaggaatgtggtaaaggctttagtcggccttcaagtcttcaggcccatcagggagttcacactggagagaagtcatacatatgtactgtatgtgggaaaggctttactctgagttcaaatcttcaagcccatcagagagtccacactggagagaagccatacaaatgcaatgagtgtgggaagagcttcaggaggaattcccattatcaagttcatctagtggtccacacaggagagaaaccctataaatgtgagatatgtgggaagggcttcagtcaaagttcgtatcttcaaatccatcagaaggcccacagtatagagaaaccttttaagtgtgaggagtgtgggcagggtttcaatcagagctcacgacttcagattcaccagctgatccatacgggtgagaaaccatacaaatgtgaagagtgtggcaagggatttagtcgtagagcagatcttaaaattcactgtaggatccacacaggagagaaaccatataattgtgaggagtgtgggaaggtcttcaggcaggcctcaaatcttttggcccatcagagagtccacagtggagaaaaaccattcaaatgtgaagaatgtgggaagagtttcggtcggagtgcacatcttcaagcccatcaaaaagtccacactggagataagccatacaaatgtgatgagtgtgggaagggcttcaagtggagcttgaaccttgacatgcatcagagggtgcacacaggagaaaaaccatataaatgtggggagtgtggtaagtacttcagtcaggcctcaagtcttcaacttcatcagagtgtccacacaggagagaaaccatacaaatgtgatgtgtgtggtaaagtcttcagtcggtcttcacaactacagtctcatcagcgagttcacactggggagaaaccttataaatgtgagatatgtggtaagagcttcagttggcgatcaaatcttacagttcatcacagaatccatgttggtgataaatcctataaaagtaataggggtggtaagaacatcagagaatccacacaggaaaaaaaatctataaaatgattctttgtgaagactcgtgtcatttgaattcttccagttatcaagtctcaaagtcagtgtttcagccgtagctcctcatgtcccagtggtccaaagacaacaaaacaatctttatgattagcatagcaagggcttctttagtcagaaccttgacctttataaaatgttacttagaagaggggtgttaagagtgaaatttttctcaggccttttataaaagtatcatggtggacatgccaaaattaagtgtccactagaatgttaactccataaagacagaaactttgttcactactgaatctacataatcttaccattgccatatacttcacaggtgctcaatatttgttaataggtcctttttgaaaattatgttgagatcacctgcagaatatcatgaatttgtaaacaggaaacctgaaagtagccttaataagattaagtcgggagaccattgaaatgtagaaaaccactcaatactgaactccccaatgttaatttggcattgtcttgtgattagatcctgtcctcctttagcctcactaatcaagttgggtcctatcttcccagatgtctagttttctactggttttataccatatagattcaattatcttttgtaacagataattgtgttcatcttgtaataactggacactacatactacacttattttttcaacactgttnaggcagggntttaagtg

SEQ ID NO: 360940 - DNA, 318 bp, Homo sapiens
gcaaaattaatgcagcaacatctcttcttccagcttataaaacaaaatgcaccccatagagttagaatacagaattacaaaagctgcagggattaacaatctctgtctgttgatagattttggatcttctagctacagttaaacaagtctgaggcctaatttctggttttgatcaaatgtagtctcacagtcaaagaggtgaagagtgacttagctccctgccggtcctccctgtcagtgacatcctctggtttcatggccagttcatgggttcccagggccttcacccagctggcttccaggagtgacttcatttta

SEQ ID NO: 360941 - DNA, 540 bp, Homo sapiens
tcagaacagagtcctgtattctacaatggatggattggaagacttgaggatccagtctctttcctttatagataattagactcaggcagaaactcagagctctcagggctttgctgtgctgtgctgtgtcatgccgtcctggggcccggggaaccaccctgagcactttgtggagtgtgtccttgctcaggcttttgccttgggattgaaccgaagctgctcagttccttccacttacctcctctctgtctgatcttccttttcccagagcctcagtgcttgatgctcagtgctcaggagatgtcctttgctccatccttcagaggggcagttgtgtagttatgctgccgggtgagcacagacacacatactttctcccctagctgggaccatcccacacggggtgctcaatatgcatgcctcatgaaagcatagactgtccatttaaaaaaaaatcaggtactcatggtattacaatatgccaggggttggacaaatggattttttacccttttttaaagggttatgtaaaaaaaaaaa

SEQ ID NO: 360942 - DNA, 6511 bp, Homo sapiens
  misc_feature (595)..(595): n is a, c, g, or t
gtgggcgtggtgtgctatagagtgtactgctgctgctgcttggccaacgtttcactgcctggcatcgggggcaccattcctgagtccaaacctttcttctacgtgaacgtggctgacatcgagagcctggaggtagaggtgtcctatgtggcctgcaccacagagaagatattcgaggagaagcgggagctgtatgacgtctacgtggataaccagaatgtgaagacacaccacgaccacctgcagccgctgctgaagatcaacagtgctgacagggagaagtaccgccggctcaacgagcagaggcagatgctgttgtactcccaggaagtagaagaagactacaacccttgtgaagaggacctcttcgtgctgtttttcctagaacaaaacaaccggatatttcagactttgttggaggtgtctgccagtcaagacaaaactctgacagcagagcatgcccggggcatgggcctagacccccaaggagaccggagctttctcctggacctgctggaggcctatggcattgatgtcatgctggttatcgacaacccctgttgcccgtaggaggagccaacaggactgggagccncttcacgtgggatgtcagcagcccggagttcaccccagggccccagagggcctcattttttattaagttgacacaaaggaatattgtttatactttccaacaaacataatttttgcaatttcctttctgcccttttccctagagataaggtgagatcaccttggttttgtgtcctgccatgttaggatattggaatctgccactttctcccagagctgctggtcctctgggcttggtcatgggagttgtatcactaggagtaggctgagctctggaaacattgggatggactgttcagaaagtctgtgtggtctttgtcccttgatgtatttgagaataagacaaccacctgtcccctgtggccttagatgttcatctgcctaaaggcagaaactagaccagatgatcttttaaggtttttagtagttctaggagtctatagtcttgggatcaaatcccttttcttgttcattagggcaactttatgtcttctctgtttacttgagtagggaccacaaagagggaaaaaaggatgtttctgacaccaaatatgagcttatcttatggtcagaatgaaagaggttgcttatcagtgagctgaaaactaaaattatagaatgaagcctggaaaccttcctcaaagtaacttgatggtggccatgcaatgtaatgttcctctttgtctgaaccttcctcttcttgggatgaattggtgaattgctaagggccaatgctggccttggagcttgcaagcaaattaattttccagtttagtctcttaagggttcaataatgctcttggagtaagttgggtatttttaaaggctgaagtttggactaccggaggatagagcaattgaagttcgagcaggatggagaagccactctaagtctcttcatctggacacgaattctctggaggcattagcagcagcacctctgggtcaacacagatttactggattccaaaatctagcaaggatctgagctggttaactcagagggtggagcatgatgctaacaagacggtttatcattttggacccctcacaaacacacttctctttagcagaggtgacattccttaggctaaataattggatccagggacataacagatttgttgagagaaaatgtggcagtgccttcacccgggacagtggtcaggaagccctgagcatccctgatggatttatccatcctcttctgaagtgctctgctctaggctgggtcctgttgccacctgcctgttctctggttggcttttgcaggagggcagcttacgtgtttgtcaaccagttagaaagccagttcctgtgggtcgagtttaggcctttttggccatagttgagaattttgacttgggatactgggttgttggtgacaaataatgtcttccttttcccccttcccgcctggctcggttatgggaatagccgtcagtgcatccatgtctgtgaccaacacccagccagactaatgtacacagcagggagaaataacattcaaatggtggttcacacatctcatctcaagataagattcttagggttcactgctttattcaaaagtgttttcactgtagctccttcatatggaatatcaaaactgaagaaattcacatgtggaaatgcaaatagacattgattaatcaaggtagcatctttatgtaaatatataaataagtttgggcattgaaatgtaaactgtacagctaatagacttttctcctctgcaatgtgggttgctgtcatttcagtaatgtgtatgtttacaaaagaaaaaaaaatctgtgtttcgaggttgaagcctcaccttttattctcctttacatgcaaccctctcctcttgcctctcaagggttgaggggtcctttctgtcaagtaatggttatttttcgtggtatcctgaggttcagggtgttttaagctgggggtaggaggttagaggcaggagtagaagtgaaaggaaaggtctgattctcctagaggacacaagaagacctcctttttctggaattagggaatctgccggaaggagctgtttgaggcatttctgctctgagccttctatatgcaaacactgcagttttaactgcaagctcagaagtgctggtgtaaacatagcagggtgagaatgaagttcctgttttttcctttgaatggtgagtcagggcttctgggttcccttaactttgtgcttgtctcggtagctttctgtctcacatctccacgtgtccaccctcctgctcatgcagagggccagggtatgggtggccccagaggagaacgtgccagtgaggcagtgccatgtttcaggtcataggggccttgggctcagctgaccccaatgcagaacttctccctttaagagagattccaataaattggtccttccctaccttgccagcttcttcataggaccagaaatcttgtgcagagcctctgcttggctgaacagcgtgtgctttatctcttcagttacctttgccactgttgagcatcctcagagtatgtcttgcctgggctatgaagtggagcctgtggcttcggaaatcacctttcgaagccttgctctatgccagattctgctccccaacatgacagattaacaggcacaacctaggatcctttgctaccagttctctactagggaattccacagtggcagcagaagctaggagccatgtggacctgcttttctgccagtcttgaaatattttctgagaaaccatctgcttttgttcagaagaaagtgctgaacatcgttcacagacttctaggtctgtaagctctttaggggcgggcattatgatgaccaccggcctcctggaggagggttggatacctgtggtgtgacaccttctgccaccatctcctgccgggcctcagccctcgcctgcctgagcaggcctagttctcctgtgaagctgtcagcctgatctcatgccacactgtgaaatgaactatgtgccagtttggaaatgattgctgacctgagatgctggctgggctgccctgttgttcctgaataagtcagaagaagttccaggtgggagtggaattcaggtttggggctcgttggtatccatgcaaaatatgacaaaggcctgttcaagagggcattttcaattctgtaggctcagcagatgatactgcccagcctttgggaaaatgtccagttggcccctggcttaggactctccacaaggagtttgaaatggtagggcttatcccctaccagactaaaagtatggcccaaattatgtgtttagaatttgcttggcctttaaacacgaaccattccctatgcctggtagagaccattccagtgtcagtgtcccacctgggacctgtacagtcctcagtaaattatgattgcaatgaattagaaggcttttgccttccatatccatcatccattatagcatctgtgcttccacctggttagggggagggaagctgaaatcattgatgtatcaatagaagtaatttagcttaggaacttgcatctataacttaccttgttttgttccactttaaagtcaagacaagaaagttaagatagcacacaggtgcacatgcttccagatgccacatgtgaacatttgttgatcatgtgactaccgatgacactttagctagaagataaattaaatcttagctaaatcattgtttttccttctggtggctatgaggatgaatttgctctcagtcttgatgcactgaaagcccttcaaacacagtaaaagatgaaatcactcatctttaaactgaggccttcagggaagcttttgtaaaggacagtaatgaattaggctttcagttttaggacatcaaccctccgagaaaaggcagaaacccgagggaccatttatttcccttcgaaactgtatagcccagggaatggattgagatgctttctccagaccctgtataggtcaaccttgcagaggtaaaggaggaggggcaggtggatgaataaaataggataatgctcagcttggcagtggacttgccttagtgtgatgacaggtctaacatgggcaagacaattagaatggggaccaatatgccaggcatgggcttttatctccctagtagatcccaagctagtaggcttggattctgccaaatggccagccctcctgtcttctccccgtaccttgtagttagaccgaggtgagaatcctgctgaccccagtcccatcccctctcatttcaggaaaacccttttgtgattcaggtagggggagaggaggagttaagggctccgtttactcccaagtcatggatttttaatattccatttttatcactaatatacctctcttcctagaagctactggagtattgagtgttgtgggaaaaggctaactgtgaattaagttaatgtttttcttataagaaatggaagtttatttttttattgatattactatgtgatgaactgagtatgcatatactgaaatggaaggaaattttaaaactattattctagaagaaatgggcagttttgtaatttggtggtggctgagaccccatagaagttttactatgtaaataatttggagagtgaataaggagattgtgctatgaaatcctgacagcgctctttaggaggcagacttgacagtcctaggaaggttgacataaaaataccaaccttcagtaaagctctagtacaaaaaagggtaaatgtcatcattcttatttttaggcctctttcttgagagaggtgggagtgggaggtagtgttataactggcactttaatttgtttttggaactagaatttaggggcagttggatgaaattgcaaatttagaaggggaataagaattttctagtgctatataaagaaatgatgatggagacaaaagccttgctttcctctttttagaatttattttcgatttttagcatactgtggggcttttagagctaatatgatctaaattcagaaaatttaattttcatagtaggccaggtgtgaattacttatgtttgctatagaatgcttatttagactaacaataaatttactttgctttctaaggccagtcagcgaatgtggggatgaggcaggatgttttaaatgagccagagatgatccacaaagtgaacagtcgacacagaggtctttgagttggatggttgcaaatatattgacattagagtgaaaactccttcctttgggtaaactaaagaaagataaagtatactaaaaaattttaagatggtgttatacaaaaaaaagtttgggtctaacgtgtccacaaagactgtcaagtgaagaatggtggagattcttggtgtttgagcagccaacctggatgagtgacttcagggacagagcagaggaaagcaaaatgaatttcctttatttacccaaaacttgttgactgaatttttgtataggtccgggaaaataagcctaaacaaatagttgtagccttagaaaaactgttttcccatttctttctgagttagaatcagcatagcctccctgtcgccttaaatgtaaaaatcctattttgattaataccccagcctaagagttatagcaatacgagagactgaatctatttttgtttcgggtctttacctcatagtatgaaattagtaagacactgcatagattttgccctgaatactggtgtgcccaggtatgccgtgctctctctctgtttccagtggtggtaattttaaggcctaaagaaagctggggttaatcctgaagctaaaagtaaatgtttcttgaattgattttgttctgtggtacaaataacatctatgaatatcatatctgtatatatctgaaccaagttgtgtgcagagaggttgatataactatatttacagaaaatgatttttacaattaaagttcacattttaacatgaaaaaaagtgctgca

SEQ ID NO: 360943 - DNA, 468 bp, Homo sapiens
gcggccgcctactactactactgctcgaattcaagcttctaacgatgtacggggacatgtcttaaggaactcatatacatagtctttctatattatgctaatccttctcaaataaaaataaagacagctaattctcttatgacatgctattgtatctgctggatcattttcattattctctaagacttgtttagcttgatatacccaaggtgtatcaacattaatatcattacagtctatgaaacccttccataactcatgcatttaattcaatatttatatcgaaactgtgacgccagtcactatggggataccttctgtttacctatagtcttgtctgaatacagtaatatatggccacatgtcttcaaaggctatatgaagagcctcctttttttccgtattgacaattgaataacctcccaattccagattctatttccaatttttttcacttacataggttat

SEQ ID NO: 360944 - DNA, 4450 bp, Homo sapiens
gtatctacgatcttaccataacctcccagaaaataacattcaaatggtggttcacacatctcatctcaagataagattcttagggttcactgctttattcaaaagtgttttcactgtagctccttcatatggaatatcaaaactgaagaaattcacatgtggaaatgcaaatagacattgattaatcaaggtagcatctttatgtaaatatataaataagtttgggcattgaaatgtaaactgtacagctaatagacttttctcctctgcaatgtgggttgctgtcatttcagtaatgtgtatgtttacaaaagaaaaaaaaatctgtgtttcgaggttgaagcctcaccttttattctcctttacatgcaaccctctcctcttgcctctcaagggttgaggggtcctttctgtcaagtaatggttatttttcgtggtatcctgaggttcagggtgttttaagctgggggtaggaggttagaggcaggagtagaagtgaaaggaaaggtctgattctcctagaggacacaagaagacctcctttttctggaattagggaatctgccggaaggagctgtttgaggcatttctgctctgagccttctatatgcaaacactgcagttttaactgcaagctcagaagtgctggtgtaaacatagcagggtgagaatgaagttcctgttttttcctttgaatggtgagtcagggcttctgggttcccttaactttgtgcttgtctcggtagctttctgtctcacatctccacgtgtccaccctcctgctcatgcagagggccagggtatgggtggccccagaggagaacgtgccagtgaggcagtgccatgtttcaggtcataggggccttgggctcagctgaccccaatgcagaacttctccctttaagagagattccaataaattggtccttccctaccttgccagcttcttcataggaccagaaatcttgtgcagagcctctgcttggctgaacagcgtgtgctttatctcttcagttacctttgccactgttgagcatcctcagagtatgtcttgcctgggctatgaagtggagcctgtggcttcggaaatcacctttcgaagccttgctctatgccagattctgctccccaacatgacagattaacaggcacaacctaggatcctttgctaccagttctctactagggaattccacagtggcagcagaagctaggagccatgtggacctgcttttctgccagtcttgaaatattttctgagaaaccatctgcttttgttcagaagaaagtgctgaacatcgttcacagacttctaggtctgtaagctctttaggggcgggcattatgatgaccaccggcctcctggaggagggttggatacctgtggtgtgacaccttctgccaccatctcctgccgggcctcagccctcgcctgcctgagcaggcctagttctcctgtgaagctgtcagcctgatctcatgccacactgtgaaatgaactatgtgccagtttggaaatgattgctgacctgagatgctggctgggctgccctgttgttcctgaataagtcagaagaagttccaggtgggagtggaattcaggtttggggctcgttggtatccatgcaaaatatgacaaaggcctgttcaagagggcattttcaattctgtaggctcagcagatgatactgcccagcctttgggaaaatgtccagttggcccctggcttaggactctccacaaggagtttgaaatggtagggcttatcccctaccagactaaaagtatggcccaaattatgtgtttagaatttgcttggcctttaaacacgaaccattccctatgcctggtagagaccattccagtgtcagtgtcccacctgggacctgtacagtcctcagtaaattatgattgcaatgaattagaaggcttttgccttccatatccatcatccattatagcatctgtgcttccacctggttagggggagggaagctgaaatcattgatgtatcaatagaagtaatttagcttaggaacttgcatctataacttaccttgttttgttccactttaaagtcaagacaagaaagttaagatagcacacaggtgcacatgcttccagatgccacatgtgaacatttgttgatcatgtgactaccgatgacactttagctagaagataaattaaatcttagctaaatcattgtttttccttctggtggctatgaggatgaatttgctctcagtcttgatgcactgaaagcccttcaaacacagtaaaagatgaaatcactcatctttaaactgaggccttcagggaagcttttgtaaaggacagtaatgaattaggctttcagttttaggacatcaaccctccgagaaaaggcagaaacccgagggaccatttatttcccttcgaaactgtatagcccagggaatggattgagatgctttctccagaccctgtataggtcaaccttgcagaggtaaaggaggaggggcaggtggatgaataaaataggataatgctcagcttggcagtggacttgccttagtgtgatgacaggtctaacatgggcaagacaattagaatggggaccaatatgccaggcatgggcttttatctccctagtagatcccaagctagtaggcttggattctgccaaatggccagccctcctgtcttctccccgtaccttgtagttagaccgaggtgagaatcctgctgaccccagtcccatcccctctcatttcaggaaaacccttttgtgattcaggtagggggagaggaggagttaagggctccgtttactcccaagtcatggatttttaatattccatttttatcactaatatacctctcttcctagaagctactggagtattgagtgttgtgggaaaaggctaactgtgaattaagttaatgtttttcttataagaaatggaagtttatttttttattgatattactatgtgatgaactgagtatgcatatactgaaatggaaggaaattttaaaactattattctagaagaaatgggcagttttgtaatttggtggtggctgagaccccatagaagttttactatgtaaataatttggagagtgaataaggagattgtgctatgaaatcctgacagcgctctttaggaggcagacttgacagtcctaggaaggttgacataaaaataccaaccttcagtaaagctctagtacaaaaaagggtaaatgtcatcattcttatttttaggcctctttcttgagagaggtgggagtgggaggtagtgttataactggcactttaatttgtttttggaactagaatttaggggcagttggatgaaattgcaaatttagaaggggaataagaattttctagtgctatataaagaaatgatgatggagacaaaagccttgctttcctctttttagaatttattttcgatttttagcatactgtggggcttttagagctaatatgatctaaattcagaaaatttaattttcatagtaggccaggtgtgaattacttatgtttgctatagaatgcttatttagactaacaataaatttactttgctttctaaggccagtcagcgaatgtggggatgaggcaggatgttttaaatgagccagagatgatccacaaagtgaacagtcgacacagaggtctttgagttggatggttgcaaatatattgacattagagtgaaaactccttcctttgggtaaactaaagaaagataaagtatactaaaaaattttaagatggtgttatacaaaaaaaagtttgggtctaacgtgtccacaaagactgtcaagtgaagaatggtggagattcttggtgtttgagcagccaacctggatgagtgacttcagggacagagcagaggaaagcaaaatgaatttcctttatttacccaaaacttgttgactgaatttttgtataggtccgggaaaataagcctaaacaaatagttgtagccttagaaaaactgttttcccatttctttctgagttagaatcagcatagcctccctgtcgccttaaatgtaaaaatcctattttgattaataccccagcctaagagttatagcaatacgagagactgaatctatttttgtttcgggtctttacctcatagtatgaaattagtaagacactgcatagattttgccctgaatactggtgtgcccaggtatgccgtgctctctctctgtttccagtggtggtaattttaaggcctaaagaaagctggggttaatcctgaagctaaaagtaaatgtttcttgaattgattttgttctgtggtacaaataacatctatgaatatcatatctgtatatatctgaaccaagttgtgtgcagagaggttgatataactatatttacagaaaatgatttttacaattaaagttcacattttaacatgaaaaaaagtgctgca

SEQ ID NO: 360945 - DNA, 7458 bp, Homo sapiens
  misc_feature (595)..(595): n is a, c, g, or t
gtgggcgtggtgtgctatagagtgtactgctgctgctgcttggccaacgtttcactgcctggcatcgggggcaccattcctgagtccaaacctttcttctacgtgaacgtggctgacatcgagagcctggaggtagaggtgtcctatgtggcctgcaccacagagaagatattcgaggagaagcgggagctgtatgacgtctacgtggataaccagaatgtgaagacacaccacgaccacctgcagccgctgctgaagatcaacagtgctgacagggagaagtaccgccggctcaacgagcagaggcagatgctgttgtactcccaggaagtagaagaagactacaacccttgtgaagaggacctcttcgtgctgtttttcctagaacaaaacaaccggatatttcagactttgttggaggtgtctgccagtcaagacaaaactctgacagcagagcatgcccggggcatgggcctagacccccaaggagaccggagctttctcctggacctgctggaggcctatggcattgatgtcatgctggttatcgacaacccctgttgcccgtaggaggagccaacaggactgggagccncttcacgtgggatgtcagcagcccggagttcaccccagggccccagagggcctcattttttattaagttgacacaaaggaatattgtttatactttccaacaaacataatttttgcaatttcctttctgcccttttccctagagataaggtgagatcaccttggttttgtgtcctgccatgttaggatattggaatctgccactttctcccagagctgctggtcctctgggcttggtcatgggagttgtatcactaggagtaggctgagctctggaaacattgggatggactgttcagaaagtctgtgtggtctttgtcccttgatgtatttgagaataagacaaccacctgtcccctgtggccttagatgttcatctgcctaaaggcagaaactagaccagatgatcttttaaggtttttagtagttctaggagtctatagtcttgggatcaaatcccttttcttgttcattagggcaactttatgtcttctctgtttacttgagtagggaccacaaagagggaaaaaaggatgtttctgacaccaaatatgagcttatcttatggtcagaatgaaagaggttgcttatcagtgagctgaaaactaaaattatagaatgaagcctggaaaccttcctcaaagtaacttgatggtggccatgcaatgtaatgttcctctttgtctgaaccttcctcttcttgggatgaattggtgaattgctaagggccaatgctggccttggagcttgcaagcaaattaattttccagtttagtctcttaagggttcaataatgctcttggagtaagttgggtatttttaaaggctgaagtttggactaccggaggatagagcaattgaagttcgagcaggatggagaagccactctaagtctcttcatctggacacgaattctctggaggcattagcagcagcacctctgggtcaacacagatttactggattccaaaatctagcaaggatctgagctggttaactcagagggtggagcatgatgctaacaagacggtttatcattttggacccctcacaaacacacttctctttagcagaggtgacattccttaggctaaataattggatccagggacataacagatttgttgagagaaaatgtggcagtgccttcacccgggacagtggtcaggaagccctgagcatccctgatggatttatccatcctcttctgaagtgctctgctctaggctgggtcctgttgccacctgcctgttctctggttggcttttgcaggagggcagcttacgtgtttgtcaaccagttagaaagccagttcctgtgggtcgagtttaggcctttttggccatagttgagaattttgacttgggatactgggttgttggtgacaaataatgtcttccttttcccccttcccgcctggctcggttatgggaatagccgtcagtgcatccatgtctgtgaccaacacccagccagactaatgtacacagcagggagaaataacattcaaatggtggttcacacatctcatctcaagataagattcttagggttcactgctttattcaaaagtgttttcactgtagctccttcatatggaatatcaaaactgaagaaattcacatgtggaaatgcaaatagacattgattaatcaaggtagcatctttatgtaaatatataaataagtttgggcattgaaatgtaaactgtacagctaatagacttttctcctctgcaatgtgggttgctgtcatttcagtaatgtgtatgtttacaaaagaaaaaaaaatctgtgtttcgaggttgaagcctcaccttttattctcctttacatgcaaccctctcctcttgcctctcaagggttgaggggtcctttctgtcaagtaatggttatttttcgtggtatcctgaggttcagggtgttttaagctgggggtaggaggttagaggcaggagtagaagtgaaaggaaaggtctgattctcctagaggacacaagaagacctcctttttctggaattagggaatctgccggaaggagctgtttgaggcatttctgctctgagccttctatatgcaaacactgcagttttaactgcaagctcagaagtgctggtgtaaacatagcagggtgagaatgaagttcctgttttttcctttgaatggtgagtcagggcttctgggttcccttaactttgtgcttgtctcggtagctttctgtctcacatctccacgtgtccaccctcctgctcatgcagagggccagggtatgggtggccccagaggagaacgtgccagtgaggcagtgccatgtttcaggtcataggggccttgggctcagctgaccccaatgcagaacttctccctttaagagagattccaataaattggtccttccctaccttgccagcttcttcataggaccagaaatcttgtgcagagcctctgcttggctgaacagcgtgtgctttatctcttcagttacctttgccactgttgagcatcctcagagtatgtcttgcctgggctatgaagtggagcctgtggcttcggaaatcacctttcgaagccttgctctatgccagattctgctccccaacatgacagattaacaggcacaacctaggatcctttgctaccagttctctactagggaattccacagtggcagcagaagctaggagccatgtggacctgcttttctgccagtcttgaaatattttctgagaaaccatctgcttttgttcagaagaaagtgctgaacatcgttcacagacttctaggtctgtaagctctttaggggcgggcattatgatgaccaccggcctcctggaggagggttggatacctgtggtgtgacaccttctgccaccatctcctgccgggcctcagccctcgcctgcctgagcaggcctagttctcctgtgaagctgtcagcctgatctcatgccacactgtgaaatgaactatgtgccagtttggaaatgattgctgacctgagatgctggctgggctgccctgttgttcctgaataagtcagaagaagttccaggtgggagtggaattcaggtttggggctcgttggtatccatgcaaaatatgacaaaggcctgttcaagagggcattttcaattctgtaggctcagcagatgatactgcccagcctttgggaaaatgtccagttggcccctggcttaggactctccacaaggagtttgaaatggtagggcttatcccctaccagactaaaagtatggcccaaattatgtgtttagaatttgcttggcctttaaacacgaaccattccctatgcctggtagagaccattccagtgtcagtgtcccacctgggacctgtacagtcctcagtaaattatgattgcaatgaattagaaggcttttgccttccatatccatcatccattatagcatctgtgcttccacctggttagggggagggaagctgaaatcattgatgtatcaatagaagtaatttagcttaggaacttgcatctataacttaccttgttttgttccactttaaagtcaagacaagaaagttaagatagcacacaggtgcacatgcttccagatgccacatgtgaacatttgttgatcatgtgactaccgatgacactttagctagaagataaattaaatcttagctaaatcattgtttttccttctggtggctatgaggatgaatttgctctcagtcttgatgcactgaaagcccttcaaacacagtaaaagatgaaatcactcatctttaaactgaggccttcagggaagcttttgtaaaggacagtaatgaattaggctttcagttttaggacatcaaccctccgagaaaaggcagaaacccgagggaccatttatttcccttcgaaactgtatagcccagggaatggattgagatgctttctccagaccctgtataggtcaaccttgcagaggtaaaggaggaggggcaggtggatgaataaaataggataatgctcagcttggcagtggacttgccttagtgtgatgacaggtctaacatgggcaagacaattagaatggggaccaatatgccaggcatgggcttttatctccctagtagatcccaagctagtaggcttggattctgccaaatggccagccctcctgtcttctccccgtaccttgtagttagaccgaggtgagaatcctgctgaccccagtcccatcccctctcatttcaggaaaacccttttgtgattcaggtagggggagaggaggagttaagggctccgtttactcccaagtcatggatttttaatattccatttttatcactaatatacctctcttcctagaagctactggagtattgagtgttgtgggaaaaggctaactgtgaattaagttaatgtttttcttataagaaatggaagtttatttttttattgatattactatgtgatgaactgagtatgcatatactgaaatggaaggaaattttaaaactattattctagaagaaatgggcagttttgtaatttggtggtggctgagaccccatagaagttttactatgtaaataatttggagagtgaataaggagattgtgctatgaaatcctgacagcgctctttaggaggcagacttgacagtcctaggaaggttgacataaaaataccaaccttcagtaaagctctagtacaaaaaagggtaaatgtcatcattcttatttttaggcctctttcttgagagaggtgggagtgggaggtagtgttataactggcactttaatttgtttttggaactagaatttaggggcagttggatgaaattgcaaatttagaaggggaataagaattttctagtgctatataaagaaatgatgatggagacaaaagccttgctttcctctttttagaatttattttcgatttttagcatactgtggggcttttagagctaatatgatctaaattcagaaaatttaattttcatagtaggccaggtgtgaattacttatgtttgctatagaatgcttatttagactaacaataaatttactttgctttctaaggccagtcagcgaatgtggggatgaggcaggatgttttaaatgagccagagatgatccacaaagtgaacagtcgacacagaggtctttgagttggatggttgcaaatatattgacattagagtgaaaactccttcctttgggtaaactaaagaaagataaagtatactaaaaaattttaagatggtgttatacaaaaaaaagtttgggtctaacgtgtccacaaagactgtcaagtgaagaatggtggagattcttggtgtttgagcagccaacctggatgagtgacttcagggacagagcagaggaaagcaaaatgaatttcctttatttacccaaaacttgttgactgaatttttgtataggtccgggaaaataagcctaaacaaatagttgtagccttagaaaaactgttttcccatttctttctgagttagaatcagcatagcctccctgtcgccttaaatgtaaaaatcctattttgattaataccccagcctaagagttatagcaatacgagagactgaatctatttttgtttcgggtctttacctcatagtatgaaattagtaagacactgcatagattttgccctgaatactggtgtgcccaggtatgccgtgctctctctctgtttccagtggtggtaattttaaggcctaaagaaagctggggttaatcctgaagctaaaagtaaatgtttcttgaattgattttgttctgtggtacaaataacatctatgaatatcatatctgtatatatctgaaccaagttgtgtgcagagaggttgatataactatatttacagatcccttctccagtccgagaaatgtggtttgtggtaggaaggaatggtggcctactccatgagcagagcctgtgggggctgaacctgacttcacttacagtgatgatggaggagattggggagctgctacctgtccttctagaagccacggtctggacaaactttctccaggatcacagaagaactgcagcttcctggggagcagtttcacctccacaggcatcgcttcatactcctcactgtcaatgctaaaagagccccctgctccctggggagaagagaatattcagaacagctcaaacacatcagtggcctactggagttggaggtctcacagcagcaccagaagaagttcattatggaaaacaacatcctctcttgaggagctatcctaatgttcttttacaaaaaaaaattcagtgcctactacgatgggcacagtgctggttctggaaacatcctaattctaccatccatgaaaaaggatttattttctttttttggcccctatctcctcccagagtattttgggatttgaacaacatggttataattttcaaatatgtattaaaaggcaagggtcctgccatgtcttaaggaactcatatacatagtctttctatattatgctaatccttctcaaataaaaataaagacagctaattctcttatgacatgctattgtatctgctggatcattttcattattctctaagacttgtttagcttgatatacccaaggtgtatcaacattaatatcattacagtctatgaaacccttccataactcatgcatttaattcaatatttatatcgaaactgtgacgccagtcactatggggataccttctgtttacctatagtcttgtctgaatacagtaatatatggccacatgtcttcaaaggctatatgaagagcctcctttttttccgtattgacaattgaataacctcccaattccagattctatttccaatttttttcacttacataggttat

SEQ ID NO: 360946 - DNA, 7511 bp, Homo sapiens
  misc_feature (595)..(595): n is a, c, g, or t
gtgggcgtggtgtgctatagagtgtactgctgctgctgcttggccaacgtttcactgcctggcatcgggggcaccattcctgagtccaaacctttcttctacgtgaacgtggctgacatcgagagcctggaggtagaggtgtcctatgtggcctgcaccacagagaagatattcgaggagaagcgggagctgtatgacgtctacgtggataaccagaatgtgaagacacaccacgaccacctgcagccgctgctgaagatcaacagtgctgacagggagaagtaccgccggctcaacgagcagaggcagatgctgttgtactcccaggaagtagaagaagactacaacccttgtgaagaggacctcttcgtgctgtttttcctagaacaaaacaaccggatatttcagactttgttggaggtgtctgccagtcaagacaaaactctgacagcagagcatgcccggggcatgggcctagacccccaaggagaccggagctttctcctggacctgctggaggcctatggcattgatgtcatgctggttatcgacaacccctgttgcccgtaggaggagccaacaggactgggagccncttcacgtgggatgtcagcagcccggagttcaccccagggccccagagggcctcattttttattaagttgacacaaaggaatattgtttatactttccaacaaacataatttttgcaatttcctttctgcccttttccctagagataaggtgagatcaccttggttttgtgtcctgccatgttaggatattggaatctgccactttctcccagagctgctggtcctctgggcttggtcatgggagttgtatcactaggagtaggctgagctctggaaacattgggatggactgttcagaaagtctgtgtggtctttgtcccttgatgtatttgagaataagacaaccacctgtcccctgtggccttagatgttcatctgcctaaaggcagaaactagaccagatgatcttttaaggtttttagtagttctaggagtctatagtcttgggatcaaatcccttttcttgttcattagggcaactttatgtcttctctgtttacttgagtagggaccacaaagagggaaaaaaggatgtttctgacaccaaatatgagcttatcttatggtcagaatgaaagaggttgcttatcagtgagctgaaaactaaaattatagaatgaagcctggaaaccttcctcaaagtaacttgatggtggccatgcaatgtaatgttcctctttgtctgaaccttcctcttcttgggatgaattggtgaattgctaagggccaatgctggccttggagcttgcaagcaaattaattttccagtttagtctcttaagggttcaataatgctcttggagtaagttgggtatttttaaaggctgaagtttggactaccggaggatagagcaattgaagttcgagcaggatggagaagccactctaagtctcttcatctggacacgaattctctggaggcattagcagcagcacctctgggtcaacacagatttactggattccaaaatctagcaaggatctgagctggttaactcagagggtggagcatgatgctaacaagacggtttatcattttggacccctcacaaacacacttctctttagcagaggtgacattccttaggctaaataattggatccagggacataacagatttgttgagagaaaatgtggcagtgccttcacccgggacagtggtcaggaagccctgagcatccctgatggatttatccatcctcttctgaagtgctctgctctaggctgggtcctgttgccacctgcctgttctctggttggcttttgcaggagggcagcttacgtgtttgtcaaccagttagaaagccagttcctgtgggtcgagtttaggcctttttggccatagttgagaattttgacttgggatactgggttgttggtgacaaataatgtcttccttttcccccttcccgcctggctcggttatgggaatagccgtcagtgcatccatgtctgtgaccaacacccagccagactaatgtacacagcagggagaaataacattcaaatggtggttcacacatctcatctcaagataagattcttagggttcactgctttattcaaaagtgttttcactgtagctccttcatatggaatatcaaaactgaagaaattcacatgtggaaatgcaaatagacattgattaatcaaggtagcatctttatgtaaatatataaataagtttgggcattgaaatgtaaactgtacagctaatagacttttctcctctgcaatgtgggttgctgtcatttcagtaatgtgtatgtttacaaaagaaaaaaaaatctgtgtttcgaggttgaagcctcaccttttattctcctttacatgcaaccctctcctcttgcctctcaagggttgaggggtcctttctgtcaagtaatggttatttttcgtggtatcctgaggttcagggtgttttaagctgggggtaggaggttagaggcaggagtagaagtgaaaggaaaggtctgattctcctagaggacacaagaagacctcctttttctggaattagggaatctgccggaaggagctgtttgaggcatttctgctctgagccttctatatgcaaacactgcagttttaactgcaagctcagaagtgctggtgtaaacatagcagggtgagaatgaagttcctgttttttcctttgaatggtgagtcagggcttctgggttcccttaactttgtgcttgtctcggtagctttctgtctcacatctccacgtgtccaccctcctgctcatgcagagggccagggtatgggtggccccagaggagaacgtgccagtgaggcagtgccatgtttcaggtcataggggccttgggctcagctgaccccaatgcagaacttctccctttaagagagattccaataaattggtccttccctaccttgccagcttcttcataggaccagaaatcttgtgcagagcctctgcttggctgaacagcgtgtgctttatctcttcagttacctttgccactgttgagcatcctcagagtatgtcttgcctgggctatgaagtggagcctgtggcttcggaaatcacctttcgaagccttgctctatgccagattctgctccccaacatgacagattaacaggcacaacctaggatcctttgctaccagttctctactagggaattccacagtggcagcagaagctaggagccatgtggacctgcttttctgccagtcttgaaatattttctgagaaaccatctgcttttgttcagaagaaagtgctgaacatcgttcacagacttctaggtctgtaagctctttaggggcgggcattatgatgaccaccggcctcctggaggagggttggatacctgtggtgtgacaccttctgccaccatctcctgccgggcctcagccctcgcctgcctgagcaggcctagttctcctgtgaagctgtcagcctgatctcatgccacactgtgaaatgaactatgtgccagtttggaaatgattgctgacctgagatgctggctgggctgccctgttgttcctgaataagtcagaagaagttccaggtgggagtggaattcaggtttggggctcgttggtatccatgcaaaatatgacaaaggcctgttcaagagggcattttcaattctgtaggctcagcagatgatactgcccagcctttgggaaaatgtccagttggcccctggcttaggactctccacaaggagtttgaaatggtagggcttatcccctaccagactaaaagtatggcccaaattatgtgtttagaatttgcttggcctttaaacacgaaccattccctatgcctggtagagaccattccagtgtcagtgtcccacctgggacctgtacagtcctcagtaaattatgattgcaatgaattagaaggcttttgccttccatatccatcatccattatagcatctgtgcttccacctggttagggggagggaagctgaaatcattgatgtatcaatagaagtaatttagcttaggaacttgcatctataacttaccttgttttgttccactttaaagtcaagacaagaaagttaagatagcacacaggtgcacatgcttccagatgccacatgtgaacatttgttgatcatgtgactaccgatgacactttagctagaagataaattaaatcttagctaaatcattgtttttccttctggtggctatgaggatgaatttgctctcagtcttgatgcactgaaagcccttcaaacacagtaaaagatgaaatcactcatctttaaactgaggccttcagggaagcttttgtaaaggacagtaatgaattaggctttcagttttaggacatcaaccctccgagaaaaggcagaaacccgagggaccatttatttcccttcgaaactgtatagcccagggaatggattgagatgctttctccagaccctgtataggtcaaccttgcagaggtaaaggaggaggggcaggtggatgaataaaataggataatgctcagcttggcagtggacttgccttagtgtgatgacaggtctaacatgggcaagacaattagaatggggaccaatatgccaggcatgggcttttatctccctagtagatcccaagctagtaggcttggattctgccaaatggccagccctcctgtcttctccccgtaccttgtagttagaccgaggtgagaatcctgctgaccccagtcccatcccctctcatttcaggaaaacccttttgtgattcaggtagggggagaggaggagttaagggctccgtttactcccaagtcatggatttttaatattccatttttatcactaatatacctctcttcctagaagctactggagtattgagtgttgtgggaaaaggctaactgtgaattaagttaatgtttttcttataagaaatggaagtttatttttttattgatattactatgtgatgaactgagtatgcatatactgaaatggaaggaaattttaaaactattattctagaagaaatgggcagttttgtaatttggtggtggctgagaccccatagaagttttactatgtaaataatttggagagtgaataaggagattgtgctatgaaatcctgacagcgctctttaggaggcagacttgacagtcctaggaaggttgacataaaaataccaaccttcagtaaagctctagtacaaaaaagggtaaatgtcatcattcttatttttaggcctctttcttgagagaggtgggagtgggaggtagtgttataactggcactttaatttgtttttggaactagaatttaggggcagttggatgaaattgcaaatttagaaggggaataagaattttctagtgctatataaagaaatgatgatggagacaaaagccttgctttcctctttttagaatttattttcgatttttagcatactgtggggcttttagagctaatatgatctaaattcagaaaatttaattttcatagtaggccaggtgtgaattacttatgtttgctatagaatgcttatttagactaacaataaatttactttgctttctaaggccagtcagcgaatgtggggatgaggcaggatgttttaaatgagccagagatgatccacaaagtgaacagtcgacacagaggtctttgagttggatggttgcaaatatattgacattagagtgaaaactccttcctttgggtaaactaaagaaagataaagtatactaaaaaattttaagatggtgttatacaaaaaaaagtttgggtctaacgtgtccacaaagactgtcaagtgaagaatggtggagattcttggtgtttgagcagccaacctggatgagtgacttcagggacagagcagaggaaagcaaaatgaatttcctttatttacccaaaacttgttgactgaatttttgtataggtccgggaaaataagcctaaacaaatagttgtagccttagaaaaactgttttcccatttctttctgagttagaatcagcatagcctccctgtcgccttaaatgtaaaaatcctattttgattaataccccagcctaagagttatagcaatacgagagactgaatctatttttgtttcgggtctttacctcatagtatgaaattagtaagacactgcatagattttgccctgaatactggtgtgcccaggtatgccgtgctctctctctgtttccagtggtggtaattttaaggcctaaagaaagctggggttaatcctgaagctaaaagtaaatgtttcttgaattgattttgttctgtggtacaaataacatctatgaatatcatatctgtatatatctgaaccaagttgtgtgcagagaggttgatataactatatttacagaaaatgatttttacaattaaagttcacattttaacatgaaaaaaagtgctgcaatcccttctccagtccgagaaatgtggtttgtggtaggaaggaatggtggcctactccatgagcagagcctgtgggggctgaacctgacttcacttacagtgatgatggaggagattggggagctgctacctgtccttctagaagccacggtctggacaaactttctccaggatcacagaagaactgcagcttcctggggagcagtttcacctccacaggcatcgcttcatactcctcactgtcaatgctaaaagagccccctgctccctggggagaagagaatattcagaacagctcaaacacatcagtggcctactggagttggaggtctcacagcagcaccagaagaagttcattatggaaaacaacatcctctcttgaggagctatcctaatgttcttttacaaaaaaaaattcagtgcctactacgatgggcacagtgctggttctggaaacatcctaattctaccatccatgaaaaaggatttattttctttttttggcccctatctcctcccagagtattttgggatttgaacaacatggttataattttcaaatatgtattaaaaggcaagggtcctgccatgtcttaaggaactcatatacatagtctttctatattatgctaatccttctcaaataaaaataaagacagctaattctcttatgacatgctattgtatctgctggatcattttcattattctctaagacttgtttagcttgatatacccaaggtgtatcaacattaatatcattacagtctatgaaacccttccataactcatgcatttaattcaatatttatatcgaaactgtgacgccagtcactatggggataccttctgtttacctatagtcttgtctgaatacagtaatatatggccacatgtcttcaaaggctatatgaagagcctcctttttttccgtattgacaattgaataacctcccaattccagattctatttccaatttttttcacttacataggttat

SEQ ID NO: 360947 - DNA, 7403 bp, Homo sapiens
  misc_feature (595)..(595): n is a, c, g, or t
gtgggcgtggtgtgctatagagtgtactgctgctgctgcttggccaacgtttcactgcctggcatcgggggcaccattcctgagtccaaacctttcttctacgtgaacgtggctgacatcgagagcctggaggtagaggtgtcctatgtggcctgcaccacagagaagatattcgaggagaagcgggagctgtatgacgtctacgtggataaccagaatgtgaagacacaccacgaccacctgcagccgctgctgaagatcaacagtgctgacagggagaagtaccgccggctcaacgagcagaggcagatgctgttgtactcccaggaagtagaagaagactacaacccttgtgaagaggacctcttcgtgctgtttttcctagaacaaaacaaccggatatttcagactttgttggaggtgtctgccagtcaagacaaaactctgacagcagagcatgcccggggcatgggcctagacccccaaggagaccggagctttctcctggacctgctggaggcctatggcattgatgtcatgctggttatcgacaacccctgttgcccgtaggaggagccaacaggactgggagccncttcacgtgggatgtcagcagcccggagttcaccccagggccccagagggcctcattttttattaagttgacacaaaggaatattgtttatactttccaacaaacataatttttgcaatttcctttctgcccttttccctagagataaggtgagatcaccttggttttgtgtcctgccatgttaggatattggaatctgccactttctcccagagctgctggtcctctgggcttggtcatgggagttgtatcactaggagtaggctgagctctggaaacattgggatggactgttcagaaagtctgtgtggtctttgtcccttgatgtatttgagaataagacaaccacctgtcccctgtggccttagatgttcatctgcctaaaggcagaaactagaccagatgatcttttaaggtttttagtagttctaggagtctatagtcttgggatcaaatcccttttcttgttcattagggcaactttatgtcttctctgtttacttgagtagggaccacaaagagggaaaaaaggatgtttctgacaccaaatatgagcttatcttatggtcagaatgaaagaggttgcttatcagtgagctgaaaactaaaattatagaatgaagcctggaaaccttcctcaaagtaacttgatggtggccatgcaatgtaatgttcctctttgtctgaaccttcctcttcttgggatgaattggtgaattgctaagggccaatgctggccttggagcttgcaagcaaattaattttccagtttagtctcttaagggttcaataatgctcttggagtaagttgggtatttttaaaggctgaagtttggactaccggaggatagagcaattgaagttcgagcaggatggagaagccactctaagtctcttcatctggacacgaattctctggaggcattagcagcagcacctctgggtcaacacagatttactggattccaaaatctagcaaggatctgagctggttaactcagagggtggagcatgatgctaacaagacggtttatcattttggacccctcacaaacacacttctctttagcagaggtgacattccttaggctaaataattggatccagggacataacagatttgttgagagaaaatgtggcagtgccttcacccgggacagtggtcaggaagccctgagcatccctgatggatttatccatcctcttctgaagtgctctgctctaggctgggtcctgttgccacctgcctgttctctggttggcttttgcaggagggcagcttacgtgtttgtcaaccagttagaaagccagttcctgtgggtcgagtttaggcctttttggccatagttgagaattttgacttgggatactgggttgttggtgacaaataatgtcttccttttcccccttcccgcctggctcggttatgggaatagccgtcagtgcatccatgtctgtgaccaacacccagccagactaatgtacacagcagggagaaataacattcaaatggtggttcacacatctcatctcaagataagattcttagggttcactgctttattcaaaagtgttttcactgtagctccttcatatggaatatcaaaactgaagaaattcacatgtggaaatgcaaatagacattgattaatcaaggtagcatctttatgtaaatatataaataagtttgggcattgaaatgtaaactgtacagctaatagacttttctcctctgcaatgtgggttgctgtcatttcagtaatgtgtatgtttacaaaagaaaaaaaaatctgtgtttcgaggttgaagcctcaccttttattctcctttacatgcaaccctctcctcttgcctctcaagggttgaggggtcctttctgtcaagtaatggttatttttcgtggtatcctgaggttcagggtgttttaagctgggggtaggaggttagaggcaggagtagaagtgaaaggaaaggtctgattctcctagaggacacaagaagacctcctttttctggaattagggaatctgccggaaggagctgtttgaggcatttctgctctgagccttctatatgcaaacactgcagttttaactgcaagctcagaagtgctggtgtaaacatagcagggtgagaatgaagttcctgttttttcctttgaatggtgagtcagggcttctgggttcccttaactttgtgcttgtctcggtagctttctgtctcacatctccacgtgtccaccctcctgctcatgcagagggccagggtatgggtggccccagaggagaacgtgccagtgaggcagtgccatgtttcaggtcataggggccttgggctcagctgaccccaatgcagaacttctccctttaagagagattccaataaattggtccttccctaccttgccagcttcttcataggaccagaaatcttgtgcagagcctctgcttggctgaacagcgtgtgctttatctcttcagttacctttgccactgttgagcatcctcagagtatgtcttgcctgggctatgaagtggagcctgtggcttcggaaatcacctttcgaagccttgctctatgccagattctgctccccaacatgacagattaacaggcacaacctaggatcctttgctaccagttctctactagggaattccacagtggcagcagaagctaggagccatgtggacctgcttttctgccagtcttgaaatattttctgagaaaccatctgcttttgttcagaagaaagtgctgaacatcgttcacagacttctaggtctgtaagctctttaggggcgggcattatgatgaccaccggcctcctggaggagggttggatacctgtggtgtgacaccttctgccaccatctcctgccgggcctcagccctcgcctgcctgagcaggcctagttctcctgtgaagctgtcagcctgatctcatgccacactgtgaaatgaactatgtgccagtttggaaatgattgctgacctgagatgctggctgggctgccctgttgttcctgaataagtcagaagaagttccaggtgggagtggaattcaggtttggggctcgttggtatccatgcaaaatatgacaaaggcctgttcaagagggcattttcaattctgtaggctcagcagatgatactgcccagcctttgggaaaatgtccagttggcccctggcttaggactctccacaaggagtttgaaatggtagggcttatcccctaccagactaaaagtatggcccaaattatgtgtttagaatttgcttggcctttaaacacgaaccattccctatgcctggtagagaccattccagtgtcagtgtcccacctgggacctgtacagtcctcagtaaattatgattgcaatgaattagaaggcttttgccttccatatccatcatccattatagcatctgtgcttccacctggttagggggagggaagctgaaatcattgatgtatcaatagaagtaatttagcttaggaacttgcatctataacttaccttgttttgttccactttaaagtcaagacaagaaagttaagatagcacacaggtgcacatgcttccagatgccacatgtgaacatttgttgatcatgtgactaccgatgacactttagctagaagataaattaaatcttagctaaatcattgtttttccttctggtggctatgaggatgaatttgctctcagtcttgatgcactgaaagcccttcaaacacagtaaaagatgaaatcactcatctttaaactgaggccttcagggaagcttttgtaaaggacagtaatgaattaggctttcagttttaggacatcaaccctccgagaaaaggcagaaacccgagggaccatttatttcccttcgaaactgtatagcccagggaatggattgagatgctttctccagaccctgtataggtcaaccttgcagaggtaaaggaggaggggcaggtggatgaataaaataggataatgctcagcttggcagtggacttgccttagtgtgatgacaggtctaacatgggcaagacaattagaatggggaccaatatgccaggcatgggcttttatctccctagtagatcccaagctagtaggcttggattctgccaaatggccagccctcctgtcttctccccgtaccttgtagttagaccgaggtgagaatcctgctgaccccagtcccatcccctctcatttcaggaaaacccttttgtgattcaggtagggggagaggaggagttaagggctccgtttactcccaagtcatggatttttaatattccatttttatcactaatatacctctcttcctagaagctactggagtattgagtgttgtgggaaaaggctaactgtgaattaagttaatgtttttcttataagaaatggaagtttatttttttattgatattactatgtgatgaactgagtatgcatatactgaaatggaaggaaattttaaaactattattctagaagaaatgggcagttttgtaatttggtggtggctgagaccccatagaagttttactatgtaaataatttggagagtgaataaggagattgtgctatgaaatcctgacagcgctctttaggaggcagacttgacagtcctaggaaggttgacataaaaataccaaccttcagtaaagctctagtacaaaaaagggtaaatgtcatcattcttatttttaggcctctttcttgagagaggtgggagtgggaggtagtgttataactggcactttaatttgtttttggaactagaatttaggggcagttggatgaaattgcaaatttagaaggggaataagaattttctagtgctatataaagaaatgatgatggagacaaaagccttgctttcctctttttagaatttattttcgatttttagcatactgtggggcttttagagctaatatgatctaaattcagaaaatttaattttcatagtaggccaggtgtgaattacttatgtttgctatagaatgcttatttagactaacaataaatttactttgctttctaaggccagtcagcgaatgtggggatgaggcaggatgttttaaatgagccagagatgatccacaaagtgaacagtcgacacagaggtctttgagttggatggttgcaaatatattgacattagagtgaaaactccttcctttgggtaaactaaagaaagataaagtatactaaaaaattttaagatggtgttatacaaaaaaaagtttgggtctaacgtgtccacaaagactgtcaagtgaagaatggtggagattcttggtgtttgagcagccaacctggatgagtgacttcagggacagagcagaggaaagcaaaatgaatttcctttatttacccaaaacttgttgactgaatttttgtataggtccgggaaaataagcctaaacaaatagttgtagccttagaaaaactgttttcccatttctttctgagttagaatcagcatagcctccctgtcgccttaaatgtaaaaatcctattttgattaataccccagcctaagagttatagcaatacgagagactgaatctatttttgtttcgggtctttacctcatagtatgaaattagtaagacactgcatagattttgccctgaatactggtgtgcccaggtatgccgtgctctctctctgtttccagtggtggtaattttaaggcctaaagaaagctggggttaatcctgaagctaaaagtaaatgtttcttgaattgattttgttctgtggtacaaataacatctatgaatatcatatctgtatatatctgaaccaagttgtgtgcagagaggttgatataactatatttacagatcccttctccagtccgagaaatgtggtttgtggtaggaaggaatggtggcctactccatgagcagagcctgtgggggctgaacctgacttcacttacagtgatgatggaggagattggggagctgctacctgtccttctagaagccacggtctggacaaactttctccaggatcacagaagaactgcagcttcctggggagcagtttcacctccacaggcatcgcttcatactcctcactgtcaatgctaaaagagccccctgctccctggggagaagagaatattcagaacagctcaaacacatcagtggcctactggagttggaggtctcacagcagcaccagaagaaaaaaaaaaattcagtgcctactacgatgggcacagtgctggttctggaaacatcctaattctaccatccatgaaaaaggatttattttctttttttggcccctatctcctcccagagtattttgggatttgaacaacatggttataattttcaaatatgtattaaaaggcaagggtcctgccatgtcttaaggaactcatatacatagtctttctatattatgctaatccttctcaaataaaaataaagacagctaattctcttatgacatgctattgtatctgctggatcattttcattattctctaagacttgtttagcttgatatacccaaggtgtatcaacattaatatcattacagtctatgaaacccttccataactcatgcatttaattcaatatttatatcgaaactgtgacgccagtcactatggggataccttctgtttacctatagtcttgtctgaatacagtaatatatggccacatgtcttcaaaggctatatgaagagcctcctttttttccgtattgacaattgaataacctcccaattccagattctatttccaatttttttcacttacataggttat

SEQ ID NO: 360948 - DNA, 1276 bp, Homo sapiens
tccctgttccccctaaaatccctgttccccctaaagctctagtacaaaaaagggtaaatgtcatcattcttatttttaggcctctttcttgagagaggtgggagtgggaggtagtgttataactggcactttaatttgtttttggaactagaatttaggggcagttggatgaaattgcaaatttagaaggggaataagaattttctagtgctatataaagaaatgatgatggagacaaaagccttgctttcctctttttagaatttattttcgatttttagcatactgtggggcttttagagctaatatgatctaaattcagaaaatttaattttcatagtaggccaggtgtgaattacttatgtttgctatagaatgcttatttagactaacaataaatttactttgctttctaaggccagtcagcgaatgtggggatgaggcaggatgttttaaatgagccagagatgatccacaaagtgaacagtcgacacagaggtctttgagttggatggttgcaaatatattgacattagagtgaaaactccttcctttgggtaaactaaagaaagataaagtatactaaaaaattttaagatggtgttatacaaaaaaaagtttgggtctaacgtgtccacaaagactgtcaagtgaagaatggtggagattcttggtgtttgagcagccaacctggatgagtgacttcagggacagagcagaggaaagcaaaatgaatttcctttatttacccaaaacttgttgactgaatttttgtataggtccgggaaaataagcctaaacaaatagttgtagccttagaaaaactgttttcccatttctttctgagttagaatcagcatagcctccctgtcgccttaaatgtaaaaatcctattttgattaataccccagcctaagagttatagcaatacgagagactgaatctatttttgtttcgggtctttacctcatagtatgaaattagtaagacactgcatagattttgccctgaatactggtgtgcccaggtatgccgtgctctctctctgtttccagtggtggtaattttaaggcctaaagaaagctggggttaatcctgaagctaaaagtaaatgtttcttgaattgattttgttctgtggtacaaataacatctatgaatatcatatctgtatatatctgaaccaagttgtgtgcagagaggttgatataactatatttacagaaaatgatttttacaattaaagttcacattttaacatgaaaaaaagtgctgca

SEQ ID NO: 360949 - DNA, 6176 bp, Homo sapiens
  misc_feature (595)..(595): n is a, c, g, or t
gtgggcgtggtgtgctatagagtgtactgctgctgctgcttggccaacgtttcactgcctggcatcgggggcaccattcctgagtccaaacctttcttctacgtgaacgtggctgacatcgagagcctggaggtagaggtgtcctatgtggcctgcaccacagagaagatattcgaggagaagcgggagctgtatgacgtctacgtggataaccagaatgtgaagacacaccacgaccacctgcagccgctgctgaagatcaacagtgctgacagggagaagtaccgccggctcaacgagcagaggcagatgctgttgtactcccaggaagtagaagaagactacaacccttgtgaagaggacctcttcgtgctgtttttcctagaacaaaacaaccggatatttcagactttgttggaggtgtctgccagtcaagacaaaactctgacagcagagcatgcccggggcatgggcctagacccccaaggagaccggagctttctcctggacctgctggaggcctatggcattgatgtcatgctggttatcgacaacccctgttgcccgtaggaggagccaacaggactgggagccncttcacgtgggatgtcagcagcccggagttcaccccagggccccagagggcctcattttttattaagttgacacaaaggaatattgtttatactttccaacaaacataatttttgcaatttcctttctgcccttttccctagagataaggtgagatcaccttggttttgtgtcctgccatgttaggatattggaatctgccactttctcccagagctgctggtcctctgggcttggtcatgggagttgtatcactaggagtaggctgagctctggaaacattgggatggactgttcagaaagtctgtgtggtctttgtcccttgatgtatttgagaataagacaaccacctgtcccctgtggccttagatgttcatctgcctaaaggcagaaactagaccagatgatcttttaaggtttttagtagttctaggagtctatagtcttgggatcaaatcccttttcttgttcattagggcaactttatgtcttctctgtttacttgagtagggaccacaaagagggaaaaaaggatgtttctgacaccaaatatgagcttatcttatggtcagaatgaaagaggttgcttatcagtgagctgaaaactaaaattatagaatgaagcctggaaaccttcctcaaagtaacttgatggtggccatgcaatgtaatgttcctctttgtctgaaccttcctcttcttgggatgaattggtgaattgctaagggccaatgctggccttggagcttgcaagcaaattaattttccagtttagtctcttaagggttcaataatgctcttggagtaagttgggtatttttaaaggctgaagtttggactaccggaggatagagcaattgaagttcgagcaggatggagaagccactctaagtctcttcatctggacacgaattctctggaggcattagcagcagcacctctgggtcaacacagatttactggattccaaaatctagcaaggatctgagctggttaactcagagggtggagcatgatgctaacaagacggtttatcattttggacccctcacaaacacacttctctttagcagaggtgacattccttaggctaaataattggatccagggacataacagatttgttgagagaaaatgtggcagtgccttcacccgggacagtggtcaggaagccctgagcatccctgatggatttatccatcctcttctgaagtgctctgctctaggctgggtcctgttgccacctgcctgttctctggttggcttttgcaggagggcagcttacgtgtttgtcaaccagttagaaagccagttcctgtgggtcgagtttaggcctttttggccatagttgagaattttgacttgggatactgggttgttggtgacaaataatgtcttccttttcccccttcccgcctggctcggttatgggaatagccgtcagtgcatccatgtctgtgaccaacacccagccagactaatgtacacagcagggagaaataacattcaaatggtggttcacacatctcatctcaagataagattcttagggttcactgctttattcaaaagtgttttcactgtagctccttcatatggaatatcaaaactgaagaaattcacatgtggaaatgcaaatagacattgattaatcaaggtagcatctttatgtaaatatataaataagtttgggcattgaaatgtaaactgtacagctaatagacttttctcctctgcaatgtgggttgctgtcatttcagtaatgtgtatgtttacaaaagaaaaaaaaatctgtgtttcgaggttgaagcctcaccttttattctcctttacatgcaaccctctcctcttgcctctcaagggttgaggggtcctttctgtcaagtaatggttatttttcgtggtatcctgaggttcagggtgttttaagctgggggtaggaggttagaggcaggagtagaagtgaaaggaaaggtctgattctcctagaggacacaagaagacctcctttttctggaattagggaatctgccggaaggagctgtttgaggcatttctgctctgagccttctatatgcaaacactgcagttttaactgcaagctcagaagtgctggtgtaaacatagcagggtgagaatgaagttcctgttttttcctttgaatggtgagtcagggcttctgggttcccttaactttgtgcttgtctcggtagctttctgtctcacatctccacgtgtccaccctcctgctcatgcagagggccagggtatgggtggccccagaggagaacgtgccagtgaggcagtgccatgtttcaggtcataggggccttgggctcagctgaccccaatgcagaacttctccctttaagagagattccaataaattggtccttccctaccttgccagcttcttcataggaccagaaatcttgtgcagagcctctgcttggctgaacagcgtgtgctttatctcttcagttacctttgccactgttgagcatcctcagagtatgtcttgcctgggctatgaagtggagcctgtggcttcggaaatcacctttcgaagccttgctctatgccagattctgctccccaacatgacagattaacaggcacaacctaggatcctttgctaccagttctctactagggaattccacagtggcagcagaagctaggagccatgtggacctgcttttctgccagtcttgaaatattttctgagaaaccatctgcttttgttcagaagaaagtgctgaacatcgttcacagacttctaggtctgtaagctctttaggggcgggcattatgatgaccaccggcctcctggaggagggttggatacctgtggtgtgacaccttctgccaccatctcctgccgggcctcagccctcgcctgcctgagcaggcctagttctcctgtgaagctgtcagcctgatctcatgccacactgtgaaatgaactatgtgccagtttggaaatgattgctgacctgagatgctggctgggctgccctgttgttcctgaataagtcagaagaagttccaggtgggagtggaattcaggtttggggctcgttggtatccatgcaaaatatgacaaaggcctgttcaagagggcattttcaattctgtaggctcagcagatgatactgcccagcctttgggaaaatgtccagttggcccctggcttaggactctccacaaggagtttgaaatggtagggcttatcccctaccagactaaaagtatggcccaaattatgtgtttagaatttgcttggcctttaaacacgaaccattccctatgcctggtagagaccattccagtgtcagtgtcccacctgggacctgtacagtcctcagtaaattatgattgcaatgaattagaaggcttttgccttccatatccatcatccattatagcatctgtgcttccacctggttagggggagggaagctgaaatcattgatgtatcaatagaagtaatttagcttaggaacttgcatctataacttaccttgttttgttccactttaaagtcaagacaagaaagttaagatagcacacaggtgcacatgcttccagatgccacatgtgaacatttgttgatcatgtgactaccgatgacactttagctagaagataaattaaatcttagctaaatcattgtttttccttctggtggctatgaggatgaatttgctctcagtcttgatgcactgaaagcccttcaaacacagtaaaagatgaaatcactcatctttaaactgaggccttcagggaagcttttgtaaaggacagtaatgaattaggctttcagttttaggacatcaaccctccgagaaaaggcagaaacccgagggaccatttatttcccttcgaaactgtatagcccagggaatggattgagatgctttctccagaccctgtataggtcaaccttgcagaggtaaaggaggaggggcaggtggatgaataaaataggataatgctcagcttggcagtggacttgccttagtgtgatgacaggtctaacatgggcaagacaattagaatggggaccaatatgccaggcatgggcttttatctccctagtagatcccaagctagtaggcttggattctgccaaatggccagccctcctgtcttctccccgtaccttgtagttagaccgaggtgagaatcctgctgaccccagtcccatcccctctcatttcaggaaaacccttttgtgattcaggtagggggagaggaggagttaagggctccgtttactcccaagtcatggatttttaatattccatttttatcactaatatacctctcttcctagaagctactggagtattgagtgttgtgggaaaaggctaactgtgaattaagttaatgtttttcttataagaaatggaagtttatttttttattgatattactatgtgatgaactgagtatgcatatactgaaatggaaggaaattttaaaactattattctagaagaaatgggcagttttgtaatttggtggtggctgagaccccatagaagttttactatgtaaataatttggagagtgaataaggagattgtgctatgaaatcctgacagcgctctttaggaggcagacttgacagtcctaggaaggttgacataaaaataccaaccttcagtaaagctctagtacaaaaaagggtaaatgtcatcattcttatttttaggcctctttcttgagagaggtgggagtgggaggtagtgttataactggcactttaatttgtttttggaactagaatttaggggcagttggatgaaattgcaaatttagaaggggaataagaattttctagtgctatataaagaaatgatgatggagacaaaagccttgctttcctctttttagaatttattttcgatttttagcatactgtggggcttttagagctaatatgatctaaattcagaaaatttaattttcatagtaggccaggtgtgaattacttatgtttgctatagaatgcttatttagactaacaataaatttactttgctttctaaggccagtcagcgaatgtggggatgaggcaggatgttttaaatgagccagagatgatccacaaagtgaacagtcgacacagaggtctttgagttggatggttgcaaatatattgacattagagtgaaaactccttcctttgggtaaactaaagaaagataaagtatactaaaaaattttaagatggtgttatacaaaaaaaagtttgggtctttacctcatagtatgaaattagtaagacactgcatagattttgccctgaatactggtgtgcccaggtatgccgtgctctctctctgtttccagtggtggtaattttaaggcctaaagaaagctggggttaatcctgaagctaaaagtaaatgtttcttgaattgattttgttctgtggtacaaataacatctatgaatatcatatctgtatatatctgaaccaagttgtgtgcagagaggttgatataactatatttacagaaaatgatttttacaattaaagttcacattttaacatgaaaaaaagtgctgca

SEQ ID NO: 360950 - DNA, 723 bp, Homo sapiens
agcggccgcccgggcaggtacgcggtatactaaaaaattttaagatggtgttatacaaaaaaaagtttgggtctaacgtgtccacaaagactgtcaagtgaagaatggtggagattcttggtgtttgagcagccaacctggatgagtgacttcagggacagagcagaggaaagcaaaatgaatttcctttatttacccaaaacttgttgactgaatttttgtataggtccgggaaaataagcctaaacaaatagttgtagccttagaaaaactgttttcccatttctttctgagttagaatcagcatagcctccctgtcgccttaaatgtaaaaatcctattttgattaataccccagcctaagagttatagcaatacgagagactgaatctatttttgtttcgggtctttacctcatagtatgaaattagtaagacactgcatagattttgccctgaatactggtgtgcccaggtatgccgtgctctctctctgtttccagtggtggtaattttaaggcctaaagaaagctggggttaatcctgaagctaaaagtaaatgtttcttgaattgattttgttctgtggtacaaataacatctatgaatatcatatctgtatatatctgaaccaagttgtgtgcagagaggttgatataactatatttacagaaaatgatttttacaattaaagttcacattttaacatgaaaaaaagtgctgca

SEQ ID NO: 360951 - DNA, 1387 bp, Homo sapiens
aaacaacctcacatatgtttctggactgaggttagaactgaaataaaagctaaacaggagccggagctcacaaaatagcagcacctgtggaggagcctagacataggaaaaggtcaccagggcaggaatgcactttcctggaattcctagcacggtcaaagaagagaaatggaagggcctaggcaggctaagcccaccgtgggctctccactgtggttgcactttggaagaaaacagaagaaagtccttttccgtcttgaaccagcctgaggaaagtccgtgtttaggagggccaaccgtcacaccaaaataaaacatgcgctaatggaagccgattgcaaagcaggtgacagagcacactttgggaagcactgctggagtgggggcagaggggtacttgccatgaaaatgccctggggaccctctgacgacactgttgggatggctgaggcacctgttcccttttggtcccaccggtggcctaaagtgtggtctcagagtgcttgtcttctgctgctcactgggtggggcttgtgagcatctgttctctcttcctaggatcacagaagaactgcagcttcctggggagcagtttcacctccacaggcatcgcttcatactcctcactgtcaatgctaaaagagccccctgctccctggggagaagagaatattcagaacagctcaaacacatcagtggcctactggagttggaggtctcacagcagcaccagaagaagttcattatggaaaacaacatcctctcttgaggagctatcctaatgttcttttacaaaaaaaaattcagtgcctactacgatgggcacagtgctggttctggaaacatcctaattctaccatccatgaaaaaggatttattttctttttttggcccctatctcctcccagagtattttgggatttgaacaacatggttataattttcaaatatgtattaaaaggcaagggtcctgccatgtcttaaggaactcatatacatagtctttctatattatgctaatccttctcaaataaaaataaagacagctaattctcttatgacatgctattgtatctgctggatcattttcattattctctaagacttgtttagcttgatatacccaaggtgtatcaacattaatatcattacagtctatgaaacccttccataactcatgcatttaattcaatatttatatcgaaactgtgacgccagtcactatggggataccttctgtttacctatagtcttgtctgaatacagtaatatatggccacatgtcttcaaaggctatatgaagagcctcctttttttccgtattgacaattgaataacctcccaattccagattctatttccaatttttttcacttacataggttat

SEQ ID NO: 360952 - DNA, 2407 bp, Homo sapiens
  misc_feature (595)..(595): n is a, c, g, or t
gtgggcgtggtgtgctatagagtgtactgctgctgctgcttggccaacgtttcactgcctggcatcgggggcaccattcctgagtccaaacctttcttctacgtgaacgtggctgacatcgagagcctggaggtagaggtgtcctatgtggcctgcaccacagagaagatattcgaggagaagcgggagctgtatgacgtctacgtggataaccagaatgtgaagacacaccacgaccacctgcagccgctgctgaagatcaacagtgctgacagggagaagtaccgccggctcaacgagcagaggcagatgctgttgtactcccaggaagtagaagaagactacaacccttgtgaagaggacctcttcgtgctgtttttcctagaacaaaacaaccggatatttcagactttgttggaggtgtctgccagtcaagacaaaactctgacagcagagcatgcccggggcatgggcctagacccccaaggagaccggagctttctcctggacctgctggaggcctatggcattgatgtcatgctggttatcgacaacccctgttgcccgtaggaggagccaacaggactgggagccncttcacgtgggatgtcagcagcccggagttcaccccagggccccagagggcctcattttttattaagttgacacaaaggaatattgtttatactttccaacaaacataatttttgcaatttcctttctgcccttttccctagagataaggtgagatcaccttggttttgtgtcctgccatgttaggatattggaatctgccactttctcccagagctgctggtcctctgggcttggtcatgggagttgtatcactaggagtaggctgagctctggaaacattgggatggactgttcagaaagtctgtgtggtctttgtcccttgatgtatttgagaataagacaaccacctgtcccctgtggccttagatgttcatctgcctaaaggcagaaactagaccagatgatcttttaaggtttttagtagttctaggagtctatagtcttgggatcaaatcccttttcttgttcattagggcaactttatgtcttctctgtttacttgagtagggaccacaaagagggaaaaaaggatgtttctgacaccaaatatgagcttatcttatggtcagaatgaaagaggttgcttatcagtgagctgaaaactaaaattatagaatgaagcctggaaaccttcctcaaagtaacttgatggtggccatgcaatgtaatgttcctctttgtctgaaccttcctcttcttgggatgaattggtgaattgctaagggccaatgctggccttggagcttgcaagcaaattaattttccagtttagtctcttaagggttcaataatgctcttggagtaagttgggtatttttaaaggctgaagtttggactaccggaggatagagcaattgaagttcgagcaggatggagaagccactctaagtctcttcatctggacacgaattctctggaggcattagcagcagcacctctgggtcaacacagatttactggattccaaaatctagcaaggatctgagctggttaactcagagggtggagcatgatgctaacaagacggtttatcattttggacccctcacaaacacacttctctttagcagaggtgacattccttaggctaaataattggatccagggacataacagatttgttgagagaaaatgtggcagtgccttcacccgggacagtggtcaggaagccctgagcatccctgatggatttatccatcctcttctgaagtgctctgctctaggctgggtcctgttgccacctgcctgttctctggttggcttttgcaggagggcagcttacgtgtttgtcaaccagttagaaagccagttcctgtgggtcgagtttaggcctttttggccatagttgagaattttgacttgggatactgggttgttggtgacaaataatgtcttccttttcccccttcccgcctggctcggttatgggaatagccgtcagtgcatccatgtctgtgaccaacacccagccagactaatgtacacagcagggagaaataacattcaaatggtggttcacacatctcatctcaagataagattcttagggttcactgctttattcaaaagtgttttcactgtagctccttcatatggaatatcaaaactgaagaaattcacatgtggaaatgcaaatagacattgattaatcaaggtagcatctttatgtaaatatataaataagtttgggcattgaaatgtaaactgcaggtgtttatcgatgccaccagttaatgttgttaaataccatctgctctatttgctgccaccttatccatggattctgaaattagataaggtggcatcgata

SEQ ID NO: 360953 - DNA, 357 bp, Homo sapiens
gtagaggtgtcctatgtggcctgtgagtacggggccctcccctcatcttgccctcaggtcccagccctgctcctcccagacacagggctcctgggcgccttgtttcccagtggggtcgggtgggttcccacctctctaaccccgggttccacaggcaccacagagaagatattcgaggagaagcgggagctgtatgacgtctacgtggataaccagaatgtgaagacacaccacgaccacctgcagccgctgctgaagatcaacagtgctgacagggagaagtaccgccggctcaacgagcagaggtagtggcagctaaggggagaaccaggggctccaccctcctcagggcagctc

SEQ ID NO: 360954 - DNA, 1624 bp, Homo sapiens
  misc_feature (595)..(595): n is a, c, g, or t
  misc_feature (1592)..(1592): n is a, c, g, or t
  misc_feature (1622)..(1622): n is a, c, g, or t
  misc_feature (1624)..(1624): n is a, c, g, or t
gtgggcgtggtgtgctatagagtgtactgctgctgctgcttggccaacgtttcactgcctggcatcgggggcaccattcctgagtccaaacctttcttctacgtgaacgtggctgacatcgagagcctggaggtagaggtgtcctatgtggcctgcaccacagagaagatattcgaggagaagcgggagctgtatgacgtctacgtggataaccagaatgtgaagacacaccacgaccacctgcagccgctgctgaagatcaacagtgctgacagggagaagtaccgccggctcaacgagcagaggcagatgctgttgtactcccaggaagtagaagaagactacaacccttgtgaagaggacctcttcgtgctgtttttcctagaacaaaacaaccggatatttcagactttgttggaggtgtctgccagtcaagacaaaactctgacagcagagcatgcccggggcatgggcctagacccccaaggagaccggagctttctcctggacctgctggaggcctatggcattgatgtcatgctggttatcgacaacccctgttgcccgtaggaggagccaacaggactgggagccncttcacgtgggatgtcagcagcccggagttcaccccagggccccagagggcctcattttttattaagttgacacaaaggaatattgtttatactttccaacaaacataatttttgcaatttcctttctgcccttttccctagagataaggtgagatcaccttggttttgtgtcctgccatgttaggatattggaatctgccactttctcccagagctgctggtcctctgggcttggtcatgggagttgtatcactaggagtaggctgagctctggaaacattgggatggactgttcagaaagtctgtgtggtctttgtcccttgatgtatttgagaataagacaaccacctgtcccctgtggccttagatgttcatctgcctaaaggcagaaactagaccagatgatcttttaaggtttttagtagttctaggagtctatagtcttgggatcaaatcccttttcttgttcattagggcaactttatgtcttctctgtttacttgagtagggaccacaaagagggaaaaaaggatgtttctgacaccaaatatgagcttatcttatggtcagaatgaaagaggttgcttatcagtgagctgaaaactaaaattatagaatgaagcctggaaaccttcctcaaagtaacttgatggtggccatgcaatgtaatgttcctctttgtctgaaccttcctcttcttgggatgaattggtgaattgctaagggccaatgctggccttggagcttgcaagcaaattaattttccagtttagtctcttaagggttcaataatgctcttggagtaagttgggtatttttaaaggctgaagtttggactaccggaggatagagcaattgaagttcgagcaggatggagaagccactctaagtctcttcatctggacacgaattctctggaggcattagcatcatgctccaccctctgagttaaccagctcagatccttgctagattttggaatccagtaaatctganttgacccagaggtgctgctgctaatgtccnan

SEQ ID NO: 360955 - DNA, 1119 bp, Homo sapiens
gtaggtggtcccttccgcacatttcactctgtacagcaaatggtttcttcccatttgctagacagagggctagattttccccgcccactctcgactcttcaggtagttcgcccctccccgtgaccggtgggtggtttctccctcctccccgcctcgggagctggatggtctcgcctctccctccccccaccccgtgccgggtgcgcggcctgggagtcagcggcccgagcgggaagcgccgggcgagcccactgtgcggccgtcgtgggggaagcgaaggttcctgattccacctacctcctaagtgaaggcttccgtccctggagaggaggcggcgccctgtatcggccttcgtcctccgcgggagctgcggcgccaagatgagtggagaggagaacccagccagcaagcccacgccggtgcaggacgtacagggcgacgggcgctggatgtccctgcaccatcggttcgtggctgacagcaaagataaggaacccgaagtcgtcttcatcggggactccttggtccagctcatgcaccagtgcgagatctggcgcgagctcttctctcctctgcatgcacttaactttggcattggtggtgacggcacacagcatgtactgtggcggctggagaatggggagctggaacacatccggcccaagattgtggtggtctgggtgggcaccaacaaccacggacacacagcagagcaggtgactggtggcatcaaggccattgtgcaactggtgaatgagcgacagccccaggcccgggttgtggtgctgggcctgcttccgcgaggccaacatcccaacccacttcgggagaagaaccgacaggtgaacgagctggtacgggcggcactggctggccaccctcgggcccacttcctagatgccgaccctggctttgtgcactcagatggcaccatcagccatcatgacatgtatgattacctgcatctgagccgcctgggctacacacctgtttgccgggctctgcactccctgcttctgcgtctgctggcccaagaccagggccaaggtgctcccctgctggagcccgcaccctaagcatcctgctgccttcccacaacattaaactctccttcctcag

SEQ ID NO: 360956 - DNA, 1230 bp, Homo sapiens
gtaggtggtcccttccgcacatttcactctgtacagcaaatggtttcttcccatttgctagacagagggctagattttccccgcccactctcgactcttcaggtagttcgcccctccccgtgaccggtgggtggtttctccctcctccccgcctcgggagctggatggtctcgcctctccctccccccaccccgtgccgggtgcgcggcctgggagtcagcggcccgagcgggaagcgccgggcgagcccactgtgcggccgtcgtgggggaagcgaaggttcctgattccacctacctcctaagtgaaggcttccgtccctggagaggaggcggcgccctgtatcggccttcgtcctccgcgggtgtgctagcgttgggacggtcctttgttgccgcgaggggtaggagtgggcgtggcggagccagctccgttcggaacactcccgggccgacccgactcgctcatcctgcaggagctgcggcgccaagatgagtggagaggagaacccagccagcaagcccacgccggtgcaggacgtacagggcgacgggcgctggatgtccctgcaccatcggttcgtggctgacagcaaagataaggaacccgaagtcgtcttcatcggggactccttggtccagctcatgcaccagtgcgagatctggcgcgagctcttctctcctctgcatgcacttaactttggcattggtggtgacggcacacagcatgtactgtggcggctggagaatggggagctggaacacatccggcccaagattgtggtggtctgggtgggcaccaacaaccacggacacacagcagagcaggtgactggtggcatcaaggccattgtgcaactggtgaatgagcgacagccccaggcccgggttgtggtgctgggcctgcttccgcgaggccaacatcccaacccacttcgggagaagaaccgacaggtgaacgagctggtacgggcggcactggctggccaccctcgggcccacttcctagatgccgaccctggctttgtgcactcagatggcaccatcagccatcatgacatgtatgattacctgcatctgagccgcctgggctacacacctgtttgccgggctctgcactccctgcttctgcgtctgctggcccaagaccagggccaaggtgctcccctgctggagcccgcaccctaagcatcctgctgccttcccacaacattaaactctccttcctcag

SEQ ID NO: 360957 - DNA, 834 bp, Homo sapiens
gaacatgaccaggacgtttagcagggagtgagccccccacctggtcccagagaagagggagatctgagaagacactgaggagctgcggcgccaagatgagtggagaggagaacccagccagcaagcccacgccggtgcaggacgtacagggcgacgggcgctggatgtccctgcaccatcggttcgtggctgacagcaaagataaggaacccgaagtcgtcttcatcggggactccttggtccagctcatgcaccagtgcgagatctggcgcgagctcttctctcctctgcatgcacttaactttggcattggtggtgacggcacacagcatgtactgtggcggctggagaatggggagctggaacacatccggcccaagattgtggtggtctgggtgggcaccaacaaccacggacacacagcagagcaggtgactggtggcatcaaggccattgtgcaactggtgaatgagcgacagccccaggcccgggttgtggtgctgggcctgcttccgcgaggccaacatcccaacccacttcgggagaagaaccgacaggtgaacgagctggtacgggcggcactggctggccaccctcgggcccacttcctagatgccgaccctggctttgtgcactcagatggcaccatcagccatcatgacatgtatgattacctgcatctgagccgcctgggctacacacctgtttgccgggctctgcactccctgcttctgcgtctgctggcccaagaccagggccaaggtgctcccctgctggagcccgcaccctaagcatcctgctgccttcccacaacattaaactctccttcctcag

SEQ ID NO: 360958 - DNA, 1191 bp, Homo sapiens
gtaggtggtcccttccgcacatttcactctgtacagcaaatggtttcttcccatttgctagacagagggctagattttccccgcccactctcgactcttcaggtagttcgcccctccccgtgaccggtgggtggtttctccctcctccccgcctcgggagctggatggtctcgcctctccctccccccaccccgtgccgggtgcgcggcctgggagtcagcggcccgagcgggaagcgccgggcgagcccactgtgcggccgtcgtgggggaagcgaaggttcctgattccacctacctcctaagtgaaggcttccgtccctggagaggaggcggcgccctgtatcggccttcgtcctccgcgggtgtgctagcgttgggacggtcctttgttgccgcgaggggtaggagtgggcgtggcggagccagctccgttcggaacactcccgggccgacccgactcgctcatcctgcaggagctgcggcgccaagatgagtggagaggagaacccagccagcaagcccacgccggtgcaggacgtacagggcgacgggcgctggatgtccctgcaccatcggttcgtggctgacagcaaagataaggaacccgaagtcgtcttcatcggggactccttggtccagctcatgcaccagtgcgagatctggcgcgagctcttctctcctctgcatgcacttaactttggcattggtggtgacggcacacagcatgtactgtggcggctggagaatggggagctggaacacatccggcccaagattgtggtggtctgggtgggcaccaacaaccacggacacacagcagagcaggtgactggtggcatcaaggccattgtgcaactgggcctgcttccgcgaggccaacatcccaacccacttcgggagaagaaccgacaggtgaacgagctggtacgggcggcactggctggccaccctcgggcccacttcctagatgccgaccctggctttgtgcactcagatggcaccatcagccatcatgacatgtatgattacctgcatctgagccgcctgggctacacacctgtttgccgggctctgcactccctgcttctgcgtctgctggcccaagaccagggccaaggtgctcccctgctggagcccgcaccctaagcatcctgctgccttcccacaacattaaactctccttcctcag

SEQ ID NO: 360959 - DNA, 1158 bp, Homo sapiens
gtaggtggtcccttccgcacatttcactctgtacagcaaatggtttcttcccatttgctagacagagggctagattttccccgcccactctcgactcttcaggtagttcgcccctccccgtgaccggtgggtggtttctccctcctccccgcctcgggagctggatggtctcgcctctccctccccccaccccgtgccgggtgcgcggcctgggagtcagcggcccgagcgggaagcgccgggcgagcccactgtgcggccgtcgtgggggaagcgaaggttcctgattccacctacctcctaagtgaaggcttccgtccctggagaggaggcggcgccctgtatcggccttcgtcctccgcgggtgtgctagcgttgggacggtcctttgttgccgcgaggggtaggagtgggcgtggcggagccagctccgttcggaacactcccgggccgacccgactcgctcatcctgcaggagctgcggcgccaagatgagtggagaggagaacccagccagcaagcccacgccggtgcaggacgtacagggcgacgggcgctggatgtccctgcaccatcggttcgtggctgacagcaaagataaggaacccgaagtcgtcttcatcggggactccttggtccagctcatgcaccagtgcgagatctggcgcgagctcttctctcctctgcatgcacttaactttggcattggtggtgacggcacacagcatgtactgtggcggctggagaatggggagctggaacacatccggcccaagattgtggtggtctgggtgggcaccaacaaccacggacacacagcagagcagggcctgcttccgcgaggccaacatcccaacccacttcgggagaagaaccgacaggtgaacgagctggtacgggcggcactggctggccaccctcgggcccacttcctagatgccgaccctggctttgtgcactcagatggcaccatcagccatcatgacatgtatgattacctgcatctgagccgcctgggctacacacctgtttgccgggctctgcactccctgcttctgcgtctgctggcccaagaccagggccaaggtgctcccctgctggagcccgcaccctaagcatcctgctgccttcccacaacattaaactctccttcctcag

SEQ ID NO: 360960 - DNA, 818 bp, Homo sapiens
gtaggtggtcccttccgcacatttcactctgtacagcaaatggtttcttcccatttgctagacagagggctagattttccccgcccactctcgactcttcaggagctgcggcgccaagatgagtggagaggagaacccagccagcaagcccacgccggtgcaggacgtacagggcgacgggcgctggatgtccctgcaccatcggttcgtggctgacagcaaagataaggaacccgaagtcgtcttcatcggggactccttggtccagctcatgcaccagtgcgagatctggcgcgagctcttctctcctctgcatgcacttaactttggcattggtggtgacggcacacagcatgtactgtggcggctggagaatggggagctggaacacatccggcccaagattgtggtggtctgggtgggcaccaacaaccacggacacacagcagagcaggtgactggtggcatcaaggccattgtgcaactgggcctgcttccgcgaggccaacatcccaacccacttcgggagaagaaccgacaggtgaacgagctggtacgggcggcactggctggccaccctcgggcccacttcctagatgccgaccctggctttgtgcactcagatggcaccatcagccatcatgacatgtatgattacctgcatctgagccgcctgggctacacacctgtttgccgggctctgcactccctgcttctgcgtctgctggcccaagaccagggccaaggtgctcccctgctggagcccgcaccctaagcatcctgctgccttcccacaacattaaactctccttcctcag

SEQ ID NO: 360961 - DNA, 416 bp, Homo sapiens
ggtgggcgctatggccttggtgggcgctatggccttgatgccaccagtcacctgctctgctgtgtgtccgtggttgttggtgctgggcctgcttccgcgaggccaacatcccaacccacttcgggagaagaaccgacaggtgaacgagctggtacgggcggcactggctggccaccctcgggcccacttcctagatgccgaccctggctttgtgcactcagatggcaccatcagccatcatgacatgtatgattacctgcatctgagccgcctgggctacacacctgtttgccgggctctgcactccctgcttctgcgtctgctggcccaagaccagggccaaggtgctcccctgctggagcccgcaccctaagcatcctgctgccttcccacaacattaaactctccttcctcag

SEQ ID NO: 360962 - DNA, 486 bp, Homo sapiens
gtaggtggtcccttccgcacatttcactctgtacagcaaatggtttcttcccatttgctagacagagggctagattttccccgcccactctcgactcttcaggtagttcgcccctccccgtgaccggtgggtggtttctccctcctccccgcctcgggagctggatggtctcgcctctccctccccccaccccgtgccgggtgcgcggcctgggagtcagcggcccgagcgggaagcgccgggcgagcccactgtgcggccgtcgtgggggaagcgaaggttcctgattccacctacctcctaagtgaaggcttccgtccctgaaagagcagcccaagcatcaaaggataaagagttttgaagatacagttttaaactaagacattagcattatacagaggaaaagagaggatgattgagttttgggtcctttcaagatagcttttttctttgttagaaagcgaaaaaagcccttgattgtcccct

SEQ ID NO: 360963 - DNA, 166 bp, Homo sapiens
gagaggagaacccagccagcaagcccacgccggtgcaggacgtacagggcgacgggcgctggatgtccctggtgagcgttcccacctgggatattgaggagtccgggggcgcggggggtggctcaggagaacggctggttcgtgccactctcactacctgattggg

SEQ ID NO: 360964 - DNA, 762 bp, Homo sapiens
gaacatgaccaggacgtttagcagggagtgagccccccacctggtcccagagaagagggagatctgagaagacactgaggagctgcggcgccaagatgagtggagaggagaacccagccagcaagcccacgccggtgcaggacgtacagggcgacgggcgctggatgtccctgcaccatcggttcgtggctgacagcaaagataaggaacccgaagtcgtcttcatcggggactccttggtccagctcatgcaccagtgcgagatctggcgcgagctcttctctcctctgcatgcacttaactttggcattggtggtgacggcacacagcatgtactgtggcggctggagaatggggagctggaacacatccggcccaagattgtggtggtctgggtgggcaccaacaaccacggacacacagcagagcagggcctgcttccgcgaggccaacatcccaacccacttcgggagaagaaccgacaggtgaacgagctggtacgggcggcactggctggccaccctcgggcccacttcctagatgccgaccctggctttgtgcactcagatggcaccatcagccatcatgacatgtatgattacctgcatctgagccgcctgggctacacacctgtttgccgggctctgcactccctgcttctgcgtctgctggcccaagaccagggccaaggtgctcccctgctggagcccgcaccctaagcatcctgctgccttcccacaacattaaactctccttcctcag

SEQ ID NO: 360965 - DNA, 857 bp, Homo sapiens
gtaggtggtcccttccgcacatttcactctgtacagcaaatggtttcttcccatttgctagacagagggctagattttccccgcccactctcgactcttcaggagctgcggcgccaagatgagtggagaggagaacccagccagcaagcccacgccggtgcaggacgtacagggcgacgggcgctggatgtccctgcaccatcggttcgtggctgacagcaaagataaggaacccgaagtcgtcttcatcggggactccttggtccagctcatgcaccagtgcgagatctggcgcgagctcttctctcctctgcatgcacttaactttggcattggtggtgacggcacacagcatgtactgtggcggctggagaatggggagctggaacacatccggcccaagattgtggtggtctgggtgggcaccaacaaccacggacacacagcagagcaggtgactggtggcatcaaggccattgtgcaactggtgaatgagcgacagccccaggcccgggttgtggtgctgggcctgcttccgcgaggccaacatcccaacccacttcgggagaagaaccgacaggtgaacgagctggtacgggcggcactggctggccaccctcgggcccacttcctagatgccgaccctggctttgtgcactcagatggcaccatcagccatcatgacatgtatgattacctgcatctgagccgcctgggctacacacctgtttgccgggctctgcactccctgcttctgcgtctgctggcccaagaccagggccaaggtgctcccctgctggagcccgcaccctaagcatcctgctgccttcccacaacattaaactctccttcctcag

SEQ ID NO: 360966 - DNA, 1577 bp, Homo sapiens
  misc_feature (1577)..(1577): n is a, c, g, or t
gtaggtggtcccttccgcacatttcactctgtacagcaaatggtttcttcccatttgctagacagagggctagattttccccgcccactctcgactcttcaggtagttcgcccctccccgtgaccggtgggtggtttctccctcctccccgcctcgggagctggatggtctcgcctctccctccccccaccccgtgccgggtgcgcggcctgggagtcagcggcccgagcgggaagcgccgggcgagcccactgtgcggccgtcgtgggggaagcgaaggttcctgattccacctacctcctaagtgaaggcttccgtccctggagaggaggcggcgccctgtatcggccttcgtcctccgcgggtgtgctagcgttgggacggtcctttgttgccgcgaggggtaggagtgggcgtggcggagccagctccgttcggaacactcccgggccgacccgactcgctcatcctgcaggagctgcggcgccaagatgagtggagaggagaacccagccagcaagcccacgccggtgcaggacgtacagggcgacgggcgctggatgtccctgcaccatcggttcgtggctgacagcaaagataaggaacccgaagtcgtcttcatcggggactccttggtccagctcatgcaccagtgcgagatctggcgcgagctcttctctcctctgcatgcacttaactttggcattggtggtgacggcacacagcatgtactgtggcggctggagaatggggagctggaacacatccggcccaagattgtggtggtctgggtgggcaccaacaaccacggacacacagcagagcaggtgactggtggcatcaaggccattgtgcaactggtgaatgagcgacagccccaggcccgggttgtggtgctgggcctgcttccgcgaggccaacatcccaacccacttcgggagaagaaccgacaggtgaacgagctggtacgggcggcactggctggccaccctcgggcccacttcctagatgccgaccctggctttgtgcactcagatggcaccatcagccatcatgacatgtatgattacctgcatctgagccgcctgggctacacacctgtttgccgggctctgcactccctgcttctgcgtctgctggcccaagaccagggccaaggtgctcccctgctggagcccgcaccctaagcatcctgctgccttcccacaacattaaactctccttcctcagaaaaaaacaacacaacaaaataaaaaaaagaacaaaaatggagagaaaaaggggggaaaaagcgatacgacaggaatgtcaacaagatctcacaaccaatatttacaaggggaaaaaggagggacccccaacagggggagcaaacagcaacaacaggacgtactcaaacaacacagcaaacgaaaacacagagaaaacagaaaaagaggacacaaataacaaaccaacgaacgaaaaaatacatagcagcaaacaactacacagactgaacacgactacacgcaagcaagtgagcacagcccgaacacgcaagatgcagcacaagcagcagacagtacagcacgctn

SEQ ID NO: 360967 - DNA, 1080 bp, Homo sapiens
gtaggtggtcccttccgcacatttcactctgtacagcaaatggtttcttcccatttgctagacagagggctagattttccccgcccactctcgactcttcaggtagttcgcccctccccgtgaccggtgggtggtttctccctcctccccgcctcgggagctggatggtctcgcctctccctccccccaccccgtgccgggtgcgcggcctgggagtcagcggcccgagcgggaagcgccgggcgagcccactgtgcggccgtcgtgggggaagcgaaggttcctgattccacctacctcctaagtgaaggcttccgtccctggagaggaggcggcgccctgtatcggccttcgtcctccgcgggagctgcggcgccaagatgagtggagaggagaacccagccagcaagcccacgccggtgcaggacgtacagggcgacgggcgctggatgtccctgcaccatcggttcgtggctgacagcaaagataaggaacccgaagtcgtcttcatcggggactccttggtccagctcatgcaccagtgcgagatctggcgcgagctcttctctcctctgcatgcacttaactttggcattggtggtgacggcacacagcatgtactgtggcggctggagaatggggagctggaacacatccggcccaagattgtggtggtctgggtgggcaccaacaaccacggacacacagcagagcaggtgactggtggcatcaaggccattgtgcaactgggcctgcttccgcgaggccaacatcccaacccacttcgggagaagaaccgacaggtgaacgagctggtacgggcggcactggctggccaccctcgggcccacttcctagatgccgaccctggctttgtgcactcagatggcaccatcagccatcatgacatgtatgattacctgcatctgagccgcctgggctacacacctgtttgccgggctctgcactccctgcttctgcgtctgctggcccaagaccagggccaaggtgctcccctgctggagcccgcaccctaagcatcctgctgccttcccacaacattaaactctccttcctcag

SEQ ID NO: 360968 - DNA, 507 bp, Homo sapiens
gctaaatgagggctaggatgtgatatttaggaactaccctcccaccctccccacttgcccatccctagtgttttctgcagctggaaacttcatggtggtgggtggaggacaggttggcacagagaacaagatactcaaatgcttgtttccttactacgcctcgtgttcctgctcagggcctgcttccgcgaggccaacatcccaacccacttcgggagaagaaccgacaggtgaacgagctggtacgggcggcactggctggccaccctcgggcccacttcctagatgccgaccctggctttgtgcactcagatggcaccatcagccatcatgacatgtatgattacctgcatctgagccgcctgggctacacacctgtttgccgggctctgcactccctgcttctgcgtctgctggcccaagaccagggccaaggtgctcccctgctggagcccgcaccctaagcatcctgctgccttcccacaacattaaactctccttcctcag

SEQ ID NO: 360969 - DNA, 1017 bp, Homo sapiens
gtaggtggtcccttccgcacatttcactctgtacagcaaatggtttcttcccatttgctagacagagggctagattttccccgcccactctcgactcttcaggtagttcgcccctccccgtgaccggtgggtggtttctccctcctccccgcctcgggagctggatggtctcgcctctccctccccccaccccgtgccgggtgcgcggcctgggagtcagcggcccgagcgggaagcgccgggcgagcccactgtgcggccgtcgtgggggaagcgaaggttcctgattccacctacctcctaagtgaaggcttccgtccctggagaggaggcggcgccctgtatcggccttcgtcctccgcgggtgtgctagcgttgggacggtcctttgttgccgcgaggggtaggagtgggcgtggcggagccagctccgttcggaacactcccgggccgacccgactcgctcatcctgcaggagctgcggcgccaagatgagtggagaggagaacccagccagcaagcccacgccggtgcaggacgtacagggcgacgggcgctggatgtccctgcaccatcggttcgtggctgacagcaaagataaggaacccgaagtcgtcttcatcggggactccttggtccagctcatgcaccagtgcgagatctggcgcgagctcttctctcctctgcatgcacttaactttggcattggtggtgacggcacacagcatgtactgtggcggctggagaatggggagctggaacacatccggcccaaggtgagcggggcttgggtggggctctaaaacatcttttggctgccccctcaccgctgcttcatgtctctttttccacagattgtggtggtctgggtgggcaccaacaaccacggacacacagcagagcaggtgactggtggcatcaaggccattgtgcaactggtgaatgagcgacagccccaggcccgggttgtggtgctggtgaaaggctgggagagtgggaaaggaagaatggcagtgg

SEQ ID NO: 360970 - DNA, 1062 bp, Homo sapiens
gcgcggaggcggcggcggagcctcctcctgctgctgctgcgccccatccccccgcggccggccagttccagcccgcaccccgcgtcggtgcccgcgcccctccccgggccccgccatgggcctcaccgtgtccgcgctcttttcgcggatcttcgggaagaagcagatgcggattctcatggttggcttggatgcggctggcaagaccacaatcctgtacaaactgaagttgggggagattgtcaccaccatcccaaccataggcttcaatgtagaaacagtggaatataagaacatctgtttcacagtctgggacgtgggaggccaggacaagattcggcctctgtggcggcactacttccagaacactcagggcctcatctttgtggtggacagtaatgaccgggagcgggtccaagaatctgctgatgaactccagaagatgctgcaggaggacgagctgcgggatgcagtgctgctggtatttgccaacaagcaggacatgcccaacgccatgcccgtgagcgagctgactgacaagctggggctacagcacttacgcagccgcacgtggtatgtccaggccacctgtgccacccaaggcacaggtctgtacgatggtctggactggctgtcccacgagctgtcaaagcgctaaccagccaggggcaggcccctgatgcccggaagctcctgcgtgcatccccgggatgaccagactcccggactcctcaggcagtgccctttcctcccacttttcctcccccatagccacaggcctctgctcctgctcctgcctgcatgttctctctgttgttggagcctggagccttgctctctgggcacagaggggtccactctcctgcctgctgggacctatggaaggggcttcctggccaaggccccctcttccagaggaggagcagggatctgggtttccttttttttttctgttttgggtgtactctaggggccaggttgggagggggaaggtgagggcttcgggtggtgctataatgtggcactggatcttgagtaataaatttgctgtggtttgtacac

SEQ ID NO: 360971 - DNA, 2182 bp, Homo sapiens
gcgcggaggcggcggcggagcctcctcctgctgctgctgcgccccatccccccgcggccggccagttccagcccgcaccccgcgtcggtgcccgcgcccctccccgggccccgccatgggcctcaccgtgtccgcgctcttttcgcggatcttcgggaagaagcagatgcggattctcatggttggcttggatgcggctggcaagaccacaatcctgtacaaactgaagttgggggagattgtcaccaccatcccaaccataggcttcaatgtagaaacagtggaatataagaacatctgtttcacagtctgggacgtgggaggccaggacaagattcggcctctgtggcggcactacttccagaacactcagggcctcatctttgtggtggacagtaatgaccgggagcgggtccaagaatctgctgatgaactccagaagatgctgcaggaggacgagctgcgggatgcagtgctgctggtatttgccaacaagcaggacatgcccaacgccatgcccgtgagcgagctgactgacaagctggggctacagcacttacgcagccgcacgtggtatgtccaggccacctgtgccacccaaggcacaggtctgtacgatggtctggactggctgtcccacgagctgtcaaagcgctaaccagccaggggcaggcccctgatgcccggaagctcctgcgtgcatccccgggatgaccagactcccggactcctcaggcagtgccctttcctcccacttttcctcccccatagccacaggcctctgctcctgctcctgcctgcatgttctctctgttgttggagcctggagccttgctctctgggcacagaggggtccactctcctgcctgctgggacctatggaaggggcttcctggccaaggccccctcttccagaggaggagcagggatctgggtttccttttttttttctgttttgggtgtactctaggggccaggttgggagggggaaggtgagggcttcgggtggtgctataatgtggcactggatcttgagtaataaatttgctgtggtttgtacacaaaaaaaacaaaaaaaacaaaaaaaaaaaaaaaaaaaaaaaaaaaaaaaacaaaaaaaaaaaaaaataaaaatactaaaaaagacaaaaaataataataataaaataacactaaacatctataacatgtacatttacattgtattccagttctgctctctcttctcactcttcttctactctatcagccacctcccgtctactcctactcatccctactaatctatcaactaaactcaccgcctctttgatatagaacacctctctttcactctacctccctccccgcccgcccctccctcctcactactctgttatgccataactgcacccacatcatctctgtatcatgctccttcttctactaattccaactccctcctctctaaccatgtcactctcatcgtactccatcactacatcctaacatccagtaccacacaacacctccacgcttctaccctatccccccccgccctcctcgccatctccttcactatcccttacttcctctctttttacacgcttccacatacccaccacccactatctctcatccctcccagcgccctgcgcctacaccacctcaagacgagtccattcagctctccctatcctcactctgtaccttcacactacaccatacattcttatctacttcaactactcggcagcatatcccactcactccactcactgccaacgccgccactctaccatcaacctcttaccttagtcattcactctactgtgcccttacgtcactcaccactcacacgcacctcacccacctgacttcctgtacccacgacccggcgagcataacccattaccaatatcttaaccatctcatctttgtagttcttcgtgcgcttcccgctacctattagtccggaagatcatgcaccgtctctattcggttcctatccagtgatctcactcgtgctcccttaatgctagtagctttatctcagtcgatatctcatggtcactctagatctacagtttgctcagtctttcacattcacctctacctcaccactgcattctgctattgcatctgtatgatcccaactgatagactcataactaccgcatatgcattctcatcccacaccctc

SEQ ID NO: 360972 - DNA, 1273 bp, Homo sapiens
gcgcggaggcggcggcggagcctcctcctgctgctgctgcgccccatccccccgcggccggccagttccagcccgcaccccgcgtcggtgcccgcgcccctccccgggccccgccatgggcctcaccgtgtccgcgctcttttcgcggatcttcgggaagaagcagatgcggattctcatggttggcttggatgcggctggcaagaccacaatcctgtacaaactgaagttgggggagattgtcaccaccatcccaaccataggcttcaatgtagaaacagtggaatataagaacatctgtttcacagtctgggacgtgggaggccaggacaagattcggcctctgtggcggcactacttccagaacactcaggtggagtgttgggaggggactttctaaccccacgggaaaaggtgttagggctgggagaacagaattgttggcctaggctgggcccccaggccaaggaaaaaacccttccccacttctaccccttctgtttggctatcccctactcactcttcagaactcaccttagtcttccccagcttggattctcctttcttccttccttcctgcccagggcctcatctttgtggtggacagtaatgaccgggagcgggtccaagaatctgctgatgaactccagaagatgctgcaggaggacgagctgcgggatgcagtgctgctggtatttgccaacaagcaggacatgcccaacgccatgcccgtgagcgagctgactgacaagctggggctacagcacttacgcagccgcacgtggtatgtccaggccacctgtgccacccaaggcacaggtctgtacgatggtctggactggctgtcccacgagctgtcaaagcgctaaccagccaggggcaggcccctgatgcccggaagctcctgcgtgcatccccgggatgaccagactcccggactcctcaggcagtgccctttcctcccacttttcctcccccatagccacaggcctctgctcctgctcctgcctgcatgttctctctgttgttggagcctggagccttgctctctgggcacagaggggtccactctcctgcctgctgggacctatggaaggggcttcctggccaaggccccctcttccagaggaggagcagggatctgggtttccttttttttttctgttttgggtgtactctaggggccaggttgggagggggaaggtgagggcttcgggtggtgctataatgtggcactggatcttgagtaataaatttgctgtggtttgtacac

SEQ ID NO: 360973 - DNA, 883 bp, Homo sapiens
gcgcggaggcggcggcggagcctcctcctgctgctgctgcgccccatccccccgcggccggccagttccagcccgcaccccgcgtcggtgcccgcgcccctccccgggccccgccatgggcctcaccgtgtccgcgctcttttcgcggatcttcgggaagaagcagatgcggattctcatggttggcttggatgcggctggcaagaccacaatcctgtacaaactgaagttgggggagattgtcaccaccatcccaaccataggcttcaatgtagaaacagtggaatataagaacatctgtttcacagtctgggacgtgggaggccaggacaagattcggcctctgtggcggcactacttccagaacactcagggcctcatctttgtggtggacagtaatgaccgggagcgggtccaagaatctgctgatgaactccagaagatgctgcaggaggacgagctgcgggatgcagtgctgctggtatttgccaacaagcaggacatgcccaacgccatgcccgtgagcgagctgactgacaagctggggctacagcacttacgcagccgcacgtggtatgtccaggccacctgtgccacccaaggcacaggtctgtacgatggtctggactggctgtcccacgagctgtcaaagcgctaaccagccaggggcaggcccctgatgcccggaagctcctgcgtgcatccccgggatgaccagactcccggactcctcaggcagtgccctttcctcccacttttccttttttttttctgttttgggtgtactctaggggccaggttgggagggggaaggtgagggcttcgggtggtgctataatgtggcactggatcttgagtaataaatttgctgtggtttgtacac

SEQ ID NO: 360974 - DNA, 779 bp, Homo sapiens
gcgcggaggcggcggcggagcctcctcctgctgctgctgcgccccatccccccgcggccggccagttccagcccgcaccccgcgtcggtgcccgcgcccctccccgggccccgccatgggcctcaccgtgtccgcgctcttttcgcggatcttcgggaagaagcagatgcggattctcatggttggcttggatgcggctggcaagaccacaatcctgtacaaactgaagttgggggagattgtcaccaccatcccaaccataggcttcaatgtagaaacagtggaatataagaacatctgtttcacagtctgggacgtgggaggccaggacaagattcggcctctgtggcggcactacttccagaacactcagggcctcatctttgtggtggacagtaatgaccgggagcgggtccaagaatctgctgatgaactccagaagatgtcctcaggcagtgccctttcctcccacttttcctcccccatagccacaggcctctgctcctgctcctgcctgcatgttctctctgttgttggagcctggagccttgctctctgggcacagaggggtccactctcctgcctgctgggacctatggaaggggcttcctggccaaggccccctcttccagaggaggagcagggatctgggtttccttttttttttctgttttgggtgtactctaggggccaggttgggagggggaaggtgagggcttcgggtggtgctataatgtggcactggatcttgagtaataaatttgctgtggtttgtacac

SEQ ID NO: 360975 - DNA, 628 bp, Homo sapiens
gcgcggaggcggcggcggagcctcctcctgctgctgctgcgccccatccccccgcggccggccagttccagcccgcaccccgcgtcggtgcccgcgcccctccccgggccccgccatgggcctcaccgtgtccgcgctcttttcgcggatcttcgggaagaagcagatgcggattctcatggttggcttggatgcggctggcaagaccacaatcctgtacaaactgaagttgggggagattgtcaccaccatcccaaccataggcttcaatgtagaaacagtggaatataagaacatctgtttcacagtctgggacgtgggaggccaggacaagattcggcctctgtggcggcactacttccagaacactcagggcctcatctttgtggtggacagtaatgaccgggagcgggtcatcccggggatgcacgcaggagcttccgggcatcaggggcctgcccctggctggttagcgctttgacagctcgtgggacagccagtccagaccatcgtacagacctgtgccttgggtggcacaggtggcctggacataccacgtgcggctgcgtaagtgctgtagccccagcttgtcagtcagctcgctcacgggcatggcgttgggcatgtc

SEQ ID NO: 360976 - DNA, 253 bp, Homo sapiens
tgttgtggcctctccctttccctggtctctagggggctccctcgctcccatctccatccctgtgcccctttccgttgcagttggcttggatgcggctggcaagaccacaatcctgtacaaactgagtgttctggaagtagtgccgccacagaggccgaatcttgtcctggcctcccacgtcccagactgtgaaacagatgttcttatattccactgtttctacattgaagcctatggttgggatggtggtgac

SEQ ID NO: 360977 - DNA, 1533 bp, Homo sapiens
gcgcggaggcggcggcggagcctcctcctgctgctgctgcgccccatccccccgcggccggccagttccagcccgcaccccgcgtcggtgcccgcgcccctccccgggccccgccatgggcctcaccgtgtccgcgctcttttcgcggatcttcgggaagaagcagatgcggattctcatggttggcttggatgcggctggcaagaccacaatcctgtacaaactgaagttgggggagattgtcaccaccatcccaaccataggcttcaatgtagaaacagtggaatataagaacatctgtttcacagtctgggacgtgggaggccaggacaagattcggcctctgtggcggcactacttccagaacactcaggtggagtgttgggaggggactttctaaccccacgggaaaaggtgttagggctgggagaacagaattgttggcctaggctgggcccccaggccaaggaaaaaacccttccccacttctaccccttctgtttggctatcccctactcactcttcagaactcaccttagtcttccccagcttggacttctctttagaagcaggattctgggaccaggctgcctgatttagccctcataacatgtctttatttccttgcacatctttggataaactacttcctctttgcagtggggtctctagtttgtgccatgactcctgtagagcttctatagagttctgtaaacttctgtagagtttactagatgagaaggattgacacaattacaaatgggaagaaaacagaaagggccacactacggtatgtcccaggcagaagtgattgcttctcctttcttccttccttcctgcccagggcctcatctttgtggtggacagtaatgaccgggagcgggtccaagaatctgctgatgaactccagaagatgctgcaggaggacgagctgcgggatgcagtgctgctggtatttgccaacaagcaggacatgcccaacgccatgcccgtgagcgagctgactgacaagctggggctacagcacttacgcagccgcacgtggtatgtccaggccacctgtgccacccaaggcacaggtctgtacgatggtctggactggctgtcccacgagctgtcaaagcgctaaccagccaggggcaggcccctgatgcccggaagctcctgcgtgcatccccgggatgaccagactcccggactcctcaggcagtgccctttcctcccacttttcctcccccatagccacaggcctctgctcctgctcctgcctgcatgttctctctgttgttggagcctggagccttgctctctgggcacagaggggtccactctcctgcctgctgggacctatggaaggggcttcctggccaaggccccctcttccagaggaggagcagggatctgggtttccttttttttttctgttttgggtgtactctaggggccaggttgggagggggaaggtgagggcttcgggtggtgctataatgtggcactggatcttgagtaataaatttgctgtggtttgtacac

SEQ ID NO: 360978 - DNA, 1431 bp, Homo sapiens
tgttgtggcctctccctttccctggtctctagggggctccctcgctcccatctccatccctgtgcccctttccgttgcagttggcttggatgcggctggcaagaccacaatcctgtacaaactgaagttgggggagattgtcaccaccatcccaaccataggcttcaatgtagaaacagtggaatataagaacatctgtttcacagtctgggacgtgggaggccaggacaagattcggcctctgtggcggcactacttccagaacactcaggtggagtgttgggaggggactttctaaccccacgggaaaaggtgttagggctgggagaacagaattgttggcctaggctgggcccccaggccaaggaaaaaacccttccccacttctaccccttctgtttggctatcccctactcactcttcagaactcaccttagtcttccccagcttggacttctctttagaagcaggattctgggaccaggctgcctgatttagccctcataacatgtctttatttccttgcacatctttggataaactacttcctctttgcagtggggtctctagtttgtgccatgactcctgtagagcttctatagagttctgtaaacttctgtagagtttactagatgagaaggattgacacaattacaaatgggaagaaaacagaaagggccacactacggtatgtcccaggcagaagtgattgcttctcctttcttccttccttcctgcccagggcctcatctttgtggtggacagtaatgaccgggagcgggtccaagaatctgctgatgaactccagaagatgctgcaggaggacgagctgcgggatgcagtgctgctggtatttgccaacaagcaggacatgcccaacgccatgcccgtgagcgagctgactgacaagctggggctacagcacttacgcagccgcacgtggtatgtccaggccacctgtgccacccaaggcacaggtctgtacgatggtctggactggctgtcccacgagctgtcaaagcgctaaccagccaggggcaggcccctgatgcccggaagctcctgcgtgcatccccgggatgaccagactcccggactcctcaggcagtgccctttcctcccacttttcctcccccatagccacaggcctctgctcctgctcctgcctgcatgttctctctgttgttggagcctggagccttgctctctgggcacagaggggtccactctcctgcctgctgggacctatggaaggggcttcctggccaaggccccctcttccagaggaggagcagggatctgggtttccttttttttttctgttttgggtgtactctaggggccaggttgggagggggaaggtgagggcttcgggtggtgctataatgtggcactggatcttgagtaataaatttgctgtggtttgtacac

SEQ ID NO: 360979 - DNA, 1069 bp, Homo sapiens
gcgcggaggcggcggcggagcctcctcctgctgctgctgcgccccatccccccgcggccggccagttccagcccgcaccccgcgtcggtgcccgcgcccctccccgggccccgccatgggcctcaccgtgtccgcgctcttttcgcggatcttcgggaagaagcagatgcggattctcatggttggcttggatgcggctggcaagaccacaatcctgtacaaactgaagttgggggagattgtcaccaccatcccaaccataggcttcaatgtagaaacagtggaatataagaacatctgtttcacagtctgggacgtgggaggccaggacaagattcggcctctgtggcggcactacttccagaacactcaggtggagtgttgggaggggactttctaaccccacgggaaaaggtgttagggctgggagaacagaattgttggcctaggctgggcccccaggccaaggaaaaaacccttccccacttctaccccttctgtttggctatcccctactcactcttcagaactcaccttagtcttccccagcttggacttctctttagaagcaggattctgggaccaggctgcctgatttagccctcataacatgtctttatttccttgcacatctttggataaactacttcctctttgcagtggggtctctagtttgtgccatgactcctgtagagcttctatagagttctgtaaacttctgtagagtttactagatgagaaggattgacacaattacaaatgggaagaaaacagaaagggccacactacggtatgtcccaggcagaagtgattgcttctcctttcttccttccttcctgcccagggcctcatctttgtggtggacagtaatgaccgggagcgggtccaagaatctgctgatgaactccagaagatgctgcaggaggacgagctgcgggatgcagtgctgctggtatttgccaacaagcaggacatgcccaacgccatgcccgtgagcgagctgactgacaagctggggctacagcacttacgcagccgcacggtaggggtcctgcccacctggtgctga

SEQ ID NO: 360980 - DNA, 402 bp, Homo sapiens
gcgcggaggcggcggcggagcctcctcctgctgctgctgcgccccatccccccgcggccggccagttccagcccgcaccccgcgtcggtgcccgcgcccctccccgggccccgccatgggcctcaccgtgtccgcgctcttttcgcggatcttcgggaagaagcagatgcggattctcatgggtgaggcagatcgagcgcgcggcccggaccggggcgccggccccggcgcagcccttccgcccccgcgtccctccagccccgctcacctgggtctctggccccgagtcacccacctcataacgccccggggcctctgctctcgggcgggtcccggtctgcatcgccgaccccggggcctgacacccggagctgcgggcctgggtggggtgaagctccctcc

SEQ ID NO: 360981 - DNA, 275 bp, Homo sapiens
tgggtgggaagagagtaggcccactggcaggcagtaaccacagaactacatgtatctgggccagttttattccagacatgtggatcttctggtctgcagccttgacaaacttcagagttcccttgtctccttgtacagatgtgtgtaccttttgatcatgaaggcactattaatgtccttcagagtttgtgtcaatttgcaactttgaaggatatccaaattatcaaataatttacatatgatgattattaaattgaagtttctaatttattctt

SEQ ID NO: 360982 - DNA, 400 bp, Homo sapiens
gagctggcaggtgaggaggtggagaggagtgcttcacccagaggagttagagtaaaggtcagaacctcgaggtgagcaacagcaccgggaactgctgggtgcaagcaaaaggtggcaagttgcaggagaagatggtggagaagtcagtgggggctgcatcatggagagctgtgagtgcgtctcctttcagttttgtaggcatttaacaactgcacagagttgtgcaaacacagaactgagtgtgtccccctcacatgaggcctcaggaaaggcattctagaagagaggatgacacatggtttctcctctctaaggttgcagactcagaagtctgataccagtcagttaacgtagatgtgtgagtgggagagtggggtcccaaatattgcatgcttatact

SEQ ID NO: 360983 - DNA, 401 bp, Homo sapiens
cattcgtctattggacgtttgagttatttctactttctaattttgaataatgctgtgaacattcatgtacaatttttcgtgtgaacatgttttcagttctcttcaatatgtacctaaaggccaggcgtggtggctcatgcccgtaatcccagcacgttgggaggccgaggtgggcagatcacctgaggtcaggagttcaagaccagcctggccaacatggcgaaaccctgtctctaataaaaatacaaaaattagccgggtgtggtagcgtgcgtgcctgtaatcccagctacttgggaggctgagacaggagaatggcttgaacctgggaggtggagattgcagtgagccaagattgcaccactgcactccagcctgggtgacagagggagactctgtct

SEQ ID NO: 360984 - DNA, 258 bp, Homo sapiens
tctgttcctctgtgggccagactgccatcccaaatacacatggccagaggccaggcctctcagtccctctcaggtccaagtacagagcctccctatgactcataggatgcagctgtctgaaaccaacaggaccctctttctatttggtgtcacaaagtatactgcaggaccctatgaatgtgaaatatggaactcagggagtgccagccgcagtgacccagtcaccctgaatctcctccgtgagtatcttctgttcct

SEQ ID NO: 360985 - DNA, 1963 bp, Homo sapiens
ttttttgcaggaggaaggacagcacagctgacagccgtgctctggaagcttctggatcctaggctcatctccacagaggagaacatgcacgcagcagagatcatggggcccctctcagcccctccctgcacagagcacatcaaatggaaggggctcctgctcacagcattacttttaaacttctggaacttgcctaccactgcccaagtcatgattgaagcccagccacccaaagtgtccgaggggaaggatgttcttctacttgtccacaatttgccccagaatcttactggctacatctggtacaaagggcaaatcagggacctctaccattacattacatcatacatagtagacggtcaaataattatatatggaccggcatacagtggacgagaaacagtatattccaatgcatccctgctgatccagaatgtcacccgggaggacgcaggatcctacaccttacacatcataaagcgaggtgatgggactagaggagtaactggatatttcaccttcaccttatacctggagactcccaagccctccatctccagcagcaacttaaaccccagggaggccatggagactgtgatcttaacctgtaatcctgagactccggacgcaagctacctgtggtggatgaatggtcagagcctccctatgactcataggatgcagctgtctgaaaccaacaggaccctctttctatttggtgtcacaaagtatactgcaggaccctatgaatgtgaaatatggaactcagggagtgccagccgcagtgacccagtcaccctgaatctcctccatggtccagacctccccagaattttcccttcagtcacctcttactattcaggagagaacctcgacttgtcctgcttcgcaaactctaacccaccagcacagtattcttggacaattaatgggaagtttcagctatcaggacaaaagctctttatccctcaaattactccaaagcataatgggctctatgcttgctctgctcgtaactcagccactggcgaggaaagctccacatccttgacaatcagagtcattgctcctccaggattaggaacttttgctttcaataatccaacgtagcagccgtgatgtcatttttgtatttcaggaagactggcagaaagttgctttgattcttcctcaaagtatttaaaatcagctacagtccaaaattgctttttcttcaaggagatttatggaaaagactatgaaaaggactcttgaatacaagttcctgataacttcaagatcataccactggactaagaactttcaaaattttaatgaacaggctgataccttcatgaaattcaagacaaagaagaaaagaactccatttcattggactaaataacaaaaggataatgttttcataattttttattggaaaatgtgctgattttttgaatgttttattctccagatttatgaatttttttcttcagcaattggtaaagtatacttttgtaaacaaaaattgaaacatttgcttttgctctctgagtgccccagaattgggaatctattcatgaatattcatatgtttatggtaataaagttatttgcacaagtttaaaaaagcaaacaacacggaacaccaccacaaacaacattgtggggcgacctttgcgagacaccgacaggagaaggtttctctaaacacattggctttggggcgcgcgggcccccaaagggcaacagggacacctgtcgtaccaaagcgcgggttcccaagagagaaaacggggcacaggagaacaaggaggggggagaatatcctcagcacgaattaaaaaaaaaaggccggcgggcgggacaaccgaagccgttgttgaaacaaatcaccacaaaggggcgatccgggagaggagcaaagagggggatgcaaccacagagggaggtcaccaggaaacacccaatataaatatagccc

SEQ ID NO: 360986 - DNA, 1529 bp, Homo sapiens
ttttttgcaggaggaaggacagcacagctgacagccgtgctctggaagcttctggatcctaggctcatctccacagaggagaacatgcacgcagcagagatcatggggcccctctcagcccctccctgcacagagcacatcaaatggaaggggctcctgctcacagtggagactcccaagccctccatctccagcagcaacttaaaccccagggaggccatggagactgtgatcttaacctgtaatcctgagactccggacgcaagctacctgtggtggatgaatggtcagagcctccctatgactcataggatgcagctgtctgaaaccaacaggaccctctttctatttggtgtcacaaagtatactgcaggaccctatgaatgtgaaatatggaactcagggagtgccagccgcagtgacccagtcaccctgaatctcctccatggtccagacctccccagaattttcccttcagtcacctcttactattcaggagagaacctcgacttgtcctgcttcgcaaactctaacccaccagcacagtattcttggacaattaatgggaagtttcagctatcaggacaaaagctctttatccctcaaattactccaaagcataatgggctctatgcttgctctgctcgtaactcagccactggcgaggaaagctccacatccttgacaatcagagtcattgctcctccaggattaggaacttttgctttcaataatccaacgtagcagccgtgatgtcatttttgtatttcaggaagactggcaggagatttatggaaaagactatgaaaaggactcttgaatacaagttcctgataacttcaagatcataccactggactaagaactttcaaaattttaatgaacaggctgataccttcatgaaattcaagacaaagaagaaaagaactccatttcattggactaaataacaaaaggataatgttttcataattttttattggaaaatgtgctgattttttgaatgttttattctccagatttatgaatttttttcttcagcaattggtaaagtatacttttgtaaacaaaaattgaaacatttgcttttgctctctgagtgccccagaattgggaatctattcatgaatattcatatgtttatggtaataaagttatttgcacaagtttaaaaaagcaaacaacacggaacaccaccacaaacaacattgtggggcgacctttgcgagacaccgacaggagaaggtttctctaaacacattggctttggggcgcgcgggcccccaaagggcaacagggacacctgtcgtaccaaagcgcgggttcccaagagagaaaacggggcacaggagaacaaggaggggggagaatatcctcagcacgaattaaaaaaaaaaggccggcgggcgggacaaccgaagccgttgttgaaacaaatcaccacaaaggggcgatccgggagaggagcaaagagggggatgcaaccacagagggaggtcaccaggaaacacccaatataaatatagccc

SEQ ID NO: 360987 - DNA, 1879 bp, Homo sapiens
ttttttgcaggaggaaggacagcacagctgacagccgtgctctggaagcttctggatcctaggctcatctccacagaggagaacatgcacgcagcagagatcatggggcccctctcagcccctccctgcacagagcacatcaaatggaaggggctcctgctcacagcattacttttaaacttctggaacttgcctaccactgcccaagtcatgattgaagcccagccacccaaagtgtccgaggggaaggatgttcttctacttgtccacaatttgccccagaatcttactggctacatctggtacaaagggcaaatcagggacctctaccattacattacatcatacatagtagacggtcaaataattatatatggaccggcatacagtggacgagaaacagtatattccaatgcatccctgctgatccagaatgtcacccgggaggacgcaggatcctacaccttacacatcataaagcgaggtgatgggactagaggagtaactggatatttcaccttcaccttatacctggagactcccaagccctccatctccagcagcaacttaaaccccagggaggccatggagactgtgatcttaacctgtaatcctgagactccggacgcaagctacctgtggtggatgaatggtcagagcctccctatgactcataggatgcagctgtctgaaaccaacaggaccctctttctatttggtgtcacaaagtatactgcaggaccctatgaatgtgaaatatggaactcagggagtgccagccgcagtgacccagtcaccctgaatctcctccatggtccagacctccccagaattttcccttcagtcacctcttactattcaggagagaacctcgacttgtcctgcttcgcaaactctaacccaccagcacagtattcttggacaattaatgggaagtttcagctatcaggacaaaagctctttatccctcaaattactccaaagcataatgggctctatgcttgctctgctcgtaactcagccactggcgaggaaagctccacatccttgacaatcagagtcattgaaagttgctttgattcttcctcaaagtatttaaaatcagctacagtccaaaattgctttttcttcaaggagatttatggaaaagactatgaaaaggactcttgaatacaagttcctgataacttcaagatcataccactggactaagaactttcaaaattttaatgaacaggctgataccttcatgaaattcaagacaaagaagaaaagaactccatttcattggactaaataacaaaaggataatgttttcataattttttattggaaaatgtgctgattttttgaatgttttattctccagatttatgaatttttttcttcagcaattggtaaagtatacttttgtaaacaaaaattgaaacatttgcttttgctctctgagtgccccagaattgggaatctattcatgaatattcatatgtttatggtaataaagttatttgcacaagtttaaaaaagcaaacaacacggaacaccaccacaaacaacattgtggggcgacctttgcgagacaccgacaggagaaggtttctctaaacacattggctttggggcgcgcgggcccccaaagggcaacagggacacctgtcgtaccaaagcgcgggttcccaagagagaaaacggggcacaggagaacaaggaggggggagaatatcctcagcacgaattaaaaaaaaaaggccggcgggcgggacaaccgaagccgttgttgaaacaaatcaccacaaaggggcgatccgggagaggagcaaagagggggatgcaaccacagagggaggtcaccaggaaacacccaatataaatatagccc

SEQ ID NO: 360988 - DNA, 1501 bp, Homo sapiens
atgtggggcaggcatgaaggtagtacaggagaacccacagaccactatgcagagctgattcctgtgaaaaagaaagagaaagaagttttaggtaccaatgcaattctaagagtttttgcaaggctgatgaggaatcctccaacaagtcacccattagcgttaaagagagcctcagagaactaggcttgctttcacacccttcctgggagcctgtaggaaagaagctttctgtgcaaaggaggtggtgaatttgaaatgcactgacctgggccttctgtcaatcaggtccctgccatggagatctgacagagtgtcattcatgactgccacaacagagacactgaggaaaagatgcaaccatgaaaaggtgcaaaggtgacaagttccaatgacatagaaaatagcaatcagcctttctcacgtctgaaagccttccaaaatacctgagtagcagtagagaattgacagaggactgatcaccaactgagaaacatggtgagagggaaaaaaaactgcaagaatataatcatctcccatcaattttccaacagaaataatgtagtccttgaagaaacaattatacagtatctcatgttacatgcttgttcctgacgctcccccatgtaaaataacatcaccttcattccttcttttcttttctttccatgacagctcctccaggattaggaacttttgctttcaataatccaacgtagcagccgtgatgtcatttttgtatttcaggaagactggcaggagatttatggaaaagactatgaaaaggactcttgaatacaagttcctgataacttcaagatcataccactggactaagaactttcaaaattttaatgaacaggctgataccttcatgaaattcaagacaaagaagaaaagaactccatttcattggactaaataacaaaaggataatgttttcataattttttattggaaaatgtgctgattttttgaatgttttattctccagatttatgaatttttttcttcagcaattggtaaagtatacttttgtaaacaaaaattgaaacatttgcttttgctctctgagtgccccagaattgggaatctattcatgaatattcatatgtttatggtaataaagttatttgcacaagtttaaaaaagcaaacaacacggaacaccaccacaaacaacattgtggggcgacctttgcgagacaccgacaggagaaggtttctctaaacacattggctttggggcgcgcgggcccccaaagggcaacagggacacctgtcgtaccaaagcgcgggttcccaagagagaaaacggggcacaggagaacaaggaggggggagaatatcctcagcacgaattaaaaaaaaaaggccggcgggcgggacaaccgaagccgttgttgaaacaaatcaccacaaaggggcgatccgggagaggagcaaagagggggatgcaaccacagagggaggtcaccaggaaacacccaatataaatatagccc

SEQ ID NO: 360989 - DNA, 1316 bp, Homo sapiens
  misc_feature (368)..(368): n is a, c, g, or t
tgatgtggtggatgctggctcgggaagttctgcgcatgcgtggcaccatttcccgtgaacacccatgggaggtcatgcctgatctgtacttctacagagatcctgaagagattgaaaaagaagagcaggctgctgctgagaaggcagtgaccaaggaggaatttcagggtgaatggactgctcccgctcctgagttcactgctactcagcctgaggttgcagactggtctgaaggtgtacaggtgccctctgtgcctattcagctattccctactgaagactggagcgctcagcctgccacggaagactggtctgcagctcccactgctcaggccactggatgagggcatgcctcatccagtggcatnccctcaccagtggcgaggaaagctccacatcgttgacagtcaaagtctctgcttctacaagaataggacttcttcctctccttaatccaacatagcagctgtgatgtcatttctgtatttcaggaagactggcagaaagttgctttgattcttcctcaaagtatttaaaatcagctacagtccaaaattgctttttcttcaaggagatttatggaaaagactatgaaaaggactcttgaatacaagttcctgataacttcaagatcataccactggactaagaactttcaaaattttaatgaacaggctgataccttcatgaaattcaagacaaagaagaaaagaactccatttcattggactaaataacaaaaggataatgttttcataattttttattggaaaatgtgctgattttttgaatgttttattctccagatttatgaatttttttcttcagcaattggtaaagtatacttttgtaaacaaaaattgaaacatttgcttttgctctctgagtgccccagaattgggaatctattcatgaatattcatatgtttatggtaataaagttatttgcacaagtttaaaaaagcaaacaacacggaacaccaccacaaacaacattgtggggcgacctttgcgagacaccgacaggagaaggtttctctaaacacattggctttggggcgcgcgggcccccaaagggcaacagggacacctgtcgtaccaaagcgcgggttcccaagagagaaaacggggcacaggagaacaaggaggggggagaatatcctcagcacgaattaaaaaaaaaaggccggcgggcgggacaaccgaagccgttgttgaaacaaatcaccacaaaggggcgatccgggagaggagcaaagagggggatgcaaccacagagggaggtcaccaggaaacacccaatataaatatagccc

SEQ ID NO: 360990 - DNA, 1237 bp, Homo sapiens
ttttttgcaggaggaaggacagcacagctgacagccgtgctctggaagcttctggatcctaggctcatctccacagaggagaacatgcacgcagcagagatcatggggcccctctcagcccctccctgcacagagcacatcaaatggaaggggctcctgctcacagcattacttttaaacttctggaacttgcctaccactgcccaagtcatgattgaagcccagccacccaaagtgtccgaggggaaggatgttcttctacttgtccacaatttgccccagaatcttactggctacatctggtacaaagggcaaatcagggacctctaccattacattacatcatacatagtagacggtcaaataattatatatggaccggcatacagtggacgagaaacagtatattccaatgcatccctgctgatccagaatgtcacccgggaggacgcaggatcctacaccttacacatcataaagcgaggtgatgggactagaggagtaactggatatttcaccttcaccttatacctggagactcccaagccctccatctccagcagcaacttaaaccccagggaggccatggagactgtgatcttaacctgtaatcctgagactccggacgcaagctacctgtggtggatgaatggtcagagcctccctatgactcataggatgcagctgtctgaaaccaacaggaccctctttctatttggtgtcacaaagtatactgcaggaccctatgaatgtgaaatatggaactcagggagtgccagccgcagtgacccagtcaccctgaatctcctccatggtccagacctccccagaattttcccttcagtcacctcttactattcaggagagaacctcgacttgtcctgcttcgcaaactctaacccaccagcacagtattcttggacaattaatgggaagtttcagctatcaggacaaaagctctttatccctcaaattactccaaagcataatgggctctatgcttgctctgctcgtaactcagccactggcgaggaaagctccacatccttgacaatcagagtcattgctcctccaggattaggaacttttgctttcaataatccaacgtagcagccgtgatgtcatttttgtatttcaggaagactggcagaaagttgctttgattcttcctcaaagtcgtctaggatcatctacgtcacgacattgcgagataatgacgaataataacgataaggac

SEQ ID NO: 360991 - DNA, 706 bp, Homo sapiens
tctcagcccctccctgcacagagcacatcaaatggaaggggctcctggtcacagaatgtcacccgggaggacgcaggatcctacaccttacacatcataaagcgaggtgatgggactagaggagtaactggatatttcaccttcaccttatacctggagactcccaagccctccatctccagcagcaacttaaaccccagggaggccatggaaactgtgatcttaacctgtgatcctgagactccggacacaagctaccagtggtggatgaatggtcagagcctccctatgactcataggtttcagctgtccgaaaccaacaggaccctctttctatttggtgtcacaaagtatactgcaggaccctatgaatgtgaaatacggaactcagggagtgccagccgcagtgacccagtcaccctgaatctcctccatggtccagacctccccagaattcacccttcatacaccaattaccgttcaggagataacctctacttgtcctgcttcgcgaactctaacccaccggcacagtattcttggacaattaatgggaagtttcagcaatcaggacaaaatctgtttatcccccaaattactacaaagcatagcgggctctatgtttgctctgttcgtaactcagccacctaggacactggcgaggctaggacacctggcgaggctaggacactggcgaggctaggac

SEQ ID NO: 360992 - DNA, 272 bp, Homo sapiens
gaggaaggacagcacagctgacagccgtgctctggaagcttctggatcctaggctcatctccacagaggagaacatgcacgcagcagagatcatggggcccctctcagcccctccctgcacagagcacatcaaatggaaggggctcctgctcacaggtgaggagagaacttcctgggagaggacaggaggaggaagcagagtgactggatggggtctcctggagaggctcctggggttctaaaaaataaaaaagccagcatttagggaggct

SEQ ID NO: 360993 - DNA, 1752 bp, Homo sapiens
ttttttgcaggaggaaggacagcacagctgacagccgtgctctggaagcttctggatcctaggctcatctccacagaggagaacatgcacgcagcagagatcatggggcccctctcagcccctccctgcacagagcacatcaaatggaaggggctcctgctcacagcattacttttaaacttctggaacttgcctaccactgcccaagtcatgattgaagcccagccacccaaagtgtccgaggggaaggatgttcttctacttgtccacaatttgccccagaatcttactggctacatctggtacaaagggcaaatcagggacctctaccattacattacatcatacatagtagacggtcaaataattatatatggaccggcatacagtggacgagaaacagtatattccaatgcatccctgctgatccagaatgtcacccgggaggacgcaggatcctacaccttacacatcataaagcgaggtgatgggactagaggagtaactggatatttcaccttcaccttatacctggagactcccaagccctccatctccagcagcaacttaaaccccagggaggccatggagactgtgatcttaacctgtaatcctgagactccggacgcaagctacctgtggtggatgaatggtcagagcctccctatgactcataggatgcagctgtctgaaaccaacaggaccctctttctatttggtgtcacaaagtatactgcaggaccctatgaatgtgaaatatggaactcagggagtgccagccgcagtgacccagtcaccctgaatctcctccatggtccagacctccccagaattttcccttcagtcacctcttactattcaggagagaacctcgacttgtcctgcttcgcaaactctaacccaccagcacagtattcttggacaattaatgggaagtttcagctatcaggacaaaagctctttatccctcaaattactccaaagcataatgggctctatgcttgctctgctcgtaactcagccactggcgaggaaagctccacatccttgacaatcagagtcattgctcctccaggattaggaacttttgctttcaataatccaacgtagcagccgtgatgtcatttttgtatttcaggaagactggcagaaagttgctttgattcttcctcaaagtatttaaaatcagctacagtccaaaattgctttttcttcaaggagatttatggaaaagactatgaaaaggactcttgaatacaagttcctgataacttcaagatcataccactggactaagaactttcaaaattttaatgaacaggctgataccttcatgaaattcaagacaaagaagaaaagaactccatttcattggactaaataacaaaaggataatgttttcataattttttattggaaaatgtgctgattttttgaatgttttattctccagatttatgaatttttttcttcagcaattggtaaagtatacttttgtaaacaaaaattgaaacatttgcttttgctctctgagtgccccagaattgggaatctattcatgaatattcatatgtttatggtaataaagttatttgcacaagtttaagacaaaggcacaaaaacgaaaagccagacagcacgacgggaccagcttgtgcgcagcgccgctgtgcgcgccgcggaagcggcgttttcgcagaaagacacccgacgagagggcgcgcggccgccgcgcaagagtctctggacaaa

SEQ ID NO: 360994 - DNA, 2350 bp, Homo sapiens
ttttttgcaggaggaaggacagcacagctgacagccgtgctctggaagcttctggatcctaggctcatctccacagaggagaacatgcacgcagcagagatcatggggcccctctcagcccctccctgcacagagcacatcaaatggaaggggctcctgctcacagcattacttttaaacttctggaacttgcctaccactgcccaagtcatgattgaagcccagccacccaaagtgtccgaggggaaggatgttcttctacttgtccacaatttgccccagaatcttactggctacatctggtacaaagggcaaatcagggacctctaccattacattacatcatacatagtagacggtcaaataattatatatggaccggcatacagtggacgagaaacagtatattccaatgcatccctgctgatccagaatgtcacccgggaggacgcaggatcctacaccttacacatcataaagcgaggtgatgggactagaggagtaactggatatttcaccttcaccttatacctggagactcccaagccctccatctccagcagcaacttaaaccccagggaggccatggagactgtgatcttaacctgtaatcctgagactccggacgcaagctacctgtggtggatgaatggtcagagcctccctatgactcataggatgcagctgtctgaaaccaacaggaccctctttctatttggtgtcacaaagtatactgcaggaccctatgaatgtgaaatatggaactcagggagtgccagccgcagtgacccagtcaccctgaatctcctccatggtccagacctccccagaattttcccttcagtcacctcttactattcaggagagaacctcgacttgtcctgcttcgcaaactctaacccaccagcacagtattcttggacaattaatgggaagtttcagctatcaggacaaaagctctttatccctcaaattactccaaagcataatgggctctatgcttgctctgctcgtaactcagccactggcgaggaaagctccacatccttgacaatcagagtcattggtccctgccatggagatctgacagagtgtcattcatgactgccacaacagagacactgaggaaaagatgcaaccatgaaaaggtgcaaaggtgacaagttccaatgacatagaaaatagcaatcagcctttctcacgtctgaaagccttccaaaatacctgagtagcagtagagaattgacagaggactgatcaccaactgagaaacatggtgagagggaaaaaaaactgcaagaatataatcatctcccatcaattttccaacagaaataatgtagtccttgaagaaacaattatacagtatctcatgttacatgcttgttcctgacgctcccccatgtaaaataacatcaccttcattccttcttttcttttctttccatgacagctcctccaggattaggaacttttgctttcaataatccaacgtagcagccgtgatgtcatttttgtatttcaggaagactggcagaaagttgctttgattcttcctcaaagtatttaaaatcagctacagtccaaaattgctttttcttcaaggagatttatggaaaagactatgaaaaggactcttgaatacaagttcctgataacttcaagatcataccactggactaagaactttcaaaattttaatgaacaggctgataccttcatgaaattcaagacaaagaagaaaagaactccatttcattggactaaataacaaaaggataatgttttcataattttttattggaaaatgtgctgattttttgaatgttttattctccagatttatgaatttttttcttcagcaattggtaaagtatacttttgtaaacaaaaattgaaacatttgcttttgctctctgagtgccccagaattgggaatctattcatgaatattcatatgtttatggtaataaagttatttgcacaagtttaaaaaagcaaacaacacggaacaccaccacaaacaacattgtggggcgacctttgcgagacaccgacaggagaaggtttctctaaacacattggctttggggcgcgcgggcccccaaagggcaacagggacacctgtcgtaccaaagcgcgggttcccaagagagaaaacggggcacaggagaacaaggaggggggagaatatcctcagcacgaattaaaaaaaaaaggccggcgggcgggacaaccgaagccgttgttgaaacaaatcaccacaaaggggcgatccgggagaggagcaaagagggggatgcaaccacagagggaggtcaccaggaaacacccaatataaatatagccc

SEQ ID NO: 360995 - DNA, 2279 bp, Homo sapiens
ttttttgcaggaggaaggacagcacagctgacagccgtgctctggaagcttctggatcctaggctcatctccacagaggagaacatgcacgcagcagagatcatggggcccctctcagcccctccctgcacagagcacatcaaatggaaggggctcctgctcacagcattacttttaaacttctggaacttgcctaccactgcccaagtcatgattgaagcccagccacccaaagtgtccgaggggaaggatgttcttctacttgtccacaatttgccccagaatcttactggctacatctggtacaaagggcaaatcagggacctctaccattacattacatcatacatagtagacggtcaaataattatatatggaccggcatacagtggacgagaaacagtatattccaatgcatccctgctgatccagaatgtcacccgggaggacgcaggatcctacaccttacacatcataaagcgaggtgatgggactagaggagtaactggatatttcaccttcaccttatacctggagactcccaagccctccatctccagcagcaacttaaaccccagggaggccatggagactgtgatcttaacctgtaatcctgagactccggacgcaagctacctgtggtggatgaatggtcagagcctccctatgactcataggatgcagctgtctgaaaccaacaggaccctctttctatttggtgtcacaaagtatactgcaggaccctatgaatgtgaaatatggaactcagggagtgccagccgcagtgacccagtcaccctgaatctcctccatggtccagacctccccagaattttcccttcagtcacctcttactattcaggagagaacctcgacttgtcctgcttcgcaaactctaacccaccagcacagtattcttggacaattaatgggaagtttcagctatcaggacaaaagctctttatccctcaaattactccaaagcataatgggctctatgcttgctctgctcgtaactcagccactggcgaggaaagctccacatccttgacaatcagagtcattggtccctgccatggagatctgacagagtgtcattcatgactgccacaacagagacactgaggaaaagatgcaaccatgaaaaggtgcaaaggtgacaagttccaatgacatagaaaatagcaatcagcctttctcacgtctgaaagccttccaaaatacctgagtagcagtagagaattgacagaggactgatcaccaactgagaaacatggtgagagggaaaaaaaactgcaagaatataatcatctcccatcaattttccaacagaaataatgtagtccttgaagaaacaattatacagtatctcatgttacatgcttgttcctgacgctcccccatgtaaaataacatcaccttcattccttcttttcttttctttccatgacagctcctccaggattaggaacttttgctttcaataatccaacgtagcagccgtgatgtcatttttgtatttcaggaagactggcaggtatgatgaccttttctcttatcctggttcctgcagggctgactgccatgcttgggagagggaaatgacttatttgcctgtatctgggcctggatctcctccttcatccactaactcctgcttctcagcactaattcctgcagttccctttctccctggcctttatgctccctgtaccccactgtcttttagacataattatctccagcctctgctcatttgtttctcagattcaaatgagaaacacaatttcacatggtgaaaccctcttcattatttttaacatctctcaatagtgtaattctctccattcccataaagctcaaccacttctcaaagtattgcttgacttcttgtctccagactttgaaatcttccttgcatatgattgcctcattacctttctaaaatctggttaattgatttaatcaagaatctgcaggggtctactctagcctatttgataagttcacatttcttctatttactaaggcttctcacttcctttacctctacttcctagtataaatcctccatcctaattagaactgtcttcctacacatccctgccccttcacccatatagacataaaattcttagttccaatgctatgtctaaaaacagagtgaaatcccttccaccatctgcactgcagacttaaccacacccttcatcacaagcaacatctgacctcgtggagaacaaagactttaggattaacatgtgaacctgagactcagg

SEQ ID NO: 360996 - DNA, 1592 bp, Homo sapiens
tctcagcccctccctgcacagagcacatcaaatggaaggggctcctggtcacagaatgtcacccgggaggacgcaggatcctacaccttacacatcataaagcgaggtgatgggactagaggagtaactggatatttcaccttcaccttatacctggagactcccaagccctccatctccagcagcaacttaaaccccagggaggccatggaaactgtgatcttaacctgtgatcctgagactccggacacaagctaccagtggtggatgaatggtcagagcctccctatgactcataggtttcagctgtccgaaaccaacaggaccctctttctatttggtgtcacaaagtatactgcaggaccctatgaatgtgaaatacggaactcagggagtgccagccgcagtgacccagtcaccctgaatctcctccatggtccagacctccccagaattcacccttcatacaccaattaccgttcaggagataacctctacttgtcctgcttcgcgaactctaacccaccggcacagtattcttggacaattaatgggaagtttcagcaatcaggacaaaatctgtttatcccccaaattactacaaagcatagcgggctctatgtttgctctgttcgtaactcagccactcaccagtggcgaggaaagctccacatcgttgacagtcaaagtctctgcttctacaagaataggacttcttcctctccttaatccaacatagcagctgtgatgtcatttctgtatttcaggaagactggcagaaagttgctttgattcttcctcaaagtatttaaaatcagctacagtccaaaattgctttttcttcaaggagatttatggaaaagactatgaaaaggactcttgaatacaagttcctgataacttcaagatcataccactggactaagaactttcaaaattttaatgaacaggctgataccttcatgaaattcaagacaaagaagaaaagaactccatttcattggactaaataacaaaaggataatgttttcataattttttattggaaaatgtgctgattttttgaatgttttattctccagatttatgaatttttttcttcagcaattggtaaagtatacttttgtaaacaaaaattgaaacatttgcttttgctctctgagtgccccagaattgggaatctattcatgaatattcatatgtttatggtaataaagttatttgcacaagtttaaaaaagcaaacaacacggaacaccaccacaaacaacattgtggggcgacctttgcgagacaccgacaggagaaggtttctctaaacacattggctttggggcgcgcgggcccccaaagggcaacagggacacctgtcgtaccaaagcgcgggttcccaagagagaaaacggggcacaggagaacaaggaggggggagaatatcctcagcacgaattaaaaaaaaaaggccggcgggcgggacaaccgaagccgttgttgaaacaaatcaccacaaaggggcgatccgggagaggagcaaagagggggatgcaaccacagagggaggtcaccaggaaacacccaatataaatatagccc

SEQ ID NO: 360997 - DNA, 643 bp, Homo sapiens
tctgttcctctgtgggccagactgccatcccaaatacacatggccagaggccaggcctctcagtccctctcaggtccaagtacagagacctttacccctaggcatcaaagctggccatgactttctgccccaggcaaaccagaataggcctaggcttgatccacaataggagaaaagaggctcctcctgtcataggagactcagggtccacagcttgtgactttatgctctttgctccagatggcctggatgcccccaccatttcttcctcacacctattaccatacaagggaagtccccaagctctcctgcctcacagacactcacccactggcagagcattcttggctgattgatgggaagttccagcaatcagcacaagtgttctttatccctcaaatcactaaaacatatagagggctctatgtctgtttcatccataactcagccactgctggaacaaatctcataatcaagaggaccatagtccctggtaagtggatccctgaaacattggcaatatgttttccagtgaagtctatctagctatcagggaggggagacactggaggagagagcccgcctcaatgtgatgcctgcagattgatgtgcagaggcgtaggaggaggaggtataggagtat

SEQ ID NO: 360998 - DNA, 1217 bp, Homo sapiens
gagcggaagcggaagcggctctgttcgccgcctctcccaccggcccgatgagctgcagcggctccggcgcggaccccgaggcggcgccggcctccgccgcctcggccccgggccccgcgcccccggtctcggctcccgccgcgctgccctccagcaccgccgcggagaacaaggccagccccgcggggacagcggggggacctggggctggagcagctgctgggggcacgggacccttggcggcgcgggccggggagccagctgagcggcgtggggcggctccggtgtcggcgggtggcgcggcgcccccggagggggccatatctaacggggtttacgtactgccgagcgcggccaacggagacgtgaagcccgtggtgtccagcacgcctttggtggacttcttgatgcagctggaagattacacgcctacgatcccagatgcagtgactggttactacctgaaccgtgctggctttgaggcctcagacccacgcataattcggctcatctccttagctgcccagaaattcatctcagatattgccaatgatgccctacagcactgcaaaatgaagggcacggcctccggcagctcccggagcaagagcaaggaccgcaagtacactctaaccatggaggacttgacccctgccctcagcgagtatggcatcaatgtgaagaagccgcactacttcacctgagccacccaacctaaatgtacttatctgtccccatgtccccacaccagcctgttttcataataaactttattgtgacaggcaaaaaaaaaaaaaaaaaaaaaaaaaaaaaaaaaaaaaaaaaaaaaaaaaaaaaaaaaaaaaaaaaaaaaaaaaaaaaaaaaaaaaaaaaaaaaaaaaaaaaaaaaacctcggggggggccccggtcccaaattcgccctatagggagccgttttacaatccatgggccggcgtttaacaacgtgggaactggaaaaaccttggggttaccaaactaaatgcctggaagaaaatccccctttggcaattggcgtaaaaccaaaaggcccaaccgatggccttcccaacattgccaacctaattggcaattgcaaattgaagcgtaatatttggtaaaatccggtaaattttggaatcagttaattttaaccaaaagccaaatggcaaatcctttaaataaaaaatccccggatgggtgagtgtgtcaattggaa

SEQ ID NO: 360999 - DNA, 987 bp, Homo sapiens
gagcggaagcggaagcggctctgttcgccgcctctcccaccggcccgatgagctgcagcggctccggcgcggaccccgaggcggcgccggcctccgccgcctcggccccgggccccgcgcccccggtctcggctcccgccgcgctgccctccagcaccgccgcggagaacaaggccagccccgcggggacagcggggggacctggggctggagcagctgctgggggcacgggacccttggcggcgcgggccggggagccagctgagcggcgtggggcggctccggtgtcggcgggtggcgcggcgcccccggagggggccatatctaacggggtttacgtactgccgagcgcggccaacggagacgtgaagcccgtggtgtccagcacgcctttggtggacttcttgatgcagctggaagattacacgcctacgatcccagatgcagtgactggttactacctgaaccgtgctggctttgaggcctcagacccacgcataattcggctcatctccttagctgcccagaaattcatctcagatattgccaatgatgccctacagcactgcaaaatgaagggcacggcctccggcagctcccggagcaagagcaaggaccgcaagtacactctaagacatggaggacttgaccccgtgcctctccctgaaattaaagaacagttgacagaaaaaagagacagaaaaagaaaagaaagcggcaaacagaacgagcacacgcacaagaagaacagaacacgaggaggaagaagtgagcgacccagagaacgccaagccgcaacgaggccaaagaagagcgaggcggagcagacggagagaagcggagcaaagaagagcgaggggcaacgagaggcaggagagcggcggggcaaagaaggaaagaggagaggaagacgaagcggagacgggcgcaaggcgggagaaaacgaggggcagagaggggagcgagcgacggacaagaggagagcgt

SEQ ID NO: 361000 - DNA, 809 bp, Homo sapiens
gagcggaagcggaagcggctctgttcgccgcctctcccaccggcccgatgagctgcagcggctccggcgcggaccccgaggcggcgccggcctccgccgcctcggccccgggccccgcgcccccggtctcggctcccgccgcgctgccctccagcaccgccgcggagaacaaggccagccccgcggggacagcggggggacctggggctggagcagctgctgggggcacgggacccttggcggcgcgggccggggagccagctgagcggcgtggggcggctccggtgtcggcgggtggcgcggcgcccccggagggggccatatctaacggggtttacgtactgccgagcgcggccaacggagacgtgaagcccgtggtgtccagcacgcctttggtggacttcttgatgcagctggaagattacacgcctacgatcccagatgcagtgactggttactacctgaaccgtgctggctttgaggcctcagacccacgcataattcggctcatctccttagctgcccagaaattcatctcagatattgccaatgatgccctacagcactgcaaaatgaagggcacggcctccggcagctcccggagcaagagcaaggaccgcaagtacactctaaccatggaggacttgacccctgccctcagcgagtatggcatcaatgtgaagaagccgcactacttcacctgagccacccaacctaaatgtacttatctgtccccatgtccccacaccagcctgttttcatatacttctcctctccttcttttttttttttttcttttttttttttct

SEQ ID NO: 361001 - DNA, 1346 bp, Homo sapiens
gagcggaagcggaagcggctctgttcgccgcctctcccaccggcccgatgagctgcagcggctccggcgcggaccccgaggcggcgccggcctccgccgcctcggccccgggccccgcgcccccggtctcggctcccgccgcgctgccctccagcaccgccgcggagaacaaggccagccccgcggggacagcggggggacctggggctggagcagctgctgggggcacgggacccttggcggcgcgggccggggagccagctgagcggcgtggggcggctccggtgtcggcgggtggcgcggcgcccccggagggggccatatctaacggggtttacgtactgccgagcgcggccaacggagacgtgaagcccgtggtgtccagcacgcctttggtggacttcttgatgcagctggaagattacacgcctacggtgggcttccgcccgaacaaggccacctagcctgctgtcaaaactttcagccacatcgtgcttttcagcgttctcttccatttgctcccctagtcgctcttctgtgtttgccctctgctcacccaaactatcccagatgcagtgactggttactacctgaaccgtgctggctttgaggcctcagacccacgcataattcggctcatctccttagctgcccagaaattcatctcagatattgccaatgatgccctacagcactgcaaaatgaagggcacggcctccggcagctcccggagcaagagcaaggaccgcaagtacactctaaccatggaggacttgacccctgccctcagcgagtatggcatcaatgtgaagaagccgcactacttcacctgagccacccaacctaaatgtacttatctgtccccatgtccccacaccagcctgttttcataataaactttattgtgacaggcaaaaaaaaaaaaaaaaaaaaaaaaaaaaaaaaaaaaaaaaaaaaaaaaaaaaaaaaaaaaaaaaaaaaaaaaaaaaaaaaaaaaaaaaaaaaaaaaaaaaaaaaaacctcggggggggccccggtcccaaattcgccctatagggagccgttttacaatccatgggccggcgtttaacaacgtgggaactggaaaaaccttggggttaccaaactaaatgcctggaagaaaatccccctttggcaattggcgtaaaaccaaaaggcccaaccgatggccttcccaacattgccaacctaattggcaattgcaaattgaagcgtaatatttggtaaaatccggtaaattttggaatcagttaattttaaccaaaagccaaatggcaaatcctttaaataaaaaatccccggatgggtgagtgtgtcaattggaa

SEQ ID NO: 361002 - DNA, 668 bp, Homo sapiens
gagcggaagcggaagcggctctgttcgccgcctctcccaccggcccgatgagctgcagcggctccggcgcggaccccgaggcggcgccggcctccgccgcctcggccccgggccccgcgcccccggtctcggctcccgccgcgctgccctccagcaccgccgcggagaacaaggccagccccgcggggacagcggggggacctggggctggagcagctgctgggggcacgggacccttggcggcgcgggccggggagccagctgagcggcgtggggcgggtgagggccgggacgggtgagggcgagggaagcgtcttgggctgggtccagcggcgggtgagggcagagggtatagacagacctagctggggccctgcgcctcccacctctgtgtctcattttgctggttctcctccagctctccggtgtcggcgggtggcgcggcgcccccggagggggccatatctaacggggtttacgtactgccgagcgcggccaacggagacgtgaagcccgtggtgtccagcacgcctttggtggacttcttgatgcagctggaagattacacgcctacgatcccagatgcagtgactggttactacctgaaccgtgctggctttgaggcctcagacccacgcatattcggctcatctcctagccagatcccg

SEQ ID NO: 361003 - DNA, 1428 bp, Homo sapiens
gagcggaagcggaagcggctctgttcgccgcctctcccaccggcccgatgagctgcagcggctccggcgcggaccccgaggcggcgccggcctccgccgcctcggccccgggccccgcgcccccggtctcggctcccgccgcgctgccctccagcaccgccgcggagaacaaggccagccccgcggggacagcggggggacctggggctggagcagctgctgggggcacgggacccttggcggcgcgggccggggagccagctgagcggcgtggggcggctccggtgtcggcgggtggcgcggcgcccccggagggggccatatctaacggggtttacgtactgccgagcgcggccaacggagacgtgaagcccgtggtgtccagcacgcctttggtggacttcttgatgcagctggaagattacacgcctacggtgggcttccgcccgaacaaggccacctagcctgctgtcaaaactttcagccacatcgtgcttttcagcgttctcttccatttgctcccctagtcgctcttctgtgtttgccctctgctcacccaaactgtgagcttcctgataatcaggcctatccatttccctcaccctcctcccgctctgctgacagttctcttaattgatttctcagatcccagatgcagtgactggttactacctgaaccgtgctggctttgaggcctcagacccacgcataattcggctcatctccttagctgcccagaaattcatctcagatattgccaatgatgccctacagcactgcaaaatgaagggcacggcctccggcagctcccggagcaagagcaaggaccgcaagtacactctaaccatggaggacttgacccctgccctcagcgagtatggcatcaatgtgaagaagccgcactacttcacctgagccacccaacctaaatgtacttatctgtccccatgtccccacaccagcctgttttcataataaactttattgtgacaggcaaaaaaaaaaaaaaaaaaaaaaaaaaaaaaaaaaaaaaaaaaaaaaaaaaaaaaaaaaaaaaaaaaaaaaaaaaaaaaaaaaaaaaaaaaaaaaaaaaaaaaaaaacctcggggggggccccggtcccaaattcgccctatagggagccgttttacaatccatgggccggcgtttaacaacgtgggaactggaaaaaccttggggttaccaaactaaatgcctggaagaaaatccccctttggcaattggcgtaaaaccaaaaggcccaaccgatggccttcccaacattgccaacctaattggcaattgcaaattgaagcgtaatatttggtaaaatccggtaaattttggaatcagttaattttaaccaaaagccaaatggcaaatcctttaaataaaaaatccccggatgggtgagtgtgtcaattggaa

SEQ ID NO: 361004 - DNA, 855 bp, Homo sapiens
gaggcaatcagcgccaaaagacgaccgtggtgagcttgagtctagcctggcacattacacgagacactgagagagatgcagtgactgagtacacacgtgctcgaagtctgattcagtaggccatagcatgcacgctgaattcggctcatctccttagctgcccagaaattcatctcagatattgccaatgatgccctacagcactgcaaaatgaagggcacggcctccggcagctcccggagcaagagcaaggaccgcaagtacactctaaccatggaggacttgacccctgccctcagcgagtatggcatcaatgtgaagaagccgcactacttcacctgagccacccaacctaaatgtacttatctgtccccatgtccccacaccagcctgttttcataataaactttattgtgacaggcaaaaaaaaaaaaaaaaaaaaaaaaaaaaaaaaaaaaaaaaaaaaaaaaaaaaaaaaaaaaaaaaaaaaaaaaaaaaaaaaaaaaaaaaaaaaaaaaaaaaaaaaaacctcggggggggccccggtcccaaattcgccctatagggagccgttttacaatccatgggccggcgtttaacaacgtgggaactggaaaaaccttggggttaccaaactaaatgcctggaagaaaatccccctttggcaattggcgtaaaaccaaaaggcccaaccgatggccttcccaacattgccaacctaattggcaattgcaaattgaagcgtaatatttggtaaaatccggtaaattttggaatcagttaattttaaccaaaagccaaatggcaaatcctttaaataaaaaatccccggatgggtgagtgtgtcaattggaa

SEQ ID NO: 361005 - DNA, 1023 bp, Homo sapiens
agcgccacccggaggcggaaatcagcccgcgtcggcgcaggcgggagaagggagaggagtgacatccgtttgtcggaagtcgctcctcccccttccttcgctttttttccttgtcattggttcctggcactcgggccccacctcctccggctacgcccctcacggccgcttttcccgcctccgccggggccgagccgctgttcggctgacagttgaggatggccggagccgagggcgccgctgggcggcagtcggagctggagcccgtggtatcgttggtcgacgtccttgaggaggacgaggagctggagaatgaggcgtgcgctgtcctgggcggcagcgactccgagaagtgctcctactctcagaacatttatcggttgtgatacgtggtaaacagcagaggtttaacaaattcgggacatgcacattacttcctgacaaagcaaaggtaaattctggcaataagtacaatgacaacttttttggattgtactgcatttgcaagagaccttatcctgatcctgaagacgagattccagatgagatgatccagtgcgtagtctgtgaagactggttccatggaaggcatcttggtgccattccccctgagagtggggattttcaggagatggtatgccaggcctgcatgaaacgttgttcttttttgtgggcttatgctgcacaattggcagtaaccaaaatatccactgaggatgatggattggtgcggaacattgatggaataggtgatcaggaagttatcaaacctgaaaatggagagcatcaagatagtaccctcaaagaggatgttccagaacagggaaaggatgatgtccgggaggttaaagtagagcagaacagtgaaccatgtgccggctctagttctgaatctgatctccagacattttcatacagtcctggcaggtacacaacctgctacgccagttcaggggccataaggtggcagtgtctttctttataagctgcttagctttaagctcctgaagagtaccgagctcg

SEQ ID NO: 361006 - DNA, 4152 bp, Homo sapiens
agcgccacccggaggcggaaatcagcccgcgtcggcgcaggcgggagaagggagaggagtgacatccgtttgtcggaagtcgctcctcccccttccttcgctttttttccttgtcattggttcctggcactcgggccccacctcctccggctacgcccctcacggccgcttttcccgcctccgccggggccgagccgctgttcggctgacagttgaggatggccggagccgagggcgccgctgggcggcagtcggagctggagcccgtggtatcgttggtcgacgtccttgaggaggacgaggagctggagaatgaggcgtgcgctgtcctgggcggcagcgactccgagaagtgctcctactctcagggctcagtaaagagacaagcactatatgcctgtagtacctgcaccccagagggagaagaaccagcaggaatttgtttagcttgcagttatgaatgtcatggaagtcacaaactatttgagctatacacaaaaagaaattttcgttgtgattgtggaaacagcaagtttaaaaatttggaatgcaaattacttcctgacaaagcaaaggtaaattctggcaataagtacaatgacaacttttttggattgtactgcatttgcaagagaccttatcctgatcctgaagacgagattccagatgagatgatccagtgcgtagtctgtgaagactggttccatggaaggcatcttggtgccattccccctgagagtggggattttcaggagatggtatgccaggcctgcatgaaacgttgttcttttttgtgggcttatgctgcacaattggcagtaaccaaaatatccactgaggatgatggattggtgcggaacattgatggaataggtgatcaggaagttatcaaacctgaaaatggagagcatcaagatagtaccctcaaagaggatgttccagaacagggaaaggatgatgtccgggaggttaaagtagagcagaacagtgaaccatgtgccggctctagttctgaatctgatctccaggtaatgtgtgaagtacgagccatcaagaaataagactgggccaggcgcggtggctcatgcccataatcccagcactttgggaggctgaggtggcggatcacctgaggtcacgggtttgagaccagccttggcaacatggttaaacctcatctctactaaaattacaaaaactagccaggcatggtggcacatgcctgtaatcccagctactcaggaggctgaggcaggagaattgcttgaacccaggaggcggaggttacagtgatccgagatcatgccactgcactctagcctgggcaacagaatgagattccgtctcaaaaaaaaaaaagaaaactgaagtggaattaattctgtaaacttatggctttggatttcaattttatcctttgcctaaagaaatctctttacaaaatctaaactatgaaaactatggtagtttaaaaaacatgcttcaaaacttaattttatttcagacagtgtttaagaatgaaagcctcaacgcagaatcaaaatctggctgcaaacttcaggagcttaaagctaagcagcttataaagaaagacactgccacctattggcccctgaactggcgtagcaagttgtgtacctgccaagactgtatgaaaatgtatggagatctagatgtcttattcctgacagatgaatacgacacagttctggcttatgaaaacaaagggaagattgcccaggccactgacaggagcgatcccctaatggatacccttagcagcatgaatagagtccagcaagtggaactcatttgtgaatacaatgatttgaagactgaacttaaagactatctcaagagatttgctgatgaaggcacggttgttaagagagaggacattcagcagttctttgaagagtttcagtcaaaaaagagaagaagagtggatgggatgcagtattactgcagctagagtggagtatgaagctttctcattcaagccaatgaaaatgcgcttcccattcttggaataaaagaggtgtggttcacatttggccccctttccgtcctcctctgtttggagaggcctcgcgctcccttcattctctttagctgcagtagccaccgtgtggatgctgacttcacagccagcgtcctctgtgactcagctgatgcagctcattccacagacttcgccagtgtactcctactccagtgcacccagggttatttgcatagtttttaagtttgattttgttttgagaaagcaaattggtgtcttgtttaatgatctgttatttcactcccagatgtgtgtgttttgccacagagctgttgccttccagaacctcctccgcaggcatcacggaaggctctcttcccgtcacctagaacctctacaggtcccctcgcccctatgatcgtggtgccttgggtcaaagcttcctcaagcctggtctgctccttctttcacgtccctgttttctgaggtttggtcatagcttagaaaggatcttggggcttgttttctctaggcccaacctccagagtagccaggactgatggttttctggtctggatgtctgtcacaggcggagagattaacagatgacagggttgaggaagcaagcctttgttatgaattttactaatacagttcaagtgaaattttcgttcatgattctattggcactagaattagaatttcagtactgtagtgctcacagggcttcctggagaacatttgcccgtatactagtcccttctctgctgcctagaaaacagaccgggtctcacccctgtgaaatcttggtggtttacgaagtcctctggatttcttgatattatcagggatattcataagcatatatcaaaaatggacctattttgatattctgttatgaaaatgttattagaaccccaataaattattatttttcccccttgaatctgctaaagaaaacagatcctgacttagcttacttgaaataagcagggcagggagccctgttttggaagagacagactgtggaagagattacaaacaaggcccgaggctgcacgaatgatgagttttgtgtatataatgttaatgtccaccgccacttccctaacgactatgagatcttttttttgaagatcctcatggaaggttgtacagagccccacatttgaggggaagtcctttcagttgatatgagatctctttaacacccctcagtctatgtaggaaatgccttgtgatacatagagaaccctcagcttctctctgcctctggaggaccaaggtctttcctgacagtcggagacacaccttgatgtatgttaataaaagcatttcaggctgtggggccaccatgtatattaatactccttatgtgtccagcatctgtgtattcattcgagtgcccaatccctggatgagatgaactaggccttataaaaagtcaaagcctcaaagaaatggcacaaccatgttcttcggcactcaggctcctaattgcagatcctcacgaagggtggtatgtggagctggaaggtcttgtggccacaggacatgctggtgagccctgagctggccttgtgcagagggctccgttcaaaggctcggggtgtctttgaggttgtttatcaagctggggaactcttccaagtctgacaatgtttcgaaccctttttgcaaggttgcactattagtataccatcatgtccggaaaacttttaatcttctcaaatatctgatgtaactaccagaaagtcccttacttcctatgaccaatcaggaccaagtcttggaggtgatgtgttacattacgtgcagcacaatagtaccgatcagttaactcagcgctgaagggcttgttttatgaaaggtactattccttctttcacattaactggaaacctctttttttacctgttgttcacaactagttttcttattgactgtattggactgtctcttcttgtagagactgattttggccaacatattaatgcatgttttatgcaaaacacaaatatgatattagttgcttttaaggagttctggcattgtatgtgcatttttgtagaaattgttactggacttataattacatacttaactctgatcaggtttctgtaaaatttaaataaaaccaatacaaaata

SEQ ID NO: 361007 - DNA, 2388 bp, Homo sapiens
gttatcattaacataattcttaacagtatcatttgacttgtttgtgaatgctatgacctcggattgcgattctgttacttagttctctttcataatctttgcttttcaaaaacaggttgttaagagagaggacattcagcagttctttgaagagtttcagtcaaaaaagagaagaagagtggatgggatgcagtattactgcagctagagtggagtatgaagctttctcattcaagccaatgaaaatgcgcttcccattcttggaataaaagaggtgtggttcacatttggccccctttccgtcctcctctgtttggagaggcctcgcgctcccttcattctctttagctgcagtagccaccgtgtggatgctgacttcacagccagcgtcctctgtgactcagctgatgcagctcattccacagacttcgccagtgtactcctactccagtgcacccagggttatttgcatagtttttaagtttgattttgttttgagaaagcaaattggtgtcttgtttaatgatctgttatttcactcccagatgtgtgtgttttgccacagagctgttgccttccagaacctcctccgcaggcatcacggaaggctctcttcccgtcacctagaacctctacaggtcccctcgcccctatgatcgtggtgccttgggtcaaagcttcctcaagcctggtctgctccttctttcacgtccctgttttctgaggtttggtcatagcttagaaaggatcttggggcttgttttctctaggcccaacctccagagtagccaggactgatggttttctggtctggatgtctgtcacaggcggagagattaacagatgacagggttgaggaagcaagcctttgttatgaattttactaatacagttcaagtgaaattttcgttcatgattctattggcactagaattagaatttcagtactgtagtgctcacagggcttcctggagaacatttgcccgtatactagtcccttctctgctgcctagaaaacagaccgggtctcacccctgtgaaatcttggtggtttacgaagtcctctggatttcttgatattatcagggatattcataagcatatatcaaaaatggacctattttgatattctgttatgaaaatgttattagaaccccaataaattattatttttcccccttgaatctgctaaagaaaacagatcctgacttagcttacttgaaataagcagggcagggagccctgttttggaagagacagactgtggaagagattacaaacaaggcccgaggctgcacgaatgatgagttttgtgtatataatgttaatgtccaccgccacttccctaacgactatgagatcttttttttgaagatcctcatggaaggttgtacagagccccacatttgaggggaagtcctttcagttgatatgagatctctttaacacccctcagtctatgtaggaaatgccttgtgatacatagagaaccctcagcttctctctgcctctggaggaccaaggtctttcctgacagtcggagacacaccttgatgtatgttaataaaagcatttcaggctgtggggccaccatgtatattaatactccttatgtgtccagcatctgtgtattcattcgagtgcccaatccctggatgagatgaactaggccttataaaaagtcaaagcctcaaagaaatggcacaaccatgttcttcggcactcaggctcctaattgcagatcctcacgaagggtggtatgtggagctggaaggtcttgtggccacaggacatgctggtgagccctgagctggccttgtgcagagggctccgttcaaaggctcggggtgtctttgaggttgtttatcaagctggggaactcttccaagtctgacaatgtttcgaaccctttttgcaaggttgcactattagtataccatcatgtccggaaaacttttaatcttctcaaatatctgatgtaactaccagaaagtcccttacttcctatgaccaatcaggaccaagtcttggaggtgatgtgttacattacgtgcagcacaatagtaccgatcagttaactcagcgctgaagggcttgttttatgaaaggtactattccttctttcacattaactggaaacctctttttttacctgttgttcacaactagttttcttattgactgtattggactgtctcttcttgtagagactgattttggccaacatattaatgcatgttttatgcaaaacacaaatatgatattagttgcttttaaggagttctggcattgtatgtgcatttttgtagaaattgttactggacttataattacatacttaactctgatcaggtttctgtaaaatttaaataaaaccaatacaaaata

SEQ ID NO: 361008 - DNA, 2331 bp, Homo sapiens
  misc_feature (56)..(56): n is a, c, g, or t
gccaccgacgacccgcccccaacccacgcccacacctggacgccgccaccacctcnaggttgttaagagagaggacattcagcagttctttgaagagtttcagtcaaaaaagagaagaagagtggatgggatgcagtattactgcagctagagtggagtatgaagctttctcattcaagccaatgaaaatgcgcttcccattcttggaataaaagaggtgtggttcacatttggccccctttccgtcctcctctgtttggagaggcctcgcgctcccttcattctctttagctgcagtagccaccgtgtggatgctgacttcacagccagcgtcctctgtgactcagctgatgcagctcattccacagacttcgccagtgtactcctactccagtgcacccagggttatttgcatagtttttaagtttgattttgttttgagaaagcaaattggtgtcttgtttaatgatctgttatttcactcccagatgtgtgtgttttgccacagagctgttgccttccagaacctcctccgcaggcatcacggaaggctctcttcccgtcacctagaacctctacaggtcccctcgcccctatgatcgtggtgccttgggtcaaagcttcctcaagcctggtctgctccttctttcacgtccctgttttctgaggtttggtcatagcttagaaaggatcttggggcttgttttctctaggcccaacctccagagtagccaggactgatggttttctggtctggatgtctgtcacaggcggagagattaacagatgacagggttgaggaagcaagcctttgttatgaattttactaatacagttcaagtgaaattttcgttcatgattctattggcactagaattagaatttcagtactgtagtgctcacagggcttcctggagaacatttgcccgtatactagtcccttctctgctgcctagaaaacagaccgggtctcacccctgtgaaatcttggtggtttacgaagtcctctggatttcttgatattatcagggatattcataagcatatatcaaaaatggacctattttgatattctgttatgaaaatgttattagaaccccaataaattattatttttcccccttgaatctgctaaagaaaacagatcctgacttagcttacttgaaataagcagggcagggagccctgttttggaagagacagactgtggaagagattacaaacaaggcccgaggctgcacgaatgatgagttttgtgtatataatgttaatgtccaccgccacttccctaacgactatgagatcttttttttgaagatcctcatggaaggttgtacagagccccacatttgaggggaagtcctttcagttgatatgagatctctttaacacccctcagtctatgtaggaaatgccttgtgatacatagagaaccctcagcttctctctgcctctggaggaccaaggtctttcctgacagtcggagacacaccttgatgtatgttaataaaagcatttcaggctgtggggccaccatgtatattaatactccttatgtgtccagcatctgtgtattcattcgagtgcccaatccctggatgagatgaactaggccttataaaaagtcaaagcctcaaagaaatggcacaaccatgttcttcggcactcaggctcctaattgcagatcctcacgaagggtggtatgtggagctggaaggtcttgtggccacaggacatgctggtgagccctgagctggccttgtgcagagggctccgttcaaaggctcggggtgtctttgaggttgtttatcaagctggggaactcttccaagtctgacaatgtttcgaaccctttttgcaaggttgcactattagtataccatcatgtccggaaaacttttaatcttctcaaatatctgatgtaactaccagaaagtcccttacttcctatgaccaatcaggaccaagtcttggaggtgatgtgttacattacgtgcagcacaatagtaccgatcagttaactcagcgctgaagggcttgttttatgaaaggtactattccttctttcacattaactggaaacctctttttttacctgttgttcacaactagttttcttattgactgtattggactgtctcttcttgtagagactgattttggccaacatattaatgcatgttttatgcaaaacacaaatatgatattagttgcttttaaggagttctggcattgtatgtgcatttttgtagaaattgttactggacttataattacatacttaactctgatcaggtttctgtaaaatttaaataaaaccaatacaaaata

SEQ ID NO: 361009 - DNA, 1147 bp, Homo sapiens
agcgccacccggaggcggaaatcagcccgcgtcggcgcaggcgggagaagggagaggagtgacatccgtttgtcggaagtcgctcctcccccttccttcgctttttttccttgtcattggttcctggcactcgggccccacctcctccggctacgcccctcacggccgcttttcccgcctccgccggggccgagccgctgttcggctgacagttgaggatggccggagccgagggcgccgctgggcggcagtcggagctggagcccgtggtatcgttggtcgacgtccttgaggaggacgaggagctggagaatgaggcgtgcgctgtcctgggcggcagcgactccgagaagtgctcctactctcagggctcagtaaagagacaagcactatatgcctgtagtacctgcaccccagagggagaagaaccagcaggaatttgtttagcttgcagttatgaatgtcatggaagtcacaaactatttgagctatacacaaaaagaaattttcgttgtgattgtggaaacagcaagtttaaaaatttggaatgcaaattacttcctgacaaagcaaaggtaaattctggcaataagtacaatgacaacttttttggattgtactgcatttgcaagagaccttatcctgatcctgaagacgagattccagatgagatgatccagtgcgtagtctgtgaagactggttccatggaaggcatcttggtgccattccccctgagagtggggattttcaggagatggtatgccaggcctgcatgaaacgttgttcttttttgtgggcttatgctgcacaattggcagtaaccaaaatatccactgaggatgatggattggtgcggaacattgatggaataggtgatcaggaagttatcaaacctgaaaatggagagcatcaagatagtaccctcaaagaggatgttccagaacagggaaaggatgatgtccgggaggttaaagtagagcagaacagtgaaccatgtgccggctctagttctgaatctgatctccagacattttcatacagtcctggcaggtacacaacctgctacgccagttcaggggccataaggtggcagtgtctttctttataagctgcttagctttaagctcctgaagagtaccgagctcg

SEQ ID NO: 361010 - DNA, 198 bp, Homo sapiens
agataaaggttatattttacattataattagtcttctaaaaataaattctaatgatatgatcagtgtattattacagtatttataaaataatgggcattttggacaatttggcaatcacaagaaaatttttggtgttctatattcacagcatcttggtgccattccccctgagagtggggattttcaggagatggtat

SEQ ID NO: 361011 - DNA, 3676 bp, Homo sapiens
agcgccacccggaggcggaaatcagcccgcgtcggcgcaggcgggagaagggagaggagtgacatccgtttgtcggaagtcgctcctcccccttccttcgctttttttccttgtcattggttcctggcactcgggccccacctcctccggctacgcccctcacggccgcttttcccgcctccgccggggccgagccgctgttcggctgacagttgaggatggccggagccgagggcgccgctgggcggcagtcggagctggagcccgtggtatcgttggtcgacgtccttgaggaggacgaggagctggagaatgaggcgtgcgctgtcctgggcggcagcgactccgagaagtgctcctactctcagggctcagtaaagagacaagcactatatgcctgtagtacctgcaccccagagggagaagaaccagcaggaatttgtttagcttgcagttatgaatgtcatggaagtcacaaactatttgagctatacacaaaaagaaattttcgttgtgattgtggaaacagcaagtttaaaaatttggaatgcaaattacttcctgacaaagcaaaggtaaattctggcaataagtacaatgacaacttttttggattgtactgcatttgcaagagaccttatcctgatcctgaagacgagattccagatgagatgatccagtgcgtagtctgtgaagactggttccatggaaggcatcttggtgccattccccctgagagtggggattttcaggagatggtatgccaggcctgcatgaaacgttgttcttttttgtgggcttatgctgcacaattggcagtaaccaaaatatccactgaggatgatggattggtgcggaacattgatggaataggtgatcaggaagttatcaaacctgaaaatggagagcatcaagatagtaccctcaaagaggatgttccagaacagggaaaggatgatgtccgggaggttaaagtagagcagaacagtgaaccatgtgccggctctagttctgaatctgatctccagacagtgtttaagaatgaaagcctcaacgcagaatcaaaatctggctgcaaacttcaggagcttaaagctaagcagcttataaagaaagacactgccacctattggcccctgaactggcgtagcaagttgtgtacctgccaagactgtatgaaaatgtatggagatctagatgtcttattcctgacagatgaatacgacacagttctggcttatgaaaacaaagggaagattgcccaggccactgacaggagcgatcccctaatggatacccttagcagcatgaatagagtccagcaagtggaactcatttgtgaatacaatgatttgaagactgaacttaaagactatctcaagagatttgctgatgaaggcacggttgttaagagagaggacattcagcagttctttgaagagtttcagtcaaaaaagagaagaagagtggatgggatgcagtattactgcagctagagtggagtatgaagctttctcattcaagccaatgaaaatgcgcttcccattcttggaataaaagaggtgtggttcacatttggccccctttccgtcctcctctgtttggagaggcctcgcgctcccttcattctctttagctgcagtagccaccgtgtggatgctgacttcacagccagcgtcctctgtgactcagctgatgcagctcattccacagacttcgccagtgtactcctactccagtgcacccagggttatttgcatagtttttaagtttgattttgttttgagaaagcaaattggtgtcttgtttaatgatctgttatttcactcccagatgtgtgtgttttgccacagagctgttgccttccagaacctcctccgcaggcatcacggaaggctctcttcccgtcacctagaacctctacaggtcccctcgcccctatgatcgtggtgccttgggtcaaagcttcctcaagcctggtctgctccttctttcacgtccctgttttctgaggtttggtcatagcttagaaaggatcttggggcttgttttctctaggcccaacctccagagtagccaggactgatggttttctggtctggatgtctgtcacaggcggagagattaacagatgacagggttgaggaagcaagcctttgttatgaattttactaatacagttcaagtgaaattttcgttcatgattctattggcactagaattagaatttcagtactgtagtgctcacagggcttcctggagaacatttgcccgtatactagtcccttctctgctgcctagaaaacagaccgggtctcacccctgtgaaatcttggtggtttacgaagtcctctggatttcttgatattatcagggatattcataagcatatatcaaaaatggacctattttgatattctgttatgaaaatgttattagaaccccaataaattattatttttcccccttgaatctgctaaagaaaacagatcctgacttagcttacttgaaataagcagggcagggagccctgttttggaagagacagactgtggaagagattacaaacaaggcccgaggctgcacgaatgatgagttttgtgtatataatgttaatgtccaccgccacttccctaacgactatgagatcttttttttgaagatcctcatggaaggttgtacagagccccacatttgaggggaagtcctttcagttgatatgagatctctttaacacccctcagtctatgtaggaaatgccttgtgatacatagagaaccctcagcttctctctgcctctggaggaccaaggtctttcctgacagtcggagacacaccttgatgtatgttaataaaagcatttcaggctgtggggccaccatgtatattaatactccttatgtgtccagcatctgtgtattcattcgagtgcccaatccctggatgagatgaactaggccttataaaaagtcaaagcctcaaagaaatggcacaaccatgttcttcggcactcaggctcctaattgcagatcctcacgaagggtggtatgtggagctggaaggtcttgtggccacaggacatgctggtgagccctgagctggccttgtgcagagggctccgttcaaaggctcggggtgtctttgaggttgtttatcaagctggggaactcttccaagtctgacaatgtttcgaaccctttttgcaaggttgcactattagtataccatcatgtccggaaaacttttaatcttctcaaatatctgatgtaactaccagaaagtcccttacttcctatgaccaatcaggaccaagtcttggaggtgatgtgttacattacgtgcagcacaatagtaccgatcagttaactcagcgctgaagggcttgttttatgaaaggtactattccttctttcacattaactggaaacctctttttttacctgttgttcacaactagttttcttattgactgtattggactgtctcttcttgtagagactgattttggccaacatattaatgcatgttttatgcaaaacacaaatatgatattagttgcttttaaggagttctggcattgtatgtgcatttttgtagaaattgttactggacttataattacatacttaactctgatcaggtttctgtaaaatttaaataaaaccaatacaaaata

SEQ ID NO: 361012 - DNA, 3649 bp, Homo sapiens
agcgccacccggaggcggaaatcagcccgcgtcggcgcaggcgggagaagggagaggagtgacatccgtttgtcggaagtcgctcctcccccttccttcgctttttttccttgtcattggttcctggcactcgggccccacctcctccggctacgcccctcacggccgcttttcccgcctccgccggggccgagccgctgttcggctgacagttgaggatggccggagccgagggcgccgctgggcggcagtcggagctggagcccgtggtatcgttggtcgacgtccttgaggaggacgaggagctggagaatgaggcgtgcgctgtcctgggcggcagcgactccgagaagtgctcctactctcagggctcagtaaagagacaagcactatatgcctgtagtacctgcaccccagagggagaagaaccagcaggaatttgtttagcttgcagttatgaatgtcatggaagtcacaaactatttgagctatacacaaaaagcaagtttaaaaatttggaatgcaaattacttcctgacaaagcaaaggtaaattctggcaataagtacaatgacaacttttttggattgtactgcatttgcaagagaccttatcctgatcctgaagacgagattccagatgagatgatccagtgcgtagtctgtgaagactggttccatggaaggcatcttggtgccattccccctgagagtggggattttcaggagatggtatgccaggcctgcatgaaacgttgttcttttttgtgggcttatgctgcacaattggcagtaaccaaaatatccactgaggatgatggattggtgcggaacattgatggaataggtgatcaggaagttatcaaacctgaaaatggagagcatcaagatagtaccctcaaagaggatgttccagaacagggaaaggatgatgtccgggaggttaaagtagagcagaacagtgaaccatgtgccggctctagttctgaatctgatctccagacagtgtttaagaatgaaagcctcaacgcagaatcaaaatctggctgcaaacttcaggagcttaaagctaagcagcttataaagaaagacactgccacctattggcccctgaactggcgtagcaagttgtgtacctgccaagactgtatgaaaatgtatggagatctagatgtcttattcctgacagatgaatacgacacagttctggcttatgaaaacaaagggaagattgcccaggccactgacaggagcgatcccctaatggatacccttagcagcatgaatagagtccagcaagtggaactcatttgtgaatacaatgatttgaagactgaacttaaagactatctcaagagatttgctgatgaaggcacggttgttaagagagaggacattcagcagttctttgaagagtttcagtcaaaaaagagaagaagagtggatgggatgcagtattactgcagctagagtggagtatgaagctttctcattcaagccaatgaaaatgcgcttcccattcttggaataaaagaggtgtggttcacatttggccccctttccgtcctcctctgtttggagaggcctcgcgctcccttcattctctttagctgcagtagccaccgtgtggatgctgacttcacagccagcgtcctctgtgactcagctgatgcagctcattccacagacttcgccagtgtactcctactccagtgcacccagggttatttgcatagtttttaagtttgattttgttttgagaaagcaaattggtgtcttgtttaatgatctgttatttcactcccagatgtgtgtgttttgccacagagctgttgccttccagaacctcctccgcaggcatcacggaaggctctcttcccgtcacctagaacctctacaggtcccctcgcccctatgatcgtggtgccttgggtcaaagcttcctcaagcctggtctgctccttctttcacgtccctgttttctgaggtttggtcatagcttagaaaggatcttggggcttgttttctctaggcccaacctccagagtagccaggactgatggttttctggtctggatgtctgtcacaggcggagagattaacagatgacagggttgaggaagcaagcctttgttatgaattttactaatacagttcaagtgaaattttcgttcatgattctattggcactagaattagaatttcagtactgtagtgctcacagggcttcctggagaacatttgcccgtatactagtcccttctctgctgcctagaaaacagaccgggtctcacccctgtgaaatcttggtggtttacgaagtcctctggatttcttgatattatcagggatattcataagcatatatcaaaaatggacctattttgatattctgttatgaaaatgttattagaaccccaataaattattatttttcccccttgaatctgctaaagaaaacagatcctgacttagcttacttgaaataagcagggcagggagccctgttttggaagagacagactgtggaagagattacaaacaaggcccgaggctgcacgaatgatgagttttgtgtatataatgttaatgtccaccgccacttccctaacgactatgagatcttttttttgaagatcctcatggaaggttgtacagagccccacatttgaggggaagtcctttcagttgatatgagatctctttaacacccctcagtctatgtaggaaatgccttgtgatacatagagaaccctcagcttctctctgcctctggaggaccaaggtctttcctgacagtcggagacacaccttgatgtatgttaataaaagcatttcaggctgtggggccaccatgtatattaatactccttatgtgtccagcatctgtgtattcattcgagtgcccaatccctggatgagatgaactaggccttataaaaagtcaaagcctcaaagaaatggcacaaccatgttcttcggcactcaggctcctaattgcagatcctcacgaagggtggtatgtggagctggaaggtcttgtggccacaggacatgctggtgagccctgagctggccttgtgcagagggctccgttcaaaggctcggggtgtctttgaggttgtttatcaagctggggaactcttccaagtctgacaatgtttcgaaccctttttgcaaggttgcactattagtataccatcatgtccggaaaacttttaatcttctcaaatatctgatgtaactaccagaaagtcccttacttcctatgaccaatcaggaccaagtcttggaggtgatgtgttacattacgtgcagcacaatagtaccgatcagttaactcagcgctgaagggcttgttttatgaaaggtactattccttctttcacattaactggaaacctctttttttacctgttgttcacaactagttttcttattgactgtattggactgtctcttcttgtagagactgattttggccaacatattaatgcatgttttatgcaaaacacaaatatgatattagttgcttttaaggagttctggcattgtatgtgcatttttgtagaaattgttactggacttataattacatacttaactctgatcaggtttctgtaaaatttaaataaaaccaatacaaaata

SEQ ID NO: 361013 - DNA, 3619 bp, Homo sapiens
agcgccacccggaggcggaaatcagcccgcgtcggcgcaggcgggagaagggagaggagtgacatccgtttgtcggaagtcgctcctcccccttccttcgctttttttccttgtcattggttcctggcactcgggccccacctcctccggctacgcccctcacggccgcttttcccgcctccgccggggccgagccgctgttcggctgacagttgaggatggccggagccgagggcgccgctgggcggcagtcggagctggagcccgtggtatcgttggtcgacgtccttgaggaggacgaggagctggagaatgaggcgtgcgctgtcctgggcggcagcgactccgagaagtgctcctactctcagggctcagtaaagagacaagcactatatgcctgtagtacctgcaccccagagggagaagaaccagcaggaatttgtttagcttgcagttatgaatgtcatggaagtcacaaactatttgagctatacacaaaaagaaattttcgttgtgattgtggaaacagcaagtttaaaaatttggaatgcaaattacttcctgacaaagcaaaggtaaattctggcaataagtacaatgacaacttttttggattgtactgcatttgcaagagaccttatcctgatcctgaagacgagattccagatgagatgatccagtgcgtagtctgtgaagactggttccatggaaggcatcttggtgccattccccctgagagtggggattttcaggagatggtatgccaggcctgcatgaaacgttgttcttttttgtgggcttatgctgcacaattggcagtaaccaaaatatccactgaggatgatggattggtgcggaacattgatggaataggtgatcaggaagttatcaaacctgaaaatggagagcatcaagatagtaccctcaaagaggatgttccagaacagggaaaggatgatgtccgggaggttaaagtagagcagaacagtgaaccatgtgccggctctagttctgaatctgatctccagacagtgtttaagaatgaaagcctcaacgcagaatcaaaatctggctgcaaacttcaggagcttaaagctaagcagcttataaagaaagacactgccacctattggcccctgaactggcgtagcaagttgtgtacctgccaagactgtatgaaaatgtatggagatctagatgtcttattcctgacagatgaatacgacacagttctggcttatgaaaacaaagggaagattgcccaggccactgacaggagcgatcccctaatggatacccttagcagcatgaatagagtccagcaagtggaactcatttgtgaatacaatgatttgaagactgaacttaaagactatctcaagagatttgctgatgaaggcacggttgttaagagagaggacattcagcagttctttgaagagtttcagtcaaaaaagagaagaagagtggatgggatgcagtattactgcagctagagtggagtatgaagctttctcattcaagccaatgaaaatgcgcttcccattcttggaataaaagaggtgtggttcacatttggccccctttccgtcctcctctgtttggagaggcctcgcgctcccttcattctctttagctgcagtagccaccgtgtggatgctgacttcacagccagcgtcctctgtgactcagctgatgcagctcattccacagacttcgccagtgtactcctactccagtgcacccagggttatttgcatagtttttaagtttgattttgttttgagaaagcaaattggtgtcttgtttaatgatctgttatttcactcccagatgtgtgtgttttgccacagagctgttgccttccagaacctcctccgcaggcatcacggaaggctctcttcccgtcacctagaacctctacaggtcccctcgcccctatgatcgtggtgccttgggtcaaagcttcctcaagcctggtctgctccttctttcacgtccctgttttctgaggtttggtcatagcttagaaaggatcttggggcttgttttctctaggcccaacctccagagtagccaggactgatggttttctggtctggatgtctgtcacaggcggagagattaacagatgacagggttgaggaagcaagcctttgttatgaattttactaatacagttcaagtgaaattttcgttcatgattctattggcactagaattagaatttcagtactgtagtgctcacagggcttcctggagaacatttgcccgtatactagtcccttctctgctgcctagaaaacagaccgggtctcacccctgtgaaatcttggtggtttacgaagtcctctggatttcttgatattatcagggatattcataagcatatatcaaaaatggacctattttgatattctgttatgaaaatgttattagaaccccaataaattattatttttcccccttgaatctgctaaagaaaacagatcctgacttagcttacttgaaataagcagggcagggagccctgttttggaagagacagactgtggaagagattacaaacaaggcccgaggctgcacgaatgatgagttttgtgtatataatgttaatgtccaccgccacttccctaacgactatgagatcttttttttgaagatcctcatggaaggttgtacagagccccacatttgaggggaagtcctttcagttgatatgagatctctttaacacccctcagtctatgtaggaaatgccttgtgatacatagagaaccctcagcttctctctgcctctggaggaccaaggtctttcctgacagtcggagacacaccttgatgtatgttaataaaagcatttcaggctgtggggccaccatgtatattaatactccttatgtgtccagcatctgtgtattcattcgagtgcccaatccctggatgagatgaactaggccttataaaaagtcaaagcctcaaagaaatggcacaaccatgttcttcggcactcaggctcctaattgcagatcctcacgaagggtggtatgtggagctggaaggtcttgtggccacaggacatgctggtgagccctgagctggccttgtgcagagggctccgttcaaaggctcggggtgtctttgaggttgtttatcaagctggggaactcttccaagtctgacaatgtttcgaaccctttttgcaaggttgcactattagtataccatcatgtccggatgaccaatcaggaccaagtcttggaggtgatgtgttacattacgtgcagcacaatagtaccgatcagttaactcagcgctgaagggcttgttttatgaaaggtactattccttctttcacattaactggaaacctctttttttacctgttgttcacaactagttttcttattgactgtattggactgtctcttcttgtagagactgattttggccaacatattaatgcatgttttatgcaaaacacaaatatgatattagttgcttttaaggagttctggcattgtatgtgcatttttgtagaaattgttactggacttataattacatacttaactctgatcaggtttctgtaaaatttaaataaaaccaatacaaaata

SEQ ID NO: 361014 - DNA, 3598 bp, Homo sapiens
agcgccacccggaggcggaaatcagcccgcgtcggcgcaggcgggagaagggagaggagtgacatccgtttgtcggaagtcgctcctcccccttccttcgctttttttccttgtcattggttcctggcactcgggccccacctcctccggctacgcccctcacggccgcttttcccgcctccgccggggccgagccgctgttcggctgacagttgaggatggccggagccgagggcgccgctgggcggcagtcggagctggagcccgtggtatcgttggtcgacgtccttgaggaggacgaggagctggagaatgaggcgtgcgctgtcctgggcggcagcgactccgagaagtgctcctactctcagggctcagtaaagagacaagcactatatgcctgtagtacctgcaccccagagggagaagaaccagcaggaatttgtttagcttgcagttatgaatgtcatggaagtcacaaactatttgagctatacacaaaaagaaattttcgttgtgattgtggaaacagcaagtttaaaaatttggaatgcaaattacttcctgacaaagcaaaggtaaattctggcaataagtacaatgacaacttttttggattgtactgcatttgcaagagaccttatcctgatcctgaagacgagattccagatgagatgatccagtgcgtagtctgtgaagactggttccatggaaggcatcttggtgccattccccctgagagtggggattttcaggagatggtatgccaggcctgcatgaaacgttgttcttttttgtgggcttatgctgcacaattggcagtaaccaaaatatccactgaggatgatggattggtgcggaacattgatggaataggtgatcaggaagttatcaaacctgaaaatggagagcatcaagatagtaccctcaaagaggatgttccagaacagggaaaggatgatgtccgggaggttaaagtagagcagaacagtgaaccatgtgccggctctagttctgaatctgatctccagacagtgtttaagaatgaaagcctcaacgcagaatcaaaatctggctgcaaacttcaggagcttaaagctaagcagcttataaagaaagacactgccacctattggcccctgaactggcgtagcaagttgtgtacctgccaagactgtatgaaaatgtatggagatctagatgtcttattcctgacagatgaatacgacacagttctggcttatgaaaacaaagggaagattgcccaggccactgacaggagcgatcccctaatggatacccttagcagcatgaatagagtccagcaagtggaactcatttgtgaatacaatgatttgaagactgaacttaaagactatctcaagagatttgctgatgaaggcacggttgttaagagagaggacattcagcagttctttgaagagtttcagtcaaaaaagagaagaagagtggatgggatgcagtattactgcagctagagtggagtatgaagctttctcattcaagccaatgaaaatgcgcttcccattcttggaataaaagaggtgtggttcacatttggccccctttccgtcctcctctgtttggagaggcctcgcgctcccttcattctctttagctgcagtagccaccgtgtggatgctgacttcacagccagcgtcctctgtgactcagctgatgcagctcattccacagacttcgccagtgtactcctactccagtgcacccagggttatttgcatagtttttaagtttgattttgttttgagaaagcaaattggtgtcttgtttaatgatctgttatttcactcccagatgtgtgtgttttgccacagagctgttgccttccagaacctcctccgcaggcatcacggaaggctctcttcccgtcacctagaacctctacaggtcccctcgcccctatgatcgtggtgccttgggtcaaagcttcctcaagcctggtctgctccttctttcacgtccctgttttctgaggtttggtcatagcttagaaaggatcttggggcttgttttctctaggcccaacctccagagtagccaggactgatggttttctggtctggatgtctgtcacaggcggagagattaacagatgacagggttgaggaagcaagcctttgttatgaattttactaatacagttcaagtgaaattttcgttcatgattctattggcactagaattagaatttcagtactgtagtgctcacagggcttcctggagaacatttgcccgtatactagtcccttctctgctgcctagaaaacagaccgggtctcacccctgtgaaatcttggtggtttacgaagtcctctggatttcttgatattatcagggatattcataagcatatatcaaaaatggacctattttgatattctgttatgaaaatgttattagaaccccaataaattattatttttcccccttgaatctgctaaagaaaacagatcctgacttagcttacttgaaataagcagggcagggagccctgttttggaagagacagactgtggaagagattacaaacaaggcccgaggctgcacgaatgatgagttttgtgtatataatgttaatgtccaccgccacttccctaacgactatgagatcttttttttgaagatcctcatggaaggttgtacagagccccacatttgaggggaagtcctttcagttgatatgagatctctttaacacccctcagtctatgtaggaaatgccttgtgatacatagagaaccctcagcttctctctgcctctggaggaccaaggtctttcctgacagtcggagacacaccttgatgtatgttaataaaagcatttcaggctgtggggccaccatgtatattaatactccttatgtgtccagcatctgtgtattcattcgagtgcccaatccctggatgagatgaactaggccttataaaaagtcaaagcctcaaagaaatggcacaaccatgttcttcggcactcaggctcctaattgcagatcctcacgaagggtggtatgtggagctggaaggtcttgtggccacaggacatgctggtgagccctgagctggccttgtgcagagggctccgttcaaaggctcggggtgtctttgaggttgtttatcaagctggggaactcttccaagtctgacaatgtttcgaaccctttttgcaaggttgcactattagtataccatcatgtccggaaaacttttaatcttctcaaatatctgatgtaactaccagaaagtcccttacttcctatgaccaatcaggaccaagtcttggaggtgatgtgttacattacgtgcagcacaatagtaccgatcagttaactcagcgctgaagggcttgttttatgaaaggtactattccttctttcacattaactggaaacctctttttttacctgttgttcacaactagttttcttattgactgtattggactgtctcttcttgtagagactgattttggccaacatattaatgcatgttttatgcaaaacacaaatatgatattagttgcttttaaggagttctgacggaaggagtgctgacgcagcgg

SEQ ID NO: 361015 - DNA, 419 bp, Homo sapiens
agccacatctgccccctcagtcccaccacactggaattcacacaatcaggacccagagttaagagtccaaccctagatcctcctgtccaaccacccccgcaagcagcattagaaaagcacctcttggggccgggcacggtggctcatgcctataatctcagcactttgggaggccaaggcgggtggatcacctgaggtcaggagttggagaccagcctggccaatatggtgaaacctcgtctctactaaaaatacaaaaattagccaggcatggtggtgcgtgcctgtagtcccagctacccgggaggctgaggcaggagaatcgcttgaactcaggaagccgagattgcagtgagctgagaccgcatcacggcactccagcctgggcgacagagtgagactctgtctctaaataaata

SEQ ID NO: 361016 - DNA, 356 bp, Homo sapiens
gtggactgctggctttcccagtacctgccaggagggaggcacaagggtgaatcatggactattgaggcgccctgcaaagcgttgcactgctggctgcaggcagcctcactttgggcaagtccccccccatgagctggggagactcagtcatggggagggaggagagggcaagcccccaagggcctctgaacctggcaggtgctgcacggggctggcagttgcttgtggagctgacgtgagggcccgttctcagcagatggcagctggccctgcaacagcagctgcagatgtctttgagtcagtcgtgcggtgctcctggggcttcacccgacccaactttcccagcccaaggcaca

SEQ ID NO: 361017 - DNA, 497 bp, Homo sapiens
agggtgcaagagccacatttacaaacaacaaacttgatctttaaaaatgtttttaaaactctctgagtctcagtgacttcatttgtaaatgagagtgattcatctagatgactctaaggtctctttcaggtcccaggggacgtgatctaagttaggagtgggaacatgggagtggctgcttctccttggctaagcccatgcagactattgtgcccaggactggaataaaggtcctttttgctgcatcacccaggcaacactcccagccttactcaggagtggtgaacattttctgctctggacatagaataggtaggttcattcctggtcttttcactttagattctctttaggttcaagatgcagatttctcaatttggacacacctgcatcacgttggtcaaattttgctgcctgtttctagggttttcttctcagtttcatccctgccttcccttttttgttgttttttttttggttcaaggcccagcttcagt

SEQ ID NO: 361018 - DNA, 463 bp, Homo sapiens
gaaaggaagagactgggcccccgataattttgtggagaagagctatcacactagccaggacttttatgtaagagttaaaaatttcatcttgtttaagccacttttaatttgatttcactgcaaaagcagctaaccaatatactaacacatgtagcaggtataaattatgttagaaattacagtaaaagtaaatggagtagactatttaaaagacagtgattttcaggctagaataaaacaaaaacaaaacaaaataaacacagacatgctcatttgttatatattgtctatagctgcattcacaccttactaccagagttgaatagttacaacagagactgtaaaacgtcaaaaatatttactatcggccgggcatggtggctcatgcctgtaatctcagcactttgggaggctgaggtgggtggatcgcaaggtcaggagtttgagaccagcctggtcagta

SEQ ID NO: 361019 - DNA, 924 bp, Homo sapiens
atcagaagggtaggagaaaagtcagctactgcagagtgatccaactacttacaattttagtaagagtgtatcttttaaataacatattttatttatctgtatactctcattcaggaaaactgttctctctgtcatataatggtttttgaaaagaatgttccctgaatgcacatgtaaataatttctttgctaaaaccagcatttctgataattccacagaactgatagtgagaaaaccttgagtactggaaggttttgtggtgcagcatatttaataactgtgacaactcaagaattttaagcagactcgcctccttgtctgggatctgtcggcagtattgtgtctctactggcaagcccctcaatgtactgtttcagccaaaaccgtgctaatgatggtctaccaaatttttacttggtattttaaagtctcaatattctcaggatttagaaaatactttccctcatcctttcaaaagctgccactctgaaatacataggattttttttaaaaaagtctaaaattgctttacagccttgataaaacaaagactggtgtgttgatgtggctgcttttgtatgatttccgaggtgaatttagatgactggaagatagatgggtgccagatgcagtttgacatagattcaggcagctgctcctgggctaggtttcattagctggtaagtgctccagcagaagcagcagagcgaggccccaaatgccaaaatgacagtgagaacagtggaacaatacaatattcaccaagtgattttaatctcgaagattaaatgtcacccaatcagtttccaggtcttaaaaaaccaacttgcatgaaaccattagaaggcccaagtctttgttcaccagaagaaacaagttttactgtttttgaagggggagggtggttagttttaaaacaccaa

SEQ ID NO: 361020 - DNA, 256 bp, Homo sapiens
gggcttcatagggtgtctgtgctagaaactgattgcaggcagtatgtaggcatctttcattcagaatggacattaatatcttgaatagagaagaaagcttttagaaatgtatcatttgtcaaaattgcatgccttttaaaaaatgataaagagagatgctgagtgttttgtatgttagcatcgactctttctttttatttctgttcctttcaattcaaacgtgttattatgcttacaaaagggttatttaagcatg

SEQ ID NO: 361021 - DNA, 2456 bp, Homo sapiens
cgtgggagacgctatcgcaagatggcgtctgcgaggccgcgggatgcggagtgagcgcgccccgccgggggctgtgcgaggctgctgctgctctccccgtcgccgccgccgccgccgccagtgcggcgccgcctctccgccagccactgcgccgcggccaagcctcctgcctcgcaggtacctcctcccgcgcgcacgctccgcgcctgatggcagcgacaagtgccggctcgcggagagctagcggggctccctgggcccggtgcgcccgacaataacgcgtgaataactttttcttgcagcggtcccccgcgtcccggcctgcagcctccccgggcgccggcgcccccagcacgccccatcgggcaccccactctctccgaggtgtgggtgcggcgggctgatgaggtgatccctagcccgcctgggaggagcgcctggactcgcgggcggcggcgagcgcctttacaatggccctgaccctgtttgatacagatgaatatagacctcctgtttggaaatcttacttatatcagctacaacaggaagcccctcatcctcgaagaattacctgtacttgcgaggtggaaaacagaccaaagtattatggaagagagtttcatggcatgatctccagagaagcagccgaccagctcttgattgtggctgaggggagctacctcatccgggagagccagcggcagccagggacctacactttggctttaagatttggaagtcaaaccagaaacttcaggctctactacgatggcaagcactttgttggggagaaacgctttgagtccatccacgatctggtgactgatggcttgattactctctatattgaaaccaaggcagcagaatacattgccaagatgacgataaacccaatttatgagcacgtaggatacacaaccttaaacagagagccagcatacaaaaaacatatgccagtcctgaaagagacacatgatgagagagattctacaggccaggatggggtgtcagagaaaaggttgacatcacttgttagaagagcaactctgaaagaaaacgagcaaattccaaaatatgaaaagattcacaatttcaaggtgcatacattcagagggccacactggtgtgaatactgtgccaactttatgtggggtctcattgctcagggagtgaaatgtgcagattgtggtttgaatgttcataagcagtgttccaagatggtcccaaatgactgtaagccagacttgaagcatgtcaaaaaggtgtacagctgtgaccttacgacgctcgtgaaagcacataccactaagcggccaatggtggtagacatgtgcatcagggagattgagtctagaggtcttaattctgaaggactataccgagtatcaggatttagtgacctaattgaagatgtcaagatggctttcgacagagatggtgagaaggcagatatttctgtgaacatgtatgaagatatcaacattatcactggtgcacttaaactgtacttcagggatttgccaattccactcattacatatgatgcctaccctaagtttatagaatctgccaaaattatggatccggatgagcaattggaaacccttcatgaagcactgaaactactgccacctgctcactgcgaaaccctccggtacctcatggcacatctaaagagagtgaccctccacgaaaaggagaatcttatgaatgcagagaaccttggaatcgtctttggacccacccttatgagatctccagaactagacgccatggctgcattgaatgatatacggtatcagagactggtggtggagctgcttatcaaaaacgaagacattttattttaaatttttaatttgaggggaaaagaaatgttttacagatgaaggaatgttttatagtaatttaatttgctcctgtagctgcattatttcttgattagaggtttgggcatataaccagattaaagtgaaggaactttctgttgtttttgtagcaccgctcagctgtcttgtaaaacagtgaacacacgctttctggttctagtaatcctgggtgtttatcacgttcagagaaactcaagctattgcatgattagccccctatctggcaaggaaaccccatacagaagaaacaacaaacctgcgcctgcaccgcctctgcgtcctgggtagtctgtgcttgtaatccagcatgtttcacagagtaagcctgttgtgactttgcttttggggtctatgtcattggtttctgatgcttgtacaaacacgcacacacaaatggataaaacagcacctctggctgttacattaccataaaccatatcacatgcctacattttacaaatgatttctggtttctcttagttcttctctaacatagtactttctttccagcaaaagcaaaatgtgttttcagatttgttactttaataaaggttatccataccaata

SEQ ID NO: 361022 - DNA, 732 bp, Homo sapiens
gggcttcatagggtgtctgtgctagaaactgattgcaggcagtatgtaggcatctttcattcagaatggacattaatatcttgaatagagaagaaagcttttagaaatgtatcatttgtcaaaattgcatgccttttaaaaaatgataaagagagatgctgagtgttttgtatgttagcatcgactctttctttttatttctgttcagactcaagtttttagaagctagaatatagatccctttaagaaaaaaaaaggaagaaagaagaatttgctggttagtcgacctctgtttaagaagtgcttcatcctcctcctccacctctccgtggtgtttctctgcagctctctgtaggttagggttctgtgctgcctggcagaatgctcatgtgttagctgaatagatatcatcgacagacatagaccactataggttttctttccttgtgaattccaaaatgccatccaaagagtcttggtcagggaggaaaactaatagggctgcagttcacaaatcaaaacaagagggccgtcagcaagatttattgatagcagccttgggaatgaaactgggttctccaaagtcgtctgtgacaatctggcaacctctgaaactctttgcttattcgcagttgacatcacttgttagaagagcaactcttggtatctaaactgctttaaagatacttgggtgttttttttaagccttaaaaaatggaaagcttcttcctt

SEQ ID NO: 361023 - DNA, 712 bp, Homo sapiens
gggcttcatagggtgtctgtgctagaaactgattgcaggcagtatgtaggcatctttcattcagaatggacattaatatcttgaatagagaagaaagcttttagaaatgtatcatttgtcaaaattgcatgccttttaaaaaatgataaagagagatgctgagtgttttgtatgttagcatcgactctttctttttatttctgttcagactcaagtttttagaagctagaatatagatccctttaagaaaaaaaaaggaagaaagaagaatttgctggttagtcgacctctgtttaagaagtgcttcatcctcctcctccacctctccgtggtgtttctctgcagctctctgtaggttagggttctgtgctgcctggcagaatgctcatgtgttagctgaatagatatcatcgacagacatagaccactataggttttctttccttgtgaattccaaaatgccatccaaagagtcttggtcagggaggaaaactaatagggctgcagttcacaaatcaaaacaagagggccgtcagcaagatttattgatagcagccttgggaatgaaactgggttctccaaagtcgtctgtgacaatctggcaacctctgaaactctttgcttattcgcagttgacatcacttgttagaagagcaactcttcactatttttgttgtttgcttctatgtatatactacataagtatattaaa

SEQ ID NO: 361024 - DNA, 2700 bp, Homo sapiens
  misc_feature (2177)..(2177): n is a, c, g, or t
  misc_feature (2180)..(2180): n is a, c, g, or t
  misc_feature (2184)..(2184): n is a, c, g, or t
  misc_feature (2187)..(2187): n is a, c, g, or t
  misc_feature (2195)..(2195): n is a, c, g, or t
  misc_feature (2203)..(2205): n is a, c, g, or t
  misc_feature (2209)..(2209): n is a, c, g, or t
  misc_feature (2211)..(2211): n is a, c, g, or t
  misc_feature (2213)..(2213): n is a, c, g, or t
  misc_feature (2216)..(2216): n is a, c, g, or t
  misc_feature (2219)..(2219): n is a, c, g, or t
gggcttcatagggtgtctgtgctagaaactgattgcaggcagtatgtaggcatctttcattcagaatggacattaatatcttgaatagagaagaaagcttttagaaatgtatcatttgtcaaaattgcatgccttttaaaaaatgataaagagagatgctgagtgttttgtatgttagcatcgactctttctttttatttctgttcagactcaagtttttagaagctagaatatagatccctttaagaaaaaaaaaggaagaaagaagaatttgctggttagtcgacctctgtttaagaagtgcttcatcctcctcctccacctctccgtggtgtttctctgcagctctctgtaggttagggttctgtgctgcctggcagaatgctcatgtgttagctgaatagatatcatcgacagacatagaccactataggttttctttccttgtgaattccaaaatgccatccaaagagtcttggtcagggaggaaaactaatagggctgcagttcacaaatcaaaacaagagggccgtcagcaagatttattgatagcagccttgggaatgaaactgggttctccaaagtcgtctgtgacaatctggcaacctctgaaactctttgcttattcgcagttgacatcacttgttagaagagcaactctgaaagaaaacgagcaaattccaaaatatgaaaagattcacaatttcaaggtgcatacattcagagggccacactggtgtgaatactgtgccaactttatgtggggtctcattgctcagggagtgaaatgtgcagattgtggtttgaatgttcataagcagtgttccaagatggtcccaaatgactgtaagccagacttgaagcatgtcaaaaaggtgtacagctgtgaccttacgacgctcgtgaaagcacataccactaagcggccaatggtggtagacatgtgcatcagggagattgagtctagaggtcttaattctgaaggactataccgagtatcaggatttagtgacctaattgaagatgtcaagatggctttcgacagagatggtgagaaggcagatatttctgtgaacatgtatgaagatatcaacattatcactggtgcacttaaactgtacttcagggatttgccaattccactcattacatatgatgcctaccctaagtttatagaatctgccaaaattatggatccggatgagcaattggaaacccttcatgaagcactgaaactactgccacctgctcactgcgaaaccctccggtacctcatggcacatctaaagagagtgaccctccacgaaaaggagaatcttatgaatgcagagaaccttggaatcgtctttggacccacccttatgagatctccagaactagacgccatggctgcattgaatgatatacggtatcagagactggtggtggagctgcttatcaaaaacgaagacattttattttaaatttttaatttgaggggaaaagaaatgttttacagatgaaggaatgttttatagtaatttaatttgctcctgtagctgcattatttcttgattagaggtttgggcatataaccagattaaagtgaaggaactttctgttgtttttgtagcaccgctcagctgtcttgtaaaacagtgaacacacgctttctggttctagtaatcctgggtgtttatcacgttcagagaaactcaagctattgcatgattagccccctatctggcaaggaaaccccatacagaagaaacaacaaacctgcgcctgcaccgcctctgcgtcctgggtagtctgtgcttgtaatccagcatgtttcacagagtaagcctgttgtgactttgcttttggggtctatgtcattggtttctgatgcttgtacaaacacgcacacacaaatggataaaacagcacctctggctgttacattaccataaaccatatcacatgcctacattttacaaatgatttctggtttctcttagttcttctctaacatagtactttctttccagcaaaagcaaaatgtgttttcagatttgttactttaataaaggttatccataccaataaaaagtgtacaacacagcattttctgttaaattattattggttttcagttgtaatttggtattttttctggcatgcgtttattaatttattaaattggcttttagcanaanaaanaanaaaaaaanaaaaaaannnaaanananaanaanaaaaaaaaaaaaaggggggggggcgccaacaaatgaatccccgaggggggacccacacatattgagcgggcgacacacaagtatttgttgagcaccaagggggggcaccacaataggaggggacgctatataaacacacgagagcagcagagcgcaggtgtattacaaaaagcgctgcacgacggcgcaacaaaacgcgtcaccaccgggcacacccccgtggagaagacggcccacccaacacctgggggggggggagcggaacacaatagtggggggaacagaactactactcacacaacaggaatatataagaagccctcagtggaggagaacatttcaaagacaattcagagcggctgctaaaagtgatgctgaaaaaaagcaagaaacataattatgacgtgcgagtagtaaaaaaaattagctaacacgaagcgagaattattagttgtggaagaaactatatttaccccgaggg

SEQ ID NO: 361025 - DNA, 2652 bp, Homo sapiens
cgtgggagacgctatcgcaagatggcgtctgcgaggccgcgggatgcggagtgagcgcgccccgccgggggctgtgcgaggctgctgctgctctccccgtcgccgccgccgccgccgccagtgcggcgccgcctctccgccagccactgcgccgcggccaagcctcctgcctcgcaggtacctcctcccgcgcgcacgctccgcgcctgatggcagcgacaagtgccggctcgcggagagctagcggggctccctgggcccggtgcgcccgacaataacgcgtgaataactttttcttgcagcggtcccccgcgtcccggcctgcagcctccccgggcgccggcgcccccagcacgccccatcgggcaccccactctctccgaggtgtgggtgcggcgggctgatgaggtgatccctagcccgcctgggaggagcgcctggactcgcgggcggcggcgagcgcctttacaatggccctgaccctgtttgatacagatgaatatagacctcctgtttggaaatcttacttatatcagctacaacaggaagcccctcatcctcgaagaattacctgtacttgcgaggtggaaaacagaccaaagtattatggaagagagtttcatggcatgatctccagagaagcagccgaccagctcttgattgtggctgaggggagctacctcatccgggagagccagcggcagccagggacctacactttggctttaagatttggaagtcaaaccagaaacttcaggctctactacgatggcaagcactttgttggggagaaacgctttgagtccatccacgatctggtgactgatggcttgattactctctatattgaaaccaaggcagcagaatacattgccaagatgacgataaacccaatttatgagcacgtaggatacacaaccttaaacagagagccagcatacaaaaaacatatgccagtcctgaaagagacacatgatgagagagattctacaggccaggatggggtgtcagagaaaaggttgacatcacttgttagaagagcaactctgaaagaaaacgagcaaattccaaaatatgaaaagattcacaatttcaaggtgcatacattcagagggccacactggtgtgaatactgtgccaactttatgtggggtctcattgctcagggagtgaaatgtgcagattgtggtttgaatgttcataagcagtgttccaagatggtcccaaatgactgtaagccagacttgaagcatgtcaaaaaggtgtacagctgtgaccttacgacgctcgtgaaagcacataccactaagcggccaatggtggtagacatgtgcatcagggagattgagtctagaggtcttaattctgaaggactataccgagtatcaggatttagtgacctaattgaagatgtcaagatggctttcgacagagatggtgagaaggcagatatttctgtgaacatgtatgaagatatcaacattatcactggtgcacttaaactgtacttcagggatttgccaattccactcattacatatgatgcctaccctaagtttatagaatctgccaaaattatggatccggatgagcaattggaaacccttcatgaagcactgaaactactgccacctgctcactgcgaaaccctccggtacctcatggcacatctaaagagagtgaccctccacgaaaaggagaatcttatgaatgcagagaaccttggaatcgtctttggacccacccttatgagatctccagaactagacgccatggctgcattgaatgatatacggtatcagagactggtggtggagctgcttatcaaaaacgaagacattttattttaaatttttaatttgaggggaaaagaaatgttttacagatgaaggaatgttttatagtaatttaatttgctcctgtagctgcattatttcttgattagaggtttgggcatataaccagattaaagtgaaggaactttctgttgtttttgtagcaccgctcagctgtcttgtaaaacagtgaacacacgctttctggttctagtaatcctgggtgtttatcacgttcagagaaactcaagctattgcatgattagccccctatctggcaaggaaaccccatacagaagaaacaacaaacctgcgcctgcaccgcctctgcgtcctgggtagtctgtgcttgtaatccagcatgtttcacagagtaagcctgttgtgactttgcttttggggtctatgtcattggtttctgatgcttgtacaaacacgcacacacaaatggataaaacagcacctctggctgttacattaccataaaccatatcacatgcctacattttacaaatgatttctggtttctcttagttcttctctaacatagtactttctttccagcaaaagcaaaatgtgttttcagatttgttactttaataaaggttatccataccaataaaaagtgtacaacacagcattttctgttaaattattattggttttcagttgtaatttggtattttttctggcatgcgtttattaatttattaaattggcttttagaaataaaaaatattgatagcttacttttttctcataagaatattcgggaaaatgtgtttggccatttattaaatactgagtacttcttctg

SEQ ID NO: 361026 - DNA, 2127 bp, Homo sapiens
gggcttcatagggtgtctgtgctagaaactgattgcaggcagtatgtaggcatctttcattcagaatggacattaatatcttgaatagagaagaaagcttttagaaatgtatcatttgtcaaaattgcatgccttttaaaaaatgataaagagagatgctgagtgttttgtatgttagcatcgactctttctttttatttctgttcagactcaagtttttagaagctagaatatagatccctttaagaaaaaaaaaggaagaaagaagaatttgctggttagtcgacctctgtttaagaagtgcttcatcctcctcctccacctctccgtggtgtttctctgcagctctctgtaggttagggttctgtgctgcctggcagaatgctcatgtgttagctgaatagatatcatcgacagacatagaccactataggttttctttccttgtgaattccaaaatgccatccaaagagtcttggtcagggaggaaaactaatagggctgcagttcacaaatcaaaacaagagggccgtcagcaagatttattgatagcagccttgggaatgaaactgggttctccaaagtcgtctgtgacaatctggcaacctctgaaactctttgcttattcgcagttgacatcacttgttagaagagcaactctgaaagaaaacgagcaaattccaaaatatgaaaagattcacaatttcaaggtgcatacattcagagggccacactggtgtgaatactgtgccaactttatgtggggtctcattgctcagggagtgaaatgtgcagattgtggtttgaatgttcataagcagtgttccaagatggtcccaaatgactgtaagccagacttgaagcatgtcaaaaaggtgtacagctgtgaccttacgacgctcgtgaaagcacataccactaagcggccaatggtggtagacatgtgcatcagggagattgagtctagaggtcttaattctgaaggactataccgagtatcaggatttagtgacctaattgaagatgtcaagatggctttcgacagagaaattatggatccggatgagcaattggaaacccttcatgaagcactgaaactactgccacctgctcactgcgaaaccctccggtacctcatggcacatctaaagagagtgaccctccacgaaaaggagaatcttatgaatgcagagaaccttggaatcgtctttggacccacccttatgagatctccagaactagacgccatggctgcattgaatgatatacggtatcagagactggtggtggagctgcttatcaaaaacgaagacattttattttaaatttttaatttgaggggaaaagaaatgttttacagatgaaggaatgttttatagtaatttaatttgctcctgtagctgcattatttcttgattagaggtttgggcatataaccagattaaagtgaaggaactttctgttgtttttgtagcaccgctcagctgtcttgtaaaacagtgaacacacgctttctggttctagtaatcctgggtgtttatcacgttcagagaaactcaagctattgcatgattagccccctatctggcaaggaaaccccatacagaagaaacaacaaacctgcgcctgcaccgcctctgcgtcctgggtagtctgtgcttgtaatccagcatgtttcacagagtaagcctgttgtgactttgcttttggggtctatgtcattggtttctgatgcttgtacaaacacgcacacacaaatggataaaacagcacctctggctgttacattaccataaaccatatcacatgcctacattttacaaatgatttctggtttctcttagttcttctctaacatagtactttctttccagcaaaagcaaaatgtgttttcagatttgttactttaataaaggttatccataccaataaaaagtgtacaacacagcattttctgttaaattattattggttttcagttgtaatttggtattttttctggcatgcgtttattaatttattaaattggcttttagaaataaaaaatattgatagcttacttttttctcataagaatattcgggaaaatgtgtttggccatttattaaatactgagtacttcttctg

SEQ ID NO: 361027 - DNA, 2254 bp, Homo sapiens
acaaggaaagaaaacctatagtggtctatgtctgtcgatgatatctattcagctaacacatgagcattctgccaggcagcacagaaccctaacctacagagagctgcagagaaacaccacggagaggtggaggaggaggatgaagcacttcttaaacagaggtcgactaaccagcaaattcttctttcttcctttttttttcttaaagggatctatattctagcttctaaaaacttgagtctgaacagaaataaaaagaaagagtcgatgctaacatacaaaacactcagcatctctctttatcattttttaaaaggcatgcaattttgacaaatgatacatttctaaaagctttcttctctattcaagatattaatgtccattctgaatgaaagatgcctacatactgcctgcaatcagtttctagcaacagacaccctatgaagcccctagcagggaaggtggggggaagggaggaaaactaatagggctgcagttcacaaatcaaaacaagagggccgtcagcaagatttattgatagcagccttgggaatgaaactgggttctccaaagtcgtctgtgacaatctggcaacctctgaaactctttgcttattcgcagttgacatcacttgttagaagagcaactctgaaagaaaacgagcaaattccaaaatatgaaaagattcacaatttcaaggtgcatacattcagagggccacactggtgtgaatactgtgccaactttatgtggggtctcattgctcagggagtgaaatgtgcagattgtggtttgaatgttcataagcagtgttccaagatggtcccaaatgactgtaagccagacttgaagcatgtcaaaaaggtgtacagctgtgaccttacgacgctcgtgaaagcacataccactaagcggccaatggtggtagacatgtgcatcagggagattgagtctagaggtcttaattctgaaggactataccgagtatcaggatttagtgacctaattgaagatgtcaagatggctttcgacagagatggtgagaaggcagatatttctgtgaacatgtatgaagatatcaacattatcactggtgcacttaaactgtacttcagggatttgccaattccactcattacatatgatgcctaccctaagtttatagaatctgccaaaattatggatccggatgagcaattggaaacccttcatgaagcactgaaactactgccacctgctcactgcgaaaccctccggtacctcatggcacatctaaagagagtgaccctccacgaaaaggagaatcttatgaatgcagagaaccttggaatcgtctttggacccacccttatgagatctccagaactagacgccatggctgcattgaatgatatacggtatcagagactggtggtggagctgcttatcaaaaacgaagacattttattttaaatttttaatttgaggggaaaagaaatgttttacagatgaaggaatgttttatagtaatttaatttgctcctgtagctgcattatttcttgattagaggtttgggcatataaccagattaaagtgaaggaactttctgttgtttttgtagcaccgctcagctgtcttgtaaaacagtgaacacacgctttctggttctagtaatcctgggtgtttatcacgttcagagaaactcaagctattgcatgattagccccctatctggcaaggaaaccccatacagaagaaacaacaaacctgcgcctgcaccgcctctgcgtcctgggtagtctgtgcttgtaatccagcatgtttcacagagtaagcctgttgtgactttgcttttggggtctatgtcattggtttctgatgcttgtacaaacacgcacacacaaatggataaaacagcacctctggctgttacattaccataaaccatatcacatgcctacattttacaaatgatttctggtttctcttagttcttctctaacatagtactttctttccagcaaaagcaaaatgtgttttcagatttgttactttaataaaggttatccataccaataaaaagtgtacaacacagcattttctgttaaattattattggttttcagttgtaatttggtattttttctggcatgcgtttattaatttattaaattggcttttagaaataaaaaatattgatagcttacttttttctcataagaatattcgggaaaatgtgtttggccatttattaaatactgagtacttcttctg

SEQ ID NO: 361028 - DNA, 1875 bp, Homo sapiens
gggcttcatagggtgtctgtgctagaaactgattgcaggcagtatgtaggcatctttcattcagaatggacattaatatcttgaatagagaagaaagcttttagaaatgtatcatttgtcaaaattgcatgccttttaaaaaatgataaagagagatgctgagtgttttgtatgttagcatcgactctttctttttatttctgttcagactcaagtttttagaagctagaatatagatccctttaagaaaaaaaaaggaagaaagaagaatttgctggttagtcgacctctgtttaagaagtgcttcatcctcctcctccacctctccgtggtgtttctctgcagctctctgtaggttagggttctgtgctgcctggcagaatgctcatgtgttagctgaatagatatcatcgacagacatagaccactataggttttctttccttgtgaattccaaaatgccatccaaagagtcttggtcagggaggaaaactaatagggctgcagttcacaaatcaaaacaagagggccgtcagcaagatttattgatagcagccttgggaatgaaactgggttctccaaagtcgtctgtgacaatctggcaacctctgaaactctttgcttattcgcagttgacatcacttgttagaagagcaactctgaaagaaaacgagcaaattccaaaatatgaaaagattcacaatttcaaggtgcatacattcagagggccacactggtgtgaatactgtgccaactttatgtggggtctcattgctcagggagtgaaatgtgcagaaattatggatccggatgagcaattggaaacccttcatgaagcactgaaactactgccacctgctcactgcgaaaccctccggtacctcatggcacatctaaagagagtgaccctccacgaaaaggagaatcttatgaatgcagagaaccttggaatcgtctttggacccacccttatgagatctccagaactagacgccatggctgcattgaatgatatacggtatcagagactggtggtggagctgcttatcaaaaacgaagacattttattttaaatttttaatttgaggggaaaagaaatgttttacagatgaaggaatgttttatagtaatttaatttgctcctgtagctgcattatttcttgattagaggtttgggcatataaccagattaaagtgaaggaactttctgttgtttttgtagcaccgctcagctgtcttgtaaaacagtgaacacacgctttctggttctagtaatcctgggtgtttatcacgttcagagaaactcaagctattgcatgattagccccctatctggcaaggaaaccccatacagaagaaacaacaaacctgcgcctgcaccgcctctgcgtcctgggtagtctgtgcttgtaatccagcatgtttcacagagtaagcctgttgtgactttgcttttggggtctatgtcattggtttctgatgcttgtacaaacacgcacacacaaatggataaaacagcacctctggctgttacattaccataaaccatatcacatgcctacattttacaaatgatttctggtttctcttagttcttctctaacatagtactttctttccagcaaaagcaaaatgtgttttcagatttgttactttaataaaggttatccataccaataaaaagtgtacaacacagcattttctgttaaattattattggttttcagttgtaatttggtattttttctggcatgcgtttattaatttattaaattggcttttagaaataaaaaatattgatagcttacttttttctcataagaatattcgggaaaatgtgtttggccatttattaaatactgagtacttcttctg

SEQ ID NO: 361029 - DNA, 1910 bp, Homo sapiens
gggcttcatagggtgtctgtgctagaaactgattgcaggcagtatgtaggcatctttcattcagaatggacattaatatcttgaatagagaagaaagcttttagaaatgtatcatttgtcaaaattgcatgccttttaaaaaatgataaagagagatgctgagtgttttgtatgttagcatcgactctttctttttatttctgttcagactcaagtttttagaagctagaatatagatccctttaagaaaaaaaaaggaagaaagaagaatttgctgttgacatcacttgttagaagagcaactctgaaagaaaacgagcaaattccaaaatatgaaaagattcacaatttcaaggtgcatacattcagagggccacactggtgtgaatactgtgccaactttatgtggggtctcattgctcagggagtgaaatgtgcagattgtggtttgaatgttcataagcagtgttccaagatggtcccaaatgactgtaagccagacttgaagcatgtcaaaaaggtgtacagctgtgaccttacgacgctcgtgaaagcacataccactaagcggccaatggtggtagacatgtgcatcagggagattgagtctagaggtcttaattctgaaggactataccgagtatcaggatttagtgacctaattgaagatgtcaagatggctttcgacagagatggtgagaaggcagatatttctgtgaacatgtatgaagatatcaacattatcactggtgcacttaaactgtacttcagggatttgccaattccactcattacatatgatgcctaccctaagtttatagaatctgccaaaattatggatccggatgagcaattggaaacccttcatgaagcactgaaactactgccacctgctcactgcgaaaccctccggtacctcatggcacatctaaagagagtgaccctccacgaaaaggagaatcttatgaatgcagagaaccttggaatcgtctttggacccacccttatgagatctccagaactagacgccatggctgcattgaatgatatacggtatcagagactggtggtggagctgcttatcaaaaacgaagacattttattttaaatttttaatttgaggggaaaagaaatgttttacagatgaaggaatgttttatagtaatttaatttgctcctgtagctgcattatttcttgattagaggtttgggcatataaccagattaaagtgaaggaactttctgttgtttttgtagcaccgctcagctgtcttgtaaaacagtgaacacacgctttctggttctagtaatcctgggtgtttatcacgttcagagaaactcaagctattgcatgattagccccctatctggcaaggaaaccccatacagaagaaacaacaaacctgcgcctgcaccgcctctgcgtcctgggtagtctgtgcttgtaatccagcatgtttcacagagtaagcctgttgtgactttgcttttggggtctatgtcattggtttctgatgcttgtacaaacacgcacacacaaatggataaaacagcacctctggctgttacattaccataaaccatatcacatgcctacattttacaaatgatttctggtttctcttagttcttctctaacatagtactttctttccagcaaaagcaaaatgtgttttcagatttgttactttaataaaggttatccataccaataaaaagtgtacaacacagcattttctgttaaattattattggttttcagttgtaatttggtattttttctggcatgcgtttattaatttattaaattggcttttagaaataaaaaatattgatagcttacttttttctcataagaatattcgggaaaatgtgtttggccatttattaaatactgagtacttcttctg

SEQ ID NO: 361030 - DNA, 1776 bp, Homo sapiens
gggggtgtgtggggtagttgtattatgttgcttattctctgccgcatcagtatttattgatagcagccttgggaatgaaactgggttctccaaagtcgtctgtgacaatctggcaacctctgaaactctttgcttattcgcagttgacatcacttgttagaagagcaactctgaaagaaaacgagcaaattccaaaatatgaaaagattcacaatttcaaggtgcatacattcagagggccacactggtgtgaatactgtgccaactttatgtggggtctcattgctcagggagtgaaatgtgcagattgtggtttgaatgttcataagcagtgttccaagatggtcccaaatgactgtaagccagacttgaagcatgtcaaaaaggtgtacagctgtgaccttacgacgctcgtgaaagcacataccactaagcggccaatggtggtagacatgtgcatcagggagattgagtctagaggtcttaattctgaaggactataccgagtatcaggatttagtgacctaattgaagatgtcaagatggctttcgacagagatggtgagaaggcagatatttctgtgaacatgtatgaagatatcaacattatcactggtgcacttaaactgtacttcagggatttgccaattccactcattacatatgatgcctaccctaagtttatagaatctgccaaaattatggatccggatgagcaattggaaacccttcatgaagcactgaaactactgccacctgctcactgcgaaaccctccggtacctcatggcacatctaaagagagtgaccctccacgaaaaggagaatcttatgaatgcagagaaccttggaatcgtctttggacccacccttatgagatctccagaactagacgccatggctgcattgaatgatatacggtatcagagactggtggtggagctgcttatcaaaaacgaagacattttattttaaatttttaatttgaggggaaaagaaatgttttacagatgaaggaatgttttatagtaatttaatttgctcctgtagctgcattatttcttgattagaggtttgggcatataaccagattaaagtgaaggaactttctgttgtttttgtagcaccgctcagctgtcttgtaaaacagtgaacacacgctttctggttctagtaatcctgggtgtttatcacgttcagagaaactcaagctattgcatgattagccccctatctggcaaggaaaccccatacagaagaaacaacaaacctgcgcctgcaccgcctctgcgtcctgggtagtctgtgcttgtaatccagcatgtttcacagagtaagcctgttgtgactttgcttttggggtctatgtcattggtttctgatgcttgtacaaacacgcacacacaaatggataaaacagcacctctggctgttacattaccataaaccatatcacatgcctacattttacaaatgatttctggtttctcttagttcttctctaacatagtactttctttccagcaaaagcaaaatgtgttttcagatttgttactttaataaaggttatccataccaataaaaagtgtacaacacagcattttctgttaaattattattggttttcagttgtaatttggtattttttctggcatgcgtttattaatttattaaattggcttttagaaataaaaaatattgatagcttacttttttctcataagaatattcgggaaaatgtgtttggccatttattaaatactgagtacttcttctg

SEQ ID NO: 361031 - DNA, 2340 bp, Homo sapiens
cgtgggagacgctatcgcaagatggcgtctgcgaggccgcgggatgcggagtgagcgcgccccgccgggggctgtgcgaggctgctgctgctctccccgtcgccgccgccgccgccgccagtgcggcgccgcctctccgccagccactgcgccgcggccaagcctcctgcctcgcagatacagatgaatatagacctcctgtttggaaatcttacttatatcagctacaacaggaagcccctcatcctcgaagaattacctgtacttgcgaggtggaaaacagaccaaagtattatggaagagagtttcatggcatgatctccagagaagcagccgaccagctcttgattgtggctgaggggagctacctcatccgggagagccagcggcagccagggacctacactttggctttaagatttggaagtcaaaccagaaacttcaggctctactacgatggcaagcactttgttggggagaaacgctttgagtccatccacgatctggtgactgatggcttgattactctctatattgaaaccaaggcagcagaatacattgccaagatgacgataaacccaatttatgagcacgtaggatacacaaccttaaacagagagccagcatacaaaaaacatatgccagtcctgaaagagacacatgatgagagagattctacaggccaggatggggtgtcagagaaaaggttgacatcacttgttagaagagcaactctgaaagaaaacgagcaaattccaaaatatgaaaagattcacaatttcaaggtgcatacattcagagggccacactggtgtgaatactgtgccaactttatgtggggtctcattgctcagggagtgaaatgtgcagattgtggtttgaatgttcataagcagtgttccaagatggtcccaaatgactgtaagccagacttgaagcatgtcaaaaaggtgtacagctgtgaccttacgacgctcgtgaaagcacataccactaagcggccaatggtggtagacatgtgcatcagggagattgagtctagaggtcttaattctgaaggactataccgagtatcaggatttagtgacctaattgaagatgtcaagatggctttcgacagagatggtgagaaggcagatatttctgtgaacatgtatgaagatatcaacattatcactggtgcacttaaactgtacttcagggatttgccaattccactcattacatatgatgcctaccctaagtttatagaatctgccaaaattatggatccggatgagcaattggaaacccttcatgaagcactgaaactactgccacctgctcactgcgaaaccctccggtacctcatggcacatctaaagagagtgaccctccacgaaaaggagaatcttatgaatgcagagaaccttggaatcgtctttggacccacccttatgagatctccagaactagacgccatggctgcattgaatgatatacggtatcagagactggtggtggagctgcttatcaaaaacgaagacattttattttaaatttttaatttgaggggaaaagaaatgttttacagatgaaggaatgttttatagtaatttaatttgctcctgtagctgcattatttcttgattagaggtttgggcatataaccagattaaagtgaaggaactttctgttgtttttgtagcaccgctcagctgtcttgtaaaacagtgaacacacgctttctggttctagtaatcctgggtgtttatcacgttcagagaaactcaagctattgcatgattagccccctatctggcaaggaaaccccatacagaagaaacaacaaacctgcgcctgcaccgcctctgcgtcctgggtagtctgtgcttgtaatccagcatgtttcacagagtaagcctgttgtgactttgcttttggggtctatgtcattggtttctgatgcttgtacaaacacgcacacacaaatggataaaacagcacctctggctgttacattaccataaaccatatcacatgcctacattttacaaatgatttctggtttctcttagttcttctctaacatagtactttctttccagcaaaagcaaaatgtgttttcagatttgttactttaataaaggttatccataccaataaaaagtgtacaacacagcattttctgttaaattattattggttttcagttgtaatttggtattttttctggcatgcgtttattaatttattaaattggcttttagaaataaaaaatattgatagcttacttttttctcataagaatattcgggaaaatgtgtttggccatttattaaatactgagtacttcttctg

SEQ ID NO: 361032 - DNA, 2285 bp, Homo sapiens
cgtgggagacgctatcgcaagatggcgtctgcgaggccgcgggatgcggagtgagcgcgccccgccgggggctgtgcgaggctgctgctgctctccccgtcgccgccgccgccgccgccagtgcggcgccgcctctccgccagccactgcgccgcggccaagcctcctgcctcgcaggtacctcctcccgcgcgcacgctccgcgcctgatggcagcgacaagtgccggctcgcggagagctagcggggctccctgggcccggtgcgcccgacaataacgcgtgaataactttttcttgcagcggtcccccgcgtcccggcctgcagcctccccgggcgccggcgcccccagcacgccccatcgggcaccccactctctccgaggtgtgggtgcggcgggctgatgaggtgatccctagcccgcctgggaggagcgcctggactcgcgggcggcggcgagcgcctttacaatggccctgaccctgtttgatacagatgaatatagacctcctgtttggaaatcttacttatatcagctacaacaggaagcccctcatcctcgaagaattacctgtacttgcgaggtggaaaacagaccaaagtattatggaagagagtttcatggcatgatctccagagaagcagccgaccagctcttgattgtggctgaggggagctacctcatccgggagagccagcggcagccagggacctacactttggctttaaggtgcatacattcagagggccacactggtgtgaatactgtgccaactttatgtggggtctcattgctcagggagtgaaatgtgcagattgtggtttgaatgttcataagcagtgttccaagatggtcccaaatgactgtaagccagacttgaagcatgtcaaaaaggtgtacagctgtgaccttacgacgctcgtgaaagcacataccactaagcggccaatggtggtagacatgtgcatcagggagattgagtctagaggtcttaattctgaaggactataccgagtatcaggatttagtgacctaattgaagatgtcaagatggctttcgacagagatggtgagaaggcagatatttctgtgaacatgtatgaagatatcaacattatcactggtgcacttaaactgtacttcagggatttgccaattccactcattacatatgatgcctaccctaagtttatagaatctgccaaaattatggatccggatgagcaattggaaacccttcatgaagcactgaaactactgccacctgctcactgcgaaaccctccggtacctcatggcacatctaaagagagtgaccctccacgaaaaggagaatcttatgaatgcagagaaccttggaatcgtctttggacccacccttatgagatctccagaactagacgccatggctgcattgaatgatatacggtatcagagactggtggtggagctgcttatcaaaaacgaagacattttattttaaatttttaatttgaggggaaaagaaatgttttacagatgaaggaatgttttatagtaatttaatttgctcctgtagctgcattatttcttgattagaggtttgggcatataaccagattaaagtgaaggaactttctgttgtttttgtagcaccgctcagctgtcttgtaaaacagtgaacacacgctttctggttctagtaatcctgggtgtttatcacgttcagagaaactcaagctattgcatgattagccccctatctggcaaggaaaccccatacagaagaaacaacaaacctgcgcctgcaccgcctctgcgtcctgggtagtctgtgcttgtaatccagcatgtttcacagagtaagcctgttgtgactttgcttttggggtctatgtcattggtttctgatgcttgtacaaacacgcacacacaaatggataaaacagcacctctggctgttacattaccataaaccatatcacatgcctacattttacaaatgatttctggtttctcttagttcttctctaacatagtactttctttccagcaaaagcaaaatgtgttttcagatttgttactttaataaaggttatccataccaataaaaagtgtacaacacagcattttctgttaaattattattggttttcagttgtaatttggtattttttctggcatgcgtttattaatttattaaattggcttttagaaataaaaaatattgatagcttacttttttctcataagaatattcgggaaaatgtgtttggccatttattaaatactgagtacttcttctg

SEQ ID NO: 361033 - DNA, 874 bp, Homo sapiens
gggcttcatagggtgtctgtgctagaaactgattgcaggcagtatgtaggcatctttcattcagaatggacattaatatcttgaatagagaagaaagcttttagaaatgtatcatttgtcaaaattgcatgccttttaaaaaatgataaagagagatgctgagtgttttgtatgttagcatcgactctttctttttatttctgttcagactcaagtttttagaagctagaatatagatccctttaagaaaaaaaaaggaagaaagaagaatttgctggttagtcgacctctgtttaagaagtgcttcatcctcctcctccacctctccgtggtgtttctctgcagctctctgtaggttagggttctgtgctgcctggcagaatgctcatgtgttagctgaatagatatcatcgacagacatagaccactataggttttctttccttgtgaattccaaaatgccatccaaagagtcttggtcagggaggaaaactaatagggctgcagttcacaaatcaaaacaagagggccgtcagcaagatttattgatagcagccttgggaatgaaactgggttctccaaagtcgtctgtgacaatctggcaacctctgaaactctttgcttattcgcagttgacatcacttgttagaagagcaactctgaaagaaaacgagcaaattccaaaatatgaaaagattcacaatttcaaggtgcatacattcagagggccacactggtgtgaatactgtgccaactttatgtggggtctcattgctcagggagtgaaatgtgcagattgtggtttgaatgttcataagcagtgttggaggaagcggagggattgatcttgctgtctcatggggtgtgcttcaca

SEQ ID NO: 361034 - DNA, 1197 bp, Homo sapiens
gggcttcatagggtgtctgtgctagaaactgattgcaggcagtatgtaggcatctttcattcagaatggacattaatatcttgaatagagaagaaagcttttagaaatgtatcatttgtcaaaattgcatgccttttaaaaaatgataaagagagatgctgagtgttttgtatgttagcatcgactctttctttttatttctgttcagactcaagtttttagaagctagaatatagatccctttaagaaaaaaaaaggaagaaagaagaatttgctggttagtcgacctctgtttaagaagtgcttcatcctcctcctccacctctccgtggtgtttctctgcagctctctgtaggttagggttctgtgctgcctggcagaatgctcatgtgttagctgaatagatatcatcgacagacatagaccactataggttttctttccttgtgaattccaaaatgccatccaaagagtcttggtcagggaggaaaactaatagggctgcagttcacaaatcaaaacaagagggccgtcagcaagatttattgatagcagccttgggaatgaaactgggttctccaaagtcgtctgtgacaatctggcaacctctgaaactctttgcttattcgcagttgacatcacttgttagaagagcaactctgaaagaaaacgagcaaattccaaaatatgaaaagattcacaatttcaagaactacctttgtttggagcttcacctcttgcatgtgacacaaccctgatctctgcttgtgctctgcctggtacacatgcccttgttcttaaaaagaagtccatctctagggggtgtgctaatttgctttgatggttgctgttacagctcattactccgcaattgtattacttcagtgtgtttttcttaatctgttaccatgaatatatttactatttgatggaacagttgagagacttttactgcaagtgtcagaaaacccagcccacactggactaagaaaaaagggaatttgttgtgtcacatagtagaaaaagtccagcattaattgaaggtatcctttgacttaggggcttaaaatgccaccagaaccctgtttcccaactctttcttcatttttaggctccctctggtgacaagatgactgtcaaagtcttcagctctgtatcctcccagattctagtcagcctcaaagacagactgtttga

SEQ ID NO: 361035 - DNA, 1022 bp, Homo sapiens
cgtgggagacgctatcgcaagatggcgtctgcgaggccgcgggatgcggagtgagcgcgccccgccgggggctgtgcgaggctgctgctgctctccccgtcgccgccgccgccgccgccagtgcggcgccgcctctccgccagccactgcgccgcggccaagcctcctgcctcgcaggtacctcctcccgcgcgcacgctccgcgcctgatggcagcgacaagtgccggctcgcggagagctagcggggctccctgggcccggtgcgcccgacaataacgcgtgaataactttttcttgcagcggtcccccgcgtcccggcctgcagcctccccgggcgccggcgcccccagcacgccccatcgggcaccccactctctccgaggtgtgggtgcggcgggctgatgaggtgatccctagcccgcctgggaggagcgcctggactcgcgggcggcggcgagcgcctttacaatggccctgaccctgtttgatacagatgaatatagacctcctgtttggaaatcttacttatatcagctacaacaggaagcccctcatcctcgaagaattacctgtacttgcgagaaaacagtgaacacacgctttctggttctagtaatcctgggtgtttatcacgttcagagaaactcaagctattgcatgattagccccctatctggcaaggaaaccccatacagaagaaacaacaaacctgcgcctgcaccgcctctgcgtcctgggtagtctgtgcttgtaatccagcatgtttcacagagtaagcctgttgtgactttgcttttggggtctatgtcattggtttctgatgcttgtacaaacacgcacacacaaatggataaaacagcacctctggctgttacattaccataaaccatatcacatgcctacattttacaaatgatttctggtttctcttagttcttctctaacatagtactttctttccagcaaaagcaaaatgtgttttcagatttgttactttaataaaggttatccataccaata

SEQ ID NO: 361036 - DNA, 288 bp, Homo sapiens
catgatctccagagaagcagccgaccagctcttgattgtggctgaggggagctacctcatccgggagagccagcggcagccagggacctacactttggctttaaggttggtcatgggcctgcaattactactgtgctttatttaaaactctcttaatatagggctttaaattttaaaagcattcagcatgtaattgaattggttcttgttttcttgggatctaattaccattttaatagctttgagaccctttaaaaattcctcgtgaatggtaacactcagtaatta

SEQ ID NO: 361037 - DNA, 2265 bp, Homo sapiens
gggcttcatagggtgtctgtgctagaaactgattgcaggcagtatgtaggcatctttcattcagaatggacattaatatcttgaatagagaagaaagcttttagaaatgtatcatttgtcaaaattgcatgccttttaaaaaatgataaagagagatgctgagtgttttgtatgttagcatcgactctttctttttatttctgttcagactcaagtttttagaagctagaatatagatccctttaagaaaaaaaaaggaagaaagaagaatttgctggttagtcgacctctgtttaagaagtgcttcatcctcctcctccacctctccgtggtgtttctctgcagctctctgtaggttagggttctgtgctgcctggcagaatgctcatgtgttagctgaatagatatcatcgacagacatagaccactataggttttctttccttgtgaattccaaaatgccatccaaagagtcttggtcagggaggaaaactaatagggctgcagttcacaaatcaaaacaagagggccgtcagcaagatttattgatagcagccttgggaatgaaactgggttctccaaagtcgtctgtgacaatctggcaacctctgaaactctttgcttattcgcagttgacatcacttgttagaagagcaactctgaaagaaaacgagcaaattccaaaatatgaaaagattcacaatttcaaggtgcatacattcagagggccacactggtgtgaatactgtgccaactttatgtggggtctcattgctcagggagtgaaatgtgcagattgtggtttgaatgttcataagcagtgttccaagatggtcccaaatgactgtaagccagacttgaagcatgtcaaaaaggtgtacagctgtgaccttacgacgctcgtgaaagcacataccactaagcggccaatggtggtagacatgtgcatcagggagattgagtctagaggtcttaattctgaaggactataccgagtatcaggatttagtgacctaattgaagatgtcaagatggctttcgacagagatggtgagaaggcagatatttctgtgaacatgtatgaagatatcaacattatcactggtgcacttaaactgtacttcagggatttgccaattccactcattacatatgatgcctaccctaagtttatagaatctgccaaaattatggatccggatgagcaattggaaacccttcatgaagcactgaaactactgccacctgctcactgcgaaaccctccggtacctcatggcacatctaaagagagtgaccctccacgaaaaggagaatcttatgaatgcagagaaccttggaatcgtctttggacccacccttatgagatctccagaactagacgccatggctgcattgaatgatatacggtatcagagactggtggtggagctgcttatcaaaaacgaagacattttattttaaatttttaatttgaggggaaaagaaatgttttacagatgaaggaatgttttatagtaatttaatttgctcctgtagctgcattatttcttgattagaggtttgggcatataaccagattaaagtgaaggaactttctgttgtttttgtagcaccgctcagctgtcttgtaaaacagtgaacacacgctttctggttctagtaatcctgggtgtttatcacgttcagagaaactcaagctattgcatgattagccccctatctggcaaggaaaccccatacagaagaaacaacaaacctgcgcctgcaccgcctctgcgtcctgggtagtctgtgcttgtaatccagcatgtttcacagagtaagcctgttgtgactttgcttttggggtctatgtcattggtttctgatgcttgtacaaacacgcacacacaaatggataaaacagcacctctggctgttacattaccataaaccatatcacatgcctacattttacaaatgatttctggtttctcttagttcttctctaacatagtactttctttccagcaaaagcaaaatgtgttttcagatttgttactttaataaaggttatccataccaataaaaagtgtacaacacagcattttctgttaaattattattggttttcagttgtaatttggtattttttctggcatgcgtttattaatttattaaattggcttttagaaataaaaaatattgatagcttacttttttctcataagaatattcgggaaaatgtgtttggccatttattaaatactgagtacttcttctg

SEQ ID NO: 361038 - DNA, 2260 bp, Homo sapiens
gggcttcatagggtgtctgtgctagaaactgattgcaggcagtatgtaggcatctttcattcagaatggacattaatatcttgaatagagaagaaagcttttagaaatgtatcatttgtcaaaattgcatgccttttaaaaaatgataaagagagatgctgagtgttttgtatgttagcatcgactctttctttttatttctgttcagactcaagtttttagaagctagaatatagatccctttaagaaaaaaaaaggaagaaagaagaatttgctggttagtcgacctctgtttaagaagtgcttcatcctcctcctccacctctccgtggtgtttctctgcagctctctgtaggttagggttctgtgctgcctggcagaatgctcatgtgttagctgaatagatatcatcgacagacatagaccactataggttttctttccttgtgaattccaaaatgccatccaaagagtcttggtcagggaggaaaactaatagggctgcagttcacaaatcaaaacaagagggccgtcagcaagatttattgatagcagccttgggaatgaaactgggttctccaaagtcgtctgtgacaatctggcaacctctgaaactctttgcttattcgcagttgacatcacttgttagaagagcaactctgaaagaaaacgagcaaattccaaaatatgaaaagattcacaatttcaaggtgcatacattcagagggccacactggtgtgaatactgtgccaactttatgtggggtctcattgctcagggagtgaaatgtgcagattgtggtttgaatgttcataagcagtgttccaagatggtcccaaatgactgtaagccagacttgaagcatgtcaaaaaggtgtacagctgtgaccttacgacgctcgtgaaagcacataccactaagcggccaatggtggtagacatgtgcatcagggagattgagtctagaggtcttaattctgaaggactataccgagtatcaggatttagtgacctaattgaagatgtcaagatggctttcgacagagatggtgagaaggcagatatttctgtgaacatgtatgaagatatcaacattatcactggtgcacttaaactgtacttcagggatttgccaattccactcattacatatgatgcctaccctaagtttatagaatctgccaaaattatggatccggatgagcaattggaaacccttcatgaagcactgaaactactgccacctgctcactgcgaaaccctccggtacctcatggcacatctaaagagagtgaccctccacgaaaaggagaatcttatgaatgcagagaaccttggaatcgtctttggacccacccttatgagatctccagaactagacgccatggctgcattgaatgatatacggtatcagagactggtggtggagctgcttatcaaaaacgaagacattttattttaaatttttaatttgaggggaaaagaaatgttttacagatgaaggaatgttttatagtaatttaatttgctcctgtagctgcattatttcttgattagaggtttgggcatataaccagattaaagtgaaggaactttctgttgtttttgtagcaccgctcagctgtcttgtaaaacagtgaacacacgctttctggttctagtaatcctgggtgtttatcacgttcagagaaactcaagctattgcatgattagccccctatctggcaaggaaaccccatacagaagaaacaacaaacctgcgcctgcaccgcctctgcgtcctgggtagtctgtgcttgtaatccagcatgtttcacagagtaagcctgttgtgactttgcttttggggtctatgtcattggtttctgatgcttgtacaaacacgcacacacaaatggataaaacagcacctctggctgttacattaccataaaccatatcacatgcctacattttacaaatgatttctggtttctcttagttcttctctaacatagtactttctttccagcaaaagcaaaatgtgttttcagatttgttactttaataaaggttatccataccaataaaaagtgtacaacacagcattttctgttaaattattattggttttcagttgtaatttggtattttttctggcatgcgtttattaatttattaaattggcttttagagaaaaattagacaataaaagaccgaaagcgcgccggcagacgaattgaaccataataacatgttgtgaatattattgaaaaaaaa

SEQ ID NO: 361039 - DNA, 2527 bp, Homo sapiens
cgtgggagacgctatcgcaagatggcgtctgcgaggccgcgggatgcggagtgagcgcgccccgccgggggctgtgcgaggctgctgctgctctccccgtcgccgccgccgccgccgccagtgcggcgccgcctctccgccagccactgcgccgcggccaagcctcctgcctcgcagcggtcccccgcgtcccggcctgcagcctccccgggcgccggcgcccccagcacgccccatcgggcaccccactctctccgaggtgtgggtgcggcgggctgatgaggtgatccctagcccgcctgggaggagcgcctggactcgcgggcggcggcgagcgcctttacaatggccctgaccctgtttgatacagatgaatatagacctcctgtttggaaatcttacttatatcagctacaacaggaagcccctcatcctcgaagaattacctgtacttgcgaggtggaaaacagaccaaagtattatggaagagagtttcatggcatgatctccagagaagcagccgaccagctcttgattgtggctgaggggagctacctcatccgggagagccagcggcagccagggacctacactttggctttaagatttggaagtcaaaccagaaacttcaggctctactacgatggcaagcactttgttggggagaaacgctttgagtccatccacgatctggtgactgatggcttgattactctctatattgaaaccaaggcagcagaatacattgccaagatgacgataaacccaatttatgagcacgtaggatacacaaccttaaacagagagccagcatacaaaaaacatatgccagtcctgaaagagacacatgatgagagagattctacaggccaggatggggtgtcagagaaaaggttgacatcacttgttagaagagcaactctgaaagaaaacgagcaaattccaaaatatgaaaagattcacaatttcaaggtgcatacattcagagggccacactggtgtgaatactgtgccaactttatgtggggtctcattgctcagggagtgaaatgtgcagattgtggtttgaatgttcataagcagtgttccaagatggtcccaaatgactgtaagccagacttgaagcatgtcaaaaaggtgtacagctgtgaccttacgacgctcgtgaaagcacataccactaagcggccaatggtggtagacatgtgcatcagggagattgagtctagaggtcttaattctgaaggactataccgagtatcaggatttagtgacctaattgaagatgtcaagatggctttcgacagagatggtgagaaggcagatatttctgtgaacatgtatgaagatatcaacattatcactggtgcacttaaactgtacttcagggatttgccaattccactcattacatatgatgcctaccctaagtttatagaatctgccaaaattatggatccggatgagcaattggaaacccttcatgaagcactgaaactactgccacctgctcactgcgaaaccctccggtacctcatggcacatctaaagagagtgaccctccacgaaaaggagaatcttatgaatgcagagaaccttggaatcgtctttggacccacccttatgagatctccagaactagacgccatggctgcattgaatgatatacggtatcagagactggtggtggagctgcttatcaaaaacgaagacattttattttaaatttttaatttgaggggaaaagaaatgttttacagatgaaggaatgttttatagtaatttaatttgctcctgtagctgcattatttcttgattagaggtttgggcatataaccagattaaagtgaaggaactttctgttgtttttgtagcaccgctcagctgtcttgtaaaacagtgaacacacgctttctggttctagtaatcctgggtgtttatcacgttcagagaaactcaagctattgcatgattagccccctatctggcaaggaaaccccatacagaagaaacaacaaacctgcgcctgcaccgcctctgcgtcctgggtagtctgtgcttgtaatccagcatgtttcacagagtaagcctgttgtgactttgcttttggggtctatgtcattggtttctgatgcttgtacaaacacgcacacacaaatggataaaacagcacctctggctgttacattaccataaaccatatcacatgcctacattttacaaatgatttctggtttctcttagttcttctctaacatagtactttctttccagcaaaagcaaaatgtgttttcagatttgttactttaataaaggttatccataccaataaaaagtgtacaacacagcattttctgttaaattattattggttttcagttgtaatttggtattttttctggcatgcgtttattaatttattaaattggcttttagaaataaaaaatattgatagcttacttttttctcataagaatattcgggaaaatgtgtttggccatttattaaatactgagtacttcttctg

SEQ ID NO: 361040 - DNA, 2069 bp, Homo sapiens
gggcttcatagggtgtctgtgctagaaactgattgcaggcagtatgtaggcatctttcattcagaatggacattaatatcttgaatagagaagaaagcttttagaaatgtatcatttgtcaaaattgcatgccttttaaaaaatgataaagagagatgctgagtgttttgtatgttagcatcgactctttctttttatttctgttcagactcaagtttttagaagctagaatatagatccctttaagaaaaaaaaaggaagaaagaagaatttgctggttagtcgacctctgtttaagaagtgcttcatcctcctcctccacctctccgtggtgtttctctgcagctctctgtaggttagggttctgtgctgcctggcagaatgctcatgtgttagctgaatagatatcatcgacagacatagaccactataggttttctttccttgtgaattccaaaatgccatccaaagagtcttggtcagggaggaaaactaatagggctgcagttcacaaatcaaaacaagagggccgtcagcaagatttattgatagcagccttgggaatgaaactgggttctccaaagtcgtctgtgacaatctggcaacctctgaaactctttgcttattcgcagttgacatcacttgttagaagagcaactctgaaagaaaacgagcaaattccaaaatatgaaaagattcacaatttcaaggtgcatacattcagagggccacactggtgtgaatactgtgccaactttatgtggggtctcattgctcagggagtgaaatgtgcagattgtggtttgaatgttcataagcagtgttccaagatggtcccaaatgactgtaagccagacttgaagcatgtcaaaaaggtgtacagctgtgaccttacgacgctcgtgaaagcacataccactaagcggccaatggtggtagacatgtgcatcagggagattgagtctagaggtcttaattctgaaggactataccgagtatcaggatttagtgacctaattgaagatgtcaagatggctttcgacagagatggtgagaaggcagatatttctgtgaacatgtatgaagatatcaacattatcactggtgcacttaaactgtacttcagggatttgccaattccactcattacatatgatgcctaccctaagtttatagaatctgccaaaattatggatccggatgagcaattggaaacccttcatgaagcactgaaactactgccacctgctcactgcgaaaccctccggtacctcatggcacatctaaagagagtgaccctccacgaaaaggagaatcttatgaatgcagagaaccttggaatcgtctttggacccacccttatgagatctccagaactagacgccatggctgcattgaatgatatacggtatcagagactggtggtggagctgcttatcaaaaacgaagacattttattttaaatttttaatttgaggggaaaagaaatgttttacagatgaaggaatgttttatagtaatttaatttgctcctgtagctgcattatttcttgattagaggtttgggcatataaccagattaaagtgaaggaactttctgttgtttttgtagcaccgctcagctgtcttgtaaaacagtgaacacacgctttctggttctagtaatcctgggtgtttatcacgttcagagaaactcaagctattgcatgattagccccctatctggcaaggaaaccccatacagaagaaacaacaaacctgcgcctgcaccgcctctgcgtcctgggtagtctgtgcttgtaatccagcatgtttcacagagtaagcctgttgtgactttgcttttggggtctatgtcattggtttctgatgcttgtacaaacacgcacacacaaatggataaaacagcacctctggctgttacattaccataaaccatatcacatgcctacattttacaaatgatttctggtttctcttagttcttctctaacatagtactttctttccagcaaaagcaaaatgtgttttcagatttgttactttaataaaggttatccataccaata

SEQ ID NO: 361041 - DNA, 2207 bp, Homo sapiens
gggcttcatagggtgtctgtgctagaaactgattgcaggcagtatgtaggcatctttcattcagaatggacattaatatcttgaatagagaagaaagcttttagaaatgtatcatttgtcaaaattgcatgccttttaaaaaatgataaagagagatgctgagtgttttgtatgttagcatcgactctttctttttatttctgttcagactcaagtttttagaagctagaatatagatccctttaagacatcctcctcctccacctctccgtggtgtttctctgcagctctctgtaggttagggttctgtgctgcctggcagaatgctcatgtgttagctgaatagatatcatcgacagacatagaccactataggttttctttccttgtgaattccaaaatgccatccaaagagtcttggtcagggaggaaaactaatagggctgcagttcacaaatcaaaacaagagggccgtcagcaagatttattgatagcagccttgggaatgaaactgggttctccaaagtcgtctgtgacaatctggcaacctctgaaactctttgcttattcgcagttgacatcacttgttagaagagcaactctgaaagaaaacgagcaaattccaaaatatgaaaagattcacaatttcaaggtgcatacattcagagggccacactggtgtgaatactgtgccaactttatgtggggtctcattgctcagggagtgaaatgtgcagattgtggtttgaatgttcataagcagtgttccaagatggtcccaaatgactgtaagccagacttgaagcatgtcaaaaaggtgtacagctgtgaccttacgacgctcgtgaaagcacataccactaagcggccaatggtggtagacatgtgcatcagggagattgagtctagaggtcttaattctgaaggactataccgagtatcaggatttagtgacctaattgaagatgtcaagatggctttcgacagagatggtgagaaggcagatatttctgtgaacatgtatgaagatatcaacattatcactggtgcacttaaactgtacttcagggatttgccaattccactcattacatatgatgcctaccctaagtttatagaatctgccaaaattatggatccggatgagcaattggaaacccttcatgaagcactgaaactactgccacctgctcactgcgaaaccctccggtacctcatggcacatctaaagagagtgaccctccacgaaaaggagaatcttatgaatgcagagaaccttggaatcgtctttggacccacccttatgagatctccagaactagacgccatggctgcattgaatgatatacggtatcagagactggtggtggagctgcttatcaaaaacgaagacattttattttaaatttttaatttgaggggaaaagaaatgttttacagatgaaggaatgttttatagtaatttaatttgctcctgtagctgcattatttcttgattagaggtttgggcatataaccagattaaagtgaaggaactttctgttgtttttgtagcaccgctcagctgtcttgtaaaacagtgaacacacgctttctggttctagtaatcctgggtgtttatcacgttcagagaaactcaagctattgcatgattagccccctatctggcaaggaaaccccatacagaagaaacaacaaacctgcgcctgcaccgcctctgcgtcctgggtagtctgtgcttgtaatccagcatgtttcacagagtaagcctgttgtgactttgcttttggggtctatgtcattggtttctgatgcttgtacaaacacgcacacacaaatggataaaacagcacctctggctgttacattaccataaaccatatcacatgcctacattttacaaatgatttctggtttctcttagttcttctctaacatagtactttctttccagcaaaagcaaaatgtgttttcagatttgttactttaataaaggttatccataccaataaaaagtgtacaacacagcattttctgttaaattattattggttttcagttgtaatttggtattttttctggcatgcgtttattaatttattaaattggcttttagaaataaaaaatattgatagcttacttttttctcataagaatattcgggaaaatgtgtttggccatttattaaatactgagtacttcttctg

SEQ ID NO: 361042 - DNA, 2129 bp, Homo sapiens
cgtgggagacgctatcgcaagatggcgtctgcgaggccgcgggatgcggagtgagcgcgccccgccgggggctgtgcgaggctgctgctgctctccccgtcgccgccgccgccgccgccagtgcggcgccgcctctccgccagccactgcgccgcggccaagcctcctgcctcgcagatacagatgaatatagacctcctgtttggaaatcttacttatatcagctacaacaggaagcccctcatcctcgaagaattacctgtacttgcgaggtggaaaacagaccaaagtattatggaagagagtttcatggcatgatctccagagaagcagccgaccagctcttgattgtggctgaggggagctacctcatccgggagagccagcggcagccagggacctacactttggctttaaggtgtcatccaacaggacagggttgatgacctgttcaacagcttgaaacgttgattccctgtcacaatggatgacatttttgacatcacttgttagaagagcaactctgaaagaaaacgagcaaattccaaaatatgaaaagattcacaatttcaaggtgcatacattcagagggccacactggtgtgaatactgtgccaactttatgtggggtctcattgctcagggagtgaaatgtgcagattgtggtttgaatgttcataagcagtgttccaagatggtcccaaatgactgtaagccagacttgaagcatgtcaaaaaggtgtacagctgtgaccttacgacgctcgtgaaagcacataccactaagcggccaatggtggtagacatgtgcatcagggagattgagtctagaggtcttaattctgaaggactataccgagtatcaggatttagtgacctaattgaagatgtcaagatggctttcgacagagatggtgagaaggcagatatttctgtgaacatgtatgaagatatcaacattatcactggtgcacttaaactgtacttcagggatttgccaattccactcattacatatgatgcctaccctaagtttatagaatctgccaaaattatggatccggatgagcaattggaaacccttcatgaagcactgaaactactgccacctgctcactgcgaaaccctccggtacctcatggcacatctaaagagagtgaccctccacgaaaaggagaatcttatgaatgcagagaaccttggaatcgtctttggacccacccttatgagatctccagaactagacgccatggctgcattgaatgatatacggtatcagagactggtggtggagctgcttatcaaaaacgaagacattttattttaaatttttaatttgaggggaaaagaaatgttttacagatgaaggaatgttttatagtaatttaatttgctcctgtagctgcattatttcttgattagaggtttgggcatataaccagattaaagtgaaggaactttctgttgtttttgtagcaccgctcagctgtcttgtaaaacagtgaacacacgctttctggttctagtaatcctgggtgtttatcacgttcagagaaactcaagctattgcatgattagccccctatctggcaaggaaaccccatacagaagaaacaacaaacctgcgcctgcaccgcctctgcgtcctgggtagtctgtgcttgtaatccagcatgtttcacagagtaagcctgttgtgactttgcttttggggtctatgtcattggtttctgatgcttgtacaaacacgcacacacaaatggataaaacagcacctctggctgttacattaccataaaccatatcacatgcctacattttacaaatgatttctggtttctcttagttcttctctaacatagtactttctttccagcaaaagcaaaatgtgttttcagatttgttactttaataaaggttatccataccaataaaaagtgtacaacacagcattttctgttaaattattattggttttcagttgtaatttggtattttttctggcatgcgtttattaatttattaaattggcttttagaaataaaaaatattgatagcttacttttttctcataagaatattcgggaaaatgtgtttggccatttattaaatactgagtacttcttctg

SEQ ID NO: 361043 - DNA, 1669 bp, Homo sapiens
ccctgttaatgaattgaccatgatgaaaggaggatggctaccatgggactgttgatgctgctgacactagcagcttctcctcactttttgagtatttgctttcaccatgtatgcgtgcatacattcagagggccacactggtgtgaatactgtgccaactttatgtggggtctcattgctcagggagtgaaatgtgcagattgtggtttgaatgttcataagcagtgttccaagatggtcccaaatgactgtaagccagacttgaagcatgtcaaaaaggtgtacagctgtgaccttacgacgctcgtgaaagcacataccactaagcggccaatggtggtagacatgtgcatcagggagattgagtctagaggtcttaattctgaaggactataccgagtatcaggatttagtgacctaattgaagatgtcaagatggctttcgacagagatggtgagaaggcagatatttctgtgaacatgtatgaagatatcaacattatcactggtgcacttaaactgtacttcagggatttgccaattccactcattacatatgatgcctaccctaagtttatagaatctgccaaaattatggatccggatgagcaattggaaacccttcatgaagcactgaaactactgccacctgctcactgcgaaaccctccggtacctcatggcacatctaaagagagtgaccctccacgaaaaggagaatcttatgaatgcagagaaccttggaatcgtctttggacccacccttatgagatctccagaactagacgccatggctgcattgaatgatatacggtatcagagactggtggtggagctgcttatcaaaaacgaagacattttattttaaatttttaatttgaggggaaaagaaatgttttacagatgaaggaatgttttatagtaatttaatttgctcctgtagctgcattatttcttgattagaggtttgggcatataaccagattaaagtgaaggaactttctgttgtttttgtagcaccgctcagctgtcttgtaaaacagtgaacacacgctttctggttctagtaatcctgggtgtttatcacgttcagagaaactcaagctattgcatgattagccccctatctggcaaggaaaccccatacagaagaaacaacaaacctgcgcctgcaccgcctctgcgtcctgggtagtctgtgcttgtaatccagcatgtttcacagagtaagcctgttgtgactttgcttttggggtctatgtcattggtttctgatgcttgtacaaacacgcacacacaaatggataaaacagcacctctggctgttacattaccataaaccatatcacatgcctacattttacaaatgatttctggtttctcttagttcttctctaacatagtactttctttccagcaaaagcaaaatgtgttttcagatttgttactttaataaaggttatccataccaataaaaagtgtacaacacagcattttctgttaaattattattggttttcagttgtaatttggtattttttctggcatgcgtttattaatttattaaattggcttttagaaataaaaaatattgatagcttacttttttctcataagaatattcgggaaaatgtgtttggccatttattaaatactgagtacttcttctg

SEQ ID NO: 361044 - DNA, 1917 bp, Homo sapiens
cgtgggagacgctatcgcaagatggcgtctgcgaggccgcgggatgcggagtgagcgcgccccgccgggggctgtgcgaggctgctgctgctctccccgtcgccgccgccgccgccgccagtgcggcgccgcctctccgccagccactgcgccgcggccaagcctcctgcctcgcaggtacctcctcccgcgcgcacgctccgcgcctgatggcagcgacaagtgccggctcgcggagagctagcggggctccctgggcccggtgcgcccgacaataacgcgtgaataactttttcttgcagcggtcccccgcgtcccggcctgcagcctccccgggcgccggcgcccccagcacgccccatcgggcaccccactctctccgaggtgtgggtgcggcgggctgatgaggtgatccctagcccgcctgggaggagcgcctggactcgcgggcggcggcgagcgcctttacaatggccctgaccctgtttgatacagatgaatatagacctcctgtttggaaatcttacttatatcagctacaacaggaagcccctcatcctcgaagaattacctgtacttgcgaggtggaaaacagaccaaagtattatggaagagagtttcatggcatgatctccagagaagcagccgaccagctcttgattgtggctgaggggagctacctcatccgggagagccagcggcagccagggacctacactttggctttaagatttggaagtcaaaccagaaacttcaggctctactacgatggcaagcactttgttggggagaaacgctttgagtccatccacgatctggtgactgatggcttgattactctctatattgaaaccaaggcagcagaatacattgccaagatgacgataaacccaatttatgagcacgtaggatacacaaccttaaacagagagccagcatacaaaaaacatatgccagtcctgaaagagacacatgatgagagagattctacaggccaggatggggtgtcagagaaaagggtgtcatccaacaggacagggttgatgacctgttcaacagcttgaaacgttgattccctgtcacaatggatgacatttttgacatcacttgttagaagagcaactctgaaagaaaacgagcaaattccaaaatatgaaaagattcacaatttcaaggtgcatacattcagagggccacactggtgtgaatactgtgccaactttatgtggggtctcattgctcagggagtgaaatgtgcagattgtggtttgaatgttcataagcagtgttccaagatggtcccaaatgactgtaagccagacttgaagcatgtcaaaaaggtgtacagctgtgaccttacgacgctcgtgaaagcacataccactaagcggccaatggtggtagacatgtgcatcagggagattgagtctagaggtcttaattctgaaggactataccgagtatcaggatttagtgacctaattgaagatgtcaagatggctttcgacagagatggtgagaaggcagatatttctgtgaacatgtatgaagatatcaacattatcactggtgcacttaaactgtacttcagggatttgccaattccactcattacatatgatgcctaccctaagtttatagaatctgccaaaaagtatggatcggatggagcattgaacccttatgaagatgaaactatggcactggttatgaaacctcggtactcaggacattaagaacggcctccagaaaggaatcttgatggagactggaatgtggacacctataatcaaaaactgggtgagcatcggcaaacacgcggggccttcaaggacgttcaacggggcaaataacagtcacatcaggctatcaagcgcaacaaattcgacaaagttatacgtctactccctcttctct

SEQ ID NO: 361045 - DNA, 1398 bp, Homo sapiens
cgtgggagacgctatcgcaagatggcgtctgcgaggccgcgggatgcggagtgagcgcgccccgccgggggctgtgcgaggctgctgctgctctccccgtcgccgccgccgccgccgccagtgcggcgccgcctctccgccagccactgcgccgcggccaagcctcctgcctcgcaggtacctcctcccgcgcgcacgctccgcgcctgatggcagcgacaagtgccggctcgcggagagctagcggggctccctgggcccggtgcgcccgacaataacgcgtgaataactttttcttgcagcggtcccccgcgtcccggcctgcagcctccccgggcgccggcgcccccagcacgccccatcgggcaccccactctctccgaggtgtgggtgcggcgggctgatgaggtgatccctagcccgcctgggaggagcgcctggactcgcgggcggcggcgagcgcctttacaatggccctgaccctgtttgatacagatgaatatagacctcctgtttggaaatcttacttatatcagctacaacaggaagcccctcatcctcgaagaattacctgtacttgcgaggtggaaaacagaccaaagtattatggaagagagtttcatggcatgatctccagagaagcagccgaccagctcttgattgtggctgaggggagctacctcatccgggagagccagcggcagccagggacctacactttggctttaagatttggaagtcaaaccagaaacttcaggctctactacgatggcaagcactttgttggggagaaacgctttgagtccatccacgatctggtgactgatggcttgattactctctatattgaaaccaaggcagcagaatacattgccaagatgacgataaacccaatttatgagcacgtaggatacacaaccttaaacagagagccagcatacaaaaaacatatgccagtcctgaaagagacacatgatgagagagattctacaggccaggatggggtgtcagagaaaagggtgtcatccaacaggacagggttgatgacctgttcaacagcttgaaacgttgattccctgtcacaatggatgacatttttgacatcacttgttagaagagcaactctgaaagaaaacgagcaaattccaaaatatgaaaagattcacaatttcaagaactacctttgtttggagcttcacctcttgcatgtgacacaaccctgatctctgcttgtgctctgcctggtacacatgcccttgttcttaaaaagaagtccatctctagggggtgtgctaatttgctttgatggttgctgttacagctcattactccgcaattgtattacttcagtgtgtttttcttaatctgttaccatgaatatatttactatttgatgga

SEQ ID NO: 361046 - DNA, 352 bp, Homo sapiens
agctcattctaggggaaaccagctgccatattaagaaaacagtcctatggaaagggccatggaacaaagaagtgacttctgccaacaacctcatgagtgaacctagaagtggctcatctagtcctggtcaaatcttatggactgtggctccaactgatagtgtgactgtaacttcataagagacgctgaaccagaccacccaataagacactcccagattccctactctcaaaagttgtgtgaaataatcacccccagttgtattaaactgctaagttttggggtagtgtgttacacagcaataaatcataaatacaacatccaagcaataaatttctatgataaatacata

SEQ ID NO: 361047 - DNA, 459 bp, Homo sapiens
gcctccaattctggtcctttcagctgtggccaggttagcaggatcgattcacagaaagaaccatttggggaacttctctttaaaagggactgaatttatgtcaagcttggaatgctgcagactcctctcctctattttttaaagtgaaactttacatgcaaagaagtttcagccctggctgggaacagtggctcatgcctgtaatcccaacactttgggagacccagccaggtgtttgagaccagccttagcaacatgacaaaaccccatctttacaaaaaaaagatacaaaaattggccaggtatggtggtgcacgcctgtactcccaaattctcagaaggctaaggtgagaggatcacttgagcctgggagggtaaggcttcagtgagctgagatcgtgccactgcactccagcctgggcaacagagtgacagtctgtcaaaaaaaaaaaaaaaaag

SEQ ID NO: 361048 - DNA, 421 bp, Homo sapiens
cagagtctcaagacaatctaagactggagacttagattccccagggttacccatgacttattgtcgaattacttccgctttttccatcctgtgattgaatgtctacctagagacttcatagtgtcatagaatccaagcataggaagggccatagtggggttcatcctggctaccacacatatgcattgcatccctaccccagcacacccactaagctgttgcccaacttcttcctaacaccttgggaaactggaagttcattacctcatcaggtagcttacagtttcagtcagttctccattagaaagttctgcctttaaaccaaacaccgcatgttctcactcataggtgggaattgaacaatgagatcacttggacacagggtggggaacatcacacaccggggcctgtcgtggggtgg

SEQ ID NO: 361049 - DNA, 3974 bp, Homo sapiens
cgccccctgacgctgcctcagctcctcagtgcacagtgctgcctcgtctgaggggacaggaggatcaccctcttcgtcgcttcggccagtgtgtcgggctgggccctgacaagccacctgaggagaggctcggagccgggcccggaccccggcgattgccgcccgcttctctctagtctcacgaggggtttcccgcctcgcacccccacctctggacttgcctttccttctcttctccgcgtgtggagggagccagcgcttaggccggagcgagcctgggggccgcccgccgtgaagacatcgcggggaccgattcaccatggagggcgccggcggcgcgaacgacaagaaaaagataagttctgaacgtcgaaaagaaaagtctcgagatgcagccagatctcggcgaagtaaagaatctgaagttttttatgagcttgctcatcagttgccacttccacataatgtgagttcgcatcttgataaggcctctgtgatgaggcttaccatcagctatttgcgtgtgaggaaacttctggatgctggtgatttggatattgaagatgacatgaaagcacagatgaattgcttttatttgaaagccttggatggttttgttatggttctcacagatgatggtgacatgatttacatttctgataatgtgaacaaatacatgggattaactcagtttgaactaactggacacagtgtgtttgattttactcatccatgtgaccatgaggaaatgagagaaatgcttacacacagaaatggccttgtgaaaaagggtaaagaacaaaacacacagcgaagcttttttctcagaatgaagtgtaccctaactagccgaggaagaactatgaacataaagtctgcaacatggaaggtattgcactgcacaggccacattcacgtatatgataccaacagtaaccaacctcagtgtgggtataagaaaccacctatgacctgcttggtgctgatttgtgaacccattcctcacccatcaaatattgaaattcctttagatagcaagactttcctcagtcgacacagcctggatatgaaattttcttattgtgatgaaagaattaccgaattgatgggatatgagccagaagaacttttaggccgctcaatttatgaatattatcatgctttggactctgatcatctgaccaaaactcatcatgatatgtttactaaaggacaagtcaccacaggacagtacaggatgcttgccaaaagaggtggatatgtctgggttgaaactcaagcaactgtcatatataacaccaagaattctcaaccacagtgcattgtatgtgtgaattacgttgtgagtggtattattcagcacgacttgattttctcccttcaacaaacagaatgtgtccttaaaccggttgaatcttcagatatgaaaatgactcagctattcaccaaagttgaatcagaagatacaagtagcctctttgacaaacttaagaaggaacctgatgctttaactttgctggccccagccgctggagacacaatcatatctttagattttggcagcaacgacacagaaactgatgaccagcaacttgaggaagtaccattatataatgatgtaatgctcccctcacccaacgaaaaattacagaatataaatttggcaatgtctccattacccaccgctgaaacgccaaagccacttcgaagtagtgctgaccctgcactcaatcaagaagttgcattaaaattagaaccaaatccagagtcactggaactttcttttaccatgccccagattcaggatcagacacctagtccttccgatggaagcactagacaaagttcacctgagcctaatagtcccagtgaatattgtttttatgtggatagtgatatggtcaatgaattcaagttggaattggtagaaaaactttttgctgaagacacagaagcaaagaacccattttctactcaggacacagatttagacttggagatgttagctccctatatcccaatggatgatgacttccagttacgttccttcgatcagttgtcaccattagaaagcagttccgcaagccctgaaagcgcaagtcctcaaagcacagttacagtattccagcagactcaaatacaagaacctactgctaatgccaccactaccactgccaccactgatgaattaaaaacagtgacaaaagaccgtatggaagacattaaaatattgattgcatctccatctcctacccacatacataaagaaactactagtgccacatcatcaccatatagagatactcaaagtcggacagcctcaccaaacagagcaggaaaaggagtcatagaacagacagaaaaatctcatccaagaagccctaacgtgttatctgtcgctttgagtcaaagaactacagttcctgaggaagaactaaatccaaagatactagctttgcagaatgctcagagaaagcgaaaaatggaacatgatggttcactttttcaagcagtaggaattggaacattattacagcagccagacgatcatgcagctactacatcactttcttggaaacgtgtaaaaggatgcaaatctagtgaacagaatggaatggagcaaaagacaattattttaataccctctgatttagcatgtagactgctggggcaatcaatggatgaaagtggattaccacagctgaccagttatgattgtgaagttaatgctcctatacaaggcagcagaaacctactgcagggtgaagaattactcagagctttggatcaagttaactgagctttttcttaatttcattcctttttttggacactggtggctcactacctaaagcagtctatttatattttctacatctaattttagaagcctggctacaatactgcacaaacttggttagttcaatttttgatcccctttctacttaatttacattaatgctcttttttagtatgttctttaatgctggatcacagacagctcattttctcagttttttggtatttaaaccattgcattgcagtagcatcattttaaaaaatgcacctttttatttatttatttttggctagggagtttatccctttttcgaattatttttaagaagatgccaatataatttttgtaagaaggcagtaacctttcatcatgatcataggcagttgaaaaatttttacaccttttttttcacattttacataaataataatgctttgccagcagtacgtggtagccacaattgcacaatatattttcttaaaaaataccagcagttactcatggaatatattctgcgtttataaaactagtttttaagaagaaattttttttggcctatgaaattgttaaacctggaacatgacattgttaatcatataataatgattcttaaatgctgtatggtttattatttaaatgggtaaagccatttacataatatagaaagatatgcatatatctagaaggtatgtggcatttatttggataaaattctcaattcagagaaatcatctgatgtttctatagtcactttgccagctcaaaagaaaacaataccctatgtagttgtggaagtttatgctaatattgtgtaactgatattaaacctaaatgttctgcctaccctgttggtataaagatattttgagcagactgtaaacaagaaaaaaaaaatcatgcattcttagcaaaattgcctagtatgttaatttgctcaaaatacaatgtttgattttatgcactttgtcgctattaacatcctttttttcatgtagatttcaataattgagtaattttagaagcattattttaggaatatatagttgtcacagtaaatatcttgttttttctatgtacattgtacaaatttttcattccttttgctctttgtggttggatctaacactaactgtattgttttgttacatcaaataaacatcttctgtggaccagg

SEQ ID NO: 361050 - DNA, 379 bp, Homo sapiens
cgccccctgacgctgcctcagctcctcagtgcacagtgctgcctcgtctgaggggacaggaggatcaccctcttcgtcgcttcggccagtgtgtcgggctgggccctgacaagccacctgaggagaggctcggagccgggcccggaccccggcgattgccgcccgcttctctctagtctcacgaggggtttcccgcctcgcacccccacctctggacttgcctttccttctcttctccgcgtgtggagggagccagcgcttaggccggagcgagcctgggggccgcccgccgtgaagacatcgcggggaccgattcaccatggagggcgccggcggcgcgaacgacaagaaaaagtaagcccattccctcggcccgccg

SEQ ID NO: 361051 - DNA, 463 bp, Homo sapiens
  misc_feature (389)..(389): n is a, c, g, or t
  misc_feature (425)..(425): n is a, c, g, or t
  misc_feature (439)..(439): n is a, c, g, or t
  misc_feature (449)..(449): n is a, c, g, or t
ggcggaccgaagttcgtcataggtttggcctatgaaattgttaaacctggaacatgacattgttaatcatataataatgattcttaaatgctgtatggtttattatttaaatgggtaaagccatttacataatatagaaagatatgcatatatctagaaggtatgtggcatttatttggataaaattctcaattcagagaaatcatctgatgtttctatagtcactttgccagctcaaaagaaaacaataccctatgtagttgtggaagtttatgctaatattgtgtaactgatattaaacctaaatgttctgcctaccctgttggtataaagatattttgagcagactgtaaacaagaaaaaaaaaatcatgcattcttagcaagacnggcgcatcttctcccatcagagaaaccccagccaangctccgttttcagngtgtaagatngtacctgatgggag

SEQ ID NO: 361052 - DNA, 576 bp, Homo sapiens
caggaagtaggtcataggtggtatcataggaaaaatgttcattgattttcaaaaacgtgattaatccactagtgacagtaaattttatcaaagcttactggccatgtcagactcaactacttatctctgctttttttttccctagcattgtaaatattttttttaactgctttgttcttcatacacaggtattgcactgcacaggccacattcacgtatatgataccaacagtaaccaacctcagtgtgggtataagaaaccacctatgacctgcttggtgctgatttgtgaacccattcctcacccatcaaatattgaaattcctttagatagcaagactttcctcagtcgacacagcctggatatgaaattttcttattgtgatgaaaggtaaattagatctaaaatgtgaatttgaaatttttaattagtctacagcattactgaatattcaccatagcaaagattcagcgctggccatgcatggtggctcacacctgtaatcccagcactttggaaggctgaggcaagcggggggtggatcatctgaggtcaggagattgagaccagcctgg

SEQ ID NO: 361053 - DNA, 451 bp, Homo sapiens
tccgagtctcacacacacaccacacaccacacacacagtcgcacacacaccacacacacacaccacacactcaaatacaagaacctactgctaatgccaccactaccactgccaccactgatgaattaaaaacagtgacaaaagaccgtatggaagacattaaaatattgattgcatctccatctcctacccaccgtgactcgtgggtgactcgtggaaatgtccgtgggcatttccactgagtcacagaaagttctgttggacagtggatatagaagttggaaaagaatgatttttttaaaaatgagtgcttaatgaaaatagtcatttaagttggtaaaccggatcataaatcacaaaattctttgcccttgatatataatattagctgccatttatgaggtactagctaagtgtcagattcagtctaaatggttcatagtccttttct

SEQ ID NO: 361054 - DNA, 291 bp, Homo sapiens
acttaagaaagaattcaaaataatttagggtagtatttaagaaactgcctataatgttattaaatttacaccaatttcaaggtttttggttgtttaaaaaaaaaattcaacaaactaaacttgaaataactttactgtttatagggaacattattacagcagccagacgatcatgcagctagcgggaggctgaggcaggagaatggcgtgaacccgggaggcggaacttgcagtgagccgagatcacgccactgcactccagcctgggcgacagagcgagactccgtctca

SEQ ID NO: 361055 - DNA, 4630 bp, Homo sapiens
cgccccctgacgctgcctcagctcctcagtgcacagtgctgcctcgtctgaggggacaggaggatcaccctcttcgtcgcttcggccagtgtgtcgggctgggccctgacaagccacctgaggagaggctcggagccgggcccggaccccggcgattgccgcccgcttctctctagtctcacgaggggtttcccgcctcgcacccccacctctggacttgcctttccttctcttctccgcgtgtggagggagccagcgcttaggccggagcgagcctgggggccgcccgccgtgaagacatcgcggggaccgattcaccatggagggcgccggcggcgcgaacgacaagaaaaagataagttctgaacgtcgaaaagaaaagtctcgagatgcagccagatctcggcgaagtaaagaatctgaagttttttatgagcttgctcatcagttgccacttccacataatgtgagttcgcatcttgataaggcctctgtgatgaggcttaccatcagctatttgcgtgtgaggaaacttctggatgctggtgatttggatattgaagatgacatgaaagcacagatgaattgcttttatttgaaagccttggatggttttgttatggttctcacagatgatggtgacatgatttacatttctgataatgtgaacaaatacatgggattaactcagtttgaactaactggacacagtgtgtttgattttactcatccatgtgaccatgaggaaatgagagaaatgcttacacacagaaatggccttgtgaaaaagggtaaagaacaaaacacacagcgaagcttttttctcagaatgaagtgtaccctaactagccgaggaagaactatgaacataaagtctgcaacatggaaggtattgcactgcacaggccacattcacgtatatgataccaacagtaaccaacctcagtgtgggtataagaaaccacctatgacctgcttggtgctgatttgtgaacccattcctcacccatcaaatattgaaattcctttagatagcaagactttcctcagtcgacacagcctggatatgaaattttcttattgtgatgaaagaattaccgaattgatgggatatgagccagaagaacttttaggccgctcaatttatgaatattatcatgctttggactctgatcatctgaccaaaactcatcatgatatgtttactaaaggacaagtcaccacaggacagtacaggatgcttgccaaaagaggtggatatgtctgggttgaaactcaagcaactgtcatatataacaccaagaattctcaaccacagtgcattgtatgtgtgaattacgttgtgagtggtattattcagcacgacttgattttctcccttcaacaaacagaatgtgtccttaaaccggttgaatcttcagatatgaaaatgactcagctattcaccaaagttgaatcagaagatacaagtagcctctttgacaaacttaagaaggaacctgatgctttaactttgctggccccagccgctggagacacaatcatatctttagattttggcagcaacgacacagaaactgatgaccagcaacttgaggaagtaccattatataatgatgtaatgctcccctcacccaacgaaaaattacagaatataaatttggcaatgtctccattacccaccgctgaaacgccaaagccacttcgaagtagtgctgaccctgcactcaatcaagaagttgcattaaaattagaaccaaatccagagtcactggaactttcttttaccatgccccagattcaggatcagacacctagtccttccgatggaagcactagacaaagttcacctgagcctaatagtcccagtgaatattgtttttatgtggatagtgatatggtcaatgaattcaagttggaattggtagaaaaactttttgctgaagacacagaagcaaagaacccattttctactcaggacacagatttagacttggagatgttagctccctatatcccaatggatgatgacttccagttacgttccttcgatcagttgtcaccattagaaagcagttccgcaagccctgaaagcgcaagtcctcaaagcacagttacagtattccagcagactcaaatacaagaacctactgctaatgccaccactaccactgccaccactgatgaattaaaaacagtgacaaaagaccgtatggaagacattaaaatattgattgcatctccatctcctacccacatacataaagaaactactagtgccacatcatcaccatatagagatactcaaagtcggacagcctcaccaaacagagcaggaaaaggagtcatagaacagacagaaaaatctcatccaagaagccctaacgtgttatctgtcgctttgagtcaaagaactacagttcctgaggaagaactaaatccaaagatactagctttgcagaatgctcagagaaagcgaaaaatggaacatgatggttcactttttcaagcagtaggaattggaacattattacagcagccagacgatcatgcagctactacatcactttcttggaaacgtgtaaaaggatgcaaatctagtgaacagaatggaatggagcaaaagacaattattttaataccctctgatttagcatgtagactgctggggcaatcaatggatgaaagtggattaccacagctgaccagttatgattgtgaagttaatgctcctatacaaggcagcagaaacctactgcagggtgaagaattactcagagctttggatcaagttaactgagctttttcttaatttcattcctttttttggacactggtggctcactacctaaagcagtctatttatattttctacatctaattttagaagcctggctacaatactgcacaaacttggttagttcaatttttgatcccctttctacttaatttacattaatgctcttttttagtatgttctttaatgctggatcacagacagctcattttctcagttttttggtatttaaaccattgcattgcagtagcatcattttaaaaaatgcacctttttatttatttatttttggctagggagtttatccctttttcgaattatttttaagaagatgccaatataatttttgtaagaaggcagtaacctttcatcatgatcataggcagttgaaaaatttttacaccttttttttcacattttacataaataataatgctttgccagcagtacgtggtagccacaattgcacaatatattttcttaaaaaataccagcagttactcatggaatatattctgcgtttataaaactagtttttaagaagaaattttttttggcctatgaaattgttaaacctggaacatgacattgttaatcatataataatgattcttaaatgctgtatggtttattatttaaatgggtaaagccatttacataatatagaaagatatgcatatatctagaaggtatgtggcatttatttggataaaattctcaattcagagaaatcatctgatgtttctatagtcactttgccagctcaaaagaaaacaataccctatgtagttgtggaagtttatgctaatattgtgtaactgatattaaacctaaatgttctgcctaccctgttggtataaagatattttgagcagactgtaaacaagaaaaaaaaaatcatgcattcttagcaaaattgcctagtatgttaatttgctcaaaatacaatgtttgattttatgcactttgtcgctattaacatcctttttttcatgtagatttcaataattgagtaattttagaagcattattttaggaatatatagttgtcacagtaaatatcttgttttttctatgtacattgtacaaatttttcattccttttgctctttgtggttggatctaacactaactgtattgttttgttacatcaaataaacatcttctgtggaccaggaaaaaaaaaaaaaaaaaaaaaaaaaaaaaaaaaaaaaaaaaaaaaaaaaaaaaaaaaaaaaaaaaaaaaaaaaaaaaatcaacaaaaaaaaaagacacacatcaatctaaaataaaccttttcataggcgacagcactaattaatttactacacctcacttttttctaccaacgacgcctacctaactttattcaactcttattatatcacatcacatacccccctcactcatactaacatcttcctccatcaaataccattccagtcatcttctctatattacaagaaaccctccactcttgtttgctcctacacatctaccacacacactcccaacatatattcatcccgcgcgcaatcaacgaaaccacgcacactattcgtcccgctacacccccacccatcacgtcgcccgcaagaaaacagttccaccgtggaatagccccctccaactcatcaacaggcacgcgcaacaaacacaacacaagaccactcattacgctagacacaatgccaaccagagcacaacaccaagcactcaagcagacgaccgacccgatcataacacaaccaaccaagccagccccacgcacacaccacacataccaccccactcaacgacacaccagacacgccacaacacgaccaaacaaaa

SEQ ID NO: 361056 - DNA, 3678 bp, Homo sapiens
agtcttactgttcatttaagcaagatatgtgcaagacactgcattcttagtactggcagataagttctgaacgtcgaaaagaaaagtctcgagatgcagccagatctcggcgaagtaaagaatctgaagttttttatgagcttgctcatcagttgccacttccacataatgtgagttcgcatcttgataaggcctctgtgatgaggcttaccatcagctatttgcgtgtgaggaaacttctggatgctggtgatttggatattgaagatgacatgaaagcacagatgaattgcttttatttgaaagccttggatggttttgttatggttctcacagatgatggtgacatgatttacatttctgataatgtgaacaaatacatgggattaactcagtttgaactaactggacacagtgtgtttgattttactcatccatgtgaccatgaggaaatgagagaaatgcttacacacagaaatggccttgtgaaaaagggtaaagaacaaaacacacagcgaagcttttttctcagaatgaagtgtaccctaactagccgaggaagaactatgaacataaagtctgcaacatggaaggtattgcactgcacaggccacattcacgtatatgataccaacagtaaccaacctcagtgtgggtataagaaaccacctatgacctgcttggtgctgatttgtgaacccattcctcacccatcaaatattgaaattcctttagatagcaagactttcctcagtcgacacagcctggatatgaaattttcttattgtgatgaaagaattaccgaattgatgggatatgagccagaagaacttttaggccgctcaatttatgaatattatcatgctttggactctgatcatctgaccaaaactcatcatgatatgtttactaaaggacaagtcaccacaggacagtacaggatgcttgccaaaagaggtggatatgtctgggttgaaactcaagcaactgtcatatataacaccaagaattctcaaccacagtgcattgtatgtgtgaattacgttgtgagtggtattattcagcacgacttgattttctcccttcaacaaacagaatgtgtccttaaaccggttgaatcttcagatatgaaaatgactcagctattcaccaaagttgaatcagaagatacaagtagcctctttgacaaacttaagaaggaacctgatgctttaactttgctggccccagccgctggagacacaatcatatctttagattttggcagcaacgacacagaaactgatgaccagcaacttgaggaagtaccattatataatgatgtaatgctcccctcacccaacgaaaaattacagaatataaatttggcaatgtctccattacccaccgctgaaacgccaaagccacttcgaagtagtgctgaccctgcactcaatcaagaagttgcattaaaattagaaccaaatccagagtcactggaactttcttttaccatgccccagattcaggatcagacacctagtccttccgatggaagcactagacaaagttcacctgagcctaatagtcccagtgaatattgtttttatgtggatagtgatatggtcaatgaattcaagttggaattggtagaaaaactttttgctgaagacacagaagcaaagaacccattttctactcaggacacagatttagacttggagatgttagctccctatatcccaatggatgatgacttccagttacgttccttcgatcagttgtcaccattagaaagcagttccgcaagccctgaaagcgcaagtcctcaaagcacagttacagtattccagcagactcaaatacaagaacctactgctaatgccaccactaccactgccaccactgatgaattaaaaacagtgacaaaagaccgtatggaagacattaaaatattgattgcatctccatctcctacccacatacataaagaaactactagtgccacatcatcaccatatagagatactcaaagtcggacagcctcaccaaacagagcaggaaaaggagtcatagaacagacagaaaaatctcatccaagaagccctaacgtgttatctgtcgctttgagtcaaagaactacagttcctgaggaagaactaaatccaaagatactagctttgcagaatgctcagagaaagcgaaaaatggaacatgatggttcactttttcaagcagtaggaattggaacattattacagcagccagacgatcatgcagctactacatcactttcttggaaacgtgtaaaaggatgcaaatctagtgaacagaatggaatggagcaaaagacaattattttaataccctctgatttagcatgtagactgctggggcaatcaatggatgaaagtggattaccacagctgaccagttatgattgtgaagttaatgctcctatacaaggcagcagaaacctactgcagggtgaagaattactcagagctttggatcaagttaactgagctttttcttaatttcattcctttttttggacactggtggctcactacctaaagcagtctatttatattttctacatctaattttagaagcctggctacaatactgcacaaacttggttagttcaatttttgatcccctttctacttaatttacattaatgctcttttttagtatgttctttaatgctggatcacagacagctcattttctcagttttttggtatttaaaccattgcattgcagtagcatcattttaaaaaatgcacctttttatttatttatttttggctagggagtttatccctttttcgaattatttttaagaagatgccaatataatttttgtaagaaggcagtaacctttcatcatgatcataggcagttgaaaaatttttacaccttttttttcacattttacataaataataatgctttgccagcagtacgtggtagccacaattgcacaatatattttcttaaaaaataccagcagttactcatggaatatattctgcgtttataaaactagtttttaagaagaaattttttttggcctatgaaattgttaaacctggaacatgacattgttaatcatataataatgattcttaaatgctgtatggtttattatttaaatgggtaaagccatttacataatatagaaagatatgcatatatctagaaggtatgtggcatttatttggataaaattctcaattcagagaaatcatctgatgtttctatagtcactttgccagctcaaaagaaaacaataccctatgtagttgtggaagtttatgctaatattgtgtaactgatattaaacctaaatgttctgcctaccctgttggtataaagatattttgagcagactgtaaacaagaaaaaaaaaatcatgcattcttagcaaaattgcctagtatgttaatttgctcaaaatacaatgtttgattttatgcactttgtcgctattaacatcctttttttcatgtagatttcaataattgagtaattttagaagcattattttaggaatatatagttgtcacagtaaatatcttgttttttctatgtacattgtacaaatttttcattccttttgctctttgtggttggatctaacactaactgtattgttttgttacatcaaataaacatcttctgtggaccagg

SEQ ID NO: 361057 - DNA, 3112 bp, Homo sapiens
ggatcccgcgatagtgtccgatggaaggtattgcactgcacaggccacattcacgtatatgataccaacagtaaccaacctcagtgtgggtataagaaaccacctatgacctgcttggtgctgatttgtgaacccattcctcacccatcaaatattgaaattcctttagatagcaagactttcctcagtcgacacagcctggatatgaaattttcttattgtgatgaaagaattaccgaattgatgggatatgagccagaagaacttttaggccgctcaatttatgaatattatcatgctttggactctgatcatctgaccaaaactcatcatgatatgtttactaaaggacaagtcaccacaggacagtacaggatgcttgccaaaagaggtggatatgtctgggttgaaactcaagcaactgtcatatataacaccaagaattctcaaccacagtgcattgtatgtgtgaattacgttgtgagtggtattattcagcacgacttgattttctcccttcaacaaacagaatgtgtccttaaaccggttgaatcttcagatatgaaaatgactcagctattcaccaaagttgaatcagaagatacaagtagcctctttgacaaacttaagaaggaacctgatgctttaactttgctggccccagccgctggagacacaatcatatctttagattttggcagcaacgacacagaaactgatgaccagcaacttgaggaagtaccattatataatgatgtaatgctcccctcacccaacgaaaaattacagaatataaatttggcaatgtctccattacccaccgctgaaacgccaaagccacttcgaagtagtgctgaccctgcactcaatcaagaagttgcattaaaattagaaccaaatccagagtcactggaactttcttttaccatgccccagattcaggatcagacacctagtccttccgatggaagcactagacaaagttcacctgagcctaatagtcccagtgaatattgtttttatgtggatagtgatatggtcaatgaattcaagttggaattggtagaaaaactttttgctgaagacacagaagcaaagaacccattttctactcaggacacagatttagacttggagatgttagctccctatatcccaatggatgatgacttccagttacgttccttcgatcagttgtcaccattagaaagcagttccgcaagccctgaaagcgcaagtcctcaaagcacagttacagtattccagcagactcaaatacaagaacctactgctaatgccaccactaccactgccaccactgatgaattaaaaacagtgacaaaagaccgtatggaagacattaaaatattgattgcatctccatctcctacccacatacataaagaaactactagtgccacatcatcaccatatagagatactcaaagtcggacagcctcaccaaacagagcaggaaaaggagtcatagaacagacagaaaaatctcatccaagaagccctaacgtgttatctgtcgctttgagtcaaagaactacagttcctgaggaagaactaaatccaaagatactagctttgcagaatgctcagagaaagcgaaaaatggaacatgatggttcactttttcaagcagtaggaattggaacattattacagcagccagacgatcatgcagctactacatcactttcttggaaacgtgtaaaaggatgcaaatctagtgaacagaatggaatggagcaaaagacaattattttaataccctctgatttagcatgtagactgctggggcaatcaatggatgaaagtggattaccacagctgaccagttatgattgtgaagttaatgctcctatacaaggcagcagaaacctactgcagggtgaagaattactcagagctttggatcaagttaactgagctttttcttaatttcattcctttttttggacactggtggctcactacctaaagcagtctatttatattttctacatctaattttagaagcctggctacaatactgcacaaacttggttagttcaatttttgatcccctttctacttaatttacattaatgctcttttttagtatgttctttaatgctggatcacagacagctcattttctcagttttttggtatttaaaccattgcattgcagtagcatcattttaaaaaatgcacctttttatttatttatttttggctagggagtttatccctttttcgaattatttttaagaagatgccaatataatttttgtaagaaggcagtaacctttcatcatgatcataggcagttgaaaaatttttacaccttttttttcacattttacataaataataatgctttgccagcagtacgtggtagccacaattgcacaatatattttcttaaaaaataccagcagttactcatggaatatattctgcgtttataaaactagtttttaagaagaaattttttttggcctatgaaattgttaaacctggaacatgacattgttaatcatataataatgattcttaaatgctgtatggtttattatttaaatgggtaaagccatttacataatatagaaagatatgcatatatctagaaggtatgtggcatttatttggataaaattctcaattcagagaaatcatctgatgtttctatagtcactttgccagctcaaaagaaaacaataccctatgtagttgtggaagtttatgctaatattgtgtaactgatattaaacctaaatgttctgcctaccctgttggtataaagatattttgagcagactgtaaacaagaaaaaaaaaatcatgcattcttagcaaaattgcctagtatgttaatttgctcaaaatacaatgtttgattttatgcactttgtcgctattaacatcctttttttcatgtagatttcaataattgagtaattttagaagcattattttaggaatatatagttgtcacagtaaatatcttgttttttctatgtacattgtacaaatttttcattccttttgctctttgtggttggatctaacactaactgtattgttttgttacatcaaataaacatcttctgtggaccagg

SEQ ID NO: 361058 - DNA, 3273 bp, Homo sapiens
caggaagtaggtcataggtggtatcataggaaaaatgttcattgattttcaaaaacgtgattaatccactagtgacagtaaattttatcaaagcttactggccatgtcagactcaactacttatctctgctttttttttccctagcattgtaaatattttttttaactgctttgttcttcatacacaggtattgcactgcacaggccacattcacgtatatgataccaacagtaaccaacctcagtgtgggtataagaaaccacctatgacctgcttggtgctgatttgtgaacccattcctcacccatcaaatattgaaattcctttagatagcaagactttcctcagtcgacacagcctggatatgaaattttcttattgtgatgaaagaattaccgaattgatgggatatgagccagaagaacttttaggccgctcaatttatgaatattatcatgctttggactctgatcatctgaccaaaactcatcatgatatgtttactaaaggacaagtcaccacaggacagtacaggatgcttgccaaaagaggtggatatgtctgggttgaaactcaagcaactgtcatatataacaccaagaattctcaaccacagtgcattgtatgtgtgaattacgttgtgagtggtattattcagcacgacttgattttctcccttcaacaaacagaatgtgtccttaaaccggttgaatcttcagatatgaaaatgactcagctattcaccaaagttgaatcagaagatacaagtagcctctttgacaaacttaagaaggaacctgatgctttaactttgctggccccagccgctggagacacaatcatatctttagattttggcagcaacgacacagaaactgatgaccagcaacttgaggaagtaccattatataatgatgtaatgctcccctcacccaacgaaaaattacagaatataaatttggcaatgtctccattacccaccgctgaaacgccaaagccacttcgaagtagtgctgaccctgcactcaatcaagaagttgcattaaaattagaaccaaatccagagtcactggaactttcttttaccatgccccagattcaggatcagacacctagtccttccgatggaagcactagacaaagttcacctgagcctaatagtcccagtgaatattgtttttatgtggatagtgatatggtcaatgaattcaagttggaattggtagaaaaactttttgctgaagacacagaagcaaagaacccattttctactcaggacacagatttagacttggagatgttagctccctatatcccaatggatgatgacttccagttacgttccttcgatcagttgtcaccattagaaagcagttccgcaagccctgaaagcgcaagtcctcaaagcacagttacagtattccagcagactcaaatacaagaacctactgctaatgccaccactaccactgccaccactgatgaattaaaaacagtgacaaaagaccgtatggaagacattaaaatattgattgcatctccatctcctacccacatacataaagaaactactagtgccacatcatcaccatatagagatactcaaagtcggacagcctcaccaaacagagcaggaaaaggagtcatagaacagacagaaaaatctcatccaagaagccctaacgtgttatctgtcgctttgagtcaaagaactacagttcctgaggaagaactaaatccaaagatactagctttgcagaatgctcagagaaagcgaaaaatggaacatgatggttcactttttcaagcagtaggaattggaacattattacagcagccagacgatcatgcagctactacatcactttcttggaaacgtgtaaaaggatgcaaatctagtgaacagaatggaatggagcaaaagacaattattttaataccctctgatttagcatgtagactgctggggcaatcaatggatgaaagtggattaccacagctgaccagttatgattgtgaagttaatgctcctatacaaggcagcagaaacctactgcagggtgaagaattactcagagctttggatcaagttaactgagctttttcttaatttcattcctttttttggacactggtggctcactacctaaagcagtctatttatattttctacatctaattttagaagcctggctacaatactgcacaaacttggttagttcaatttttgatcccctttctacttaatttacattaatgctcttttttagtatgttctttaatgctggatcacagacagctcattttctcagttttttggtatttaaaccattgcattgcagtagcatcattttaaaaaatgcacctttttatttatttatttttggctagggagtttatccctttttcgaattatttttaagaagatgccaatataatttttgtaagaaggcagtaacctttcatcatgatcataggcagttgaaaaatttttacaccttttttttcacattttacataaataataatgctttgccagcagtacgtggtagccacaattgcacaatatattttcttaaaaaataccagcagttactcatggaatatattctgcgtttataaaactagtttttaagaagaaattttttttggcctatgaaattgttaaacctggaacatgacattgttaatcatataataatgattcttaaatgctgtatggtttattatttaaatgggtaaagccatttacataatatagaaagatatgcatatatctagaaggtatgtggcatttatttggataaaattctcaattcagagaaatcatctgatgtttctatagtcactttgccagctcaaaagaaaacaataccctatgtagttgtggaagtttatgctaatattgtgtaactgatattaaacctaaatgttctgcctaccctgttggtataaagatattttgagcagactgtaaacaagaaaaaaaaaatcatgcattcttagcaaaattgcctagtatgttaatttgctcaaaatacaatgtttgattttatgcactttgtcgctattaacatcctttttttcatgtagatttcaataattgagtaattttagaagcattattttaggaatatatagttgtcacagtaaatatcttgttttttctatgtacattgtacaaatttttcattccttttgctctttgtggttggatctaacactaactgtattgttttgttacatcaaataaacatcttctgtggaccagg

SEQ ID NO: 361059 - DNA, 3951 bp, Homo sapiens
cgccccctgacgctgcctcagctcctcagtgcacagtgctgcctcgtctgaggggacaggaggatcaccctcttcgtcgcttcggccagtgtgtcgggctgggccctgacaagccacctgaggagaggctcggagccgggcccggaccccggcgattgccgcccgcttctctctagtctcacgaggggtttcccgcctcgcacccccacctctggacttgcctttccttctcttctccgcgtgtggagggagccagcgcttaggccggagcgagcctgggggccgcccgccgtgaagacatcgcggggaccgattcaccatggagggcgccggcggcgcgaacgacaagaaaaagataagttctgaacgtcgaaaagaaaagtctcgagatgcagccagatctcggcgaagtaaagaatctgaagttttttatgagcttgctcatcagttgccacttccacataatgtgagttcgcatcttgataaggcctctgtgatgaggcttaccatcagctatttgcgtgtgaggaaacttctggatgctggtgatttggatattgaagatgacatgaaagcacagatgaattgcttttatttgaaagccttggatggttttgttatggttctcacagatgatggtgacatgatttacatttctgataatgtgaacaaatacatgggattaactcagtttgaactaactggacacagtgtgtttgattttactcatccatgtgaccatgaggaaatgagagaaatgcttacacacagaaatggccttgtgaaaaagggtaaagaacaaaacacacagcgaagcttttttctcagaatgaagtgtaccctaactagccgaggaagaactatgaacataaagtctgcaacatggaaggtattgcactgcacaggccacattcacgtatatgataccaacagtaaccaacctcagtgtgggtataagaaaccacctatgacctgcttggtgctgatttgtgaacccattcctcacccatcaaatattgaaattcctttagatagcaagactttcctcagtcgacacagcctggatatgaaattttcttattgtgatgaaagaattaccgaattgatgggatatgagccagaagaacttttaggccgctcaatttatgaatattatcatgctttggactctgatcatctgaccaaaactcatcatgatatgtttactaaaggacaagtcaccacaggacagtacaggatgcttgccaaaagaggtggatatgtctgggttgaaactcaagcaactgtcatatataacaccaagaattctcaaccacagtgcattgtatgtgtgaattacgttgtgagtggtattattcagcacgacttgattttctcccttcaacaaacagaatgtgtccttaaaccggttgaatcttcagatatgaaaatgactcagctattcaccaaagttgaatcagaagatacaaaaggaacctgatgctttaactttgctggccccagccgctggagacacaatcatatctttagattttggcagcaacgacacagaaactgatgaccagcaacttgaggaagtaccattatataatgatgtaatgctcccctcacccaacgaaaaattacagaatataaatttggcaatgtctccattacccaccgctgaaacgccaaagccacttcgaagtagtgctgaccctgcactcaatcaagaagttgcattaaaattagaaccaaatccagagtcactggaactttcttttaccatgccccagattcaggatcagacacctagtccttccgatggaagcactagacaaagttcacctgagcctaatagtcccagtgaatattgtttttatgtggatagtgatatggtcaatgaattcaagttggaattggtagaaaaactttttgctgaagacacagaagcaaagaacccattttctactcaggacacagatttagacttggagatgttagctccctatatcccaatggatgatgacttccagttacgttccttcgatcagttgtcaccattagaaagcagttccgcaagccctgaaagcgcaagtcctcaaagcacagttacagtattccagcagactcaaatacaagaacctactgctaatgccaccactaccactgccaccactgatgaattaaaaacagtgacaaaagaccgtatggaagacattaaaatattgattgcatctccatctcctacccacatacataaagaaactactagtgccacatcatcaccatatagagatactcaaagtcggacagcctcaccaaacagagcaggaaaaggagtcatagaacagacagaaaaatctcatccaagaagccctaacgtgttatctgtcgctttgagtcaaagaactacagttcctgaggaagaactaaatccaaagatactagctttgcagaatgctcagagaaagcgaaaaatggaacatgatggttcactttttcaagcagtaggaattggaacattattacagcagccagacgatcatgcagctactacatcactttcttggaaacgtgtaaaaggatgcaaatctagtgaacagaatggaatggagcaaaagacaattattttaataccctctgatttagcatgtagactgctggggcaatcaatggatgaaagtggattaccacagctgaccagttatgattgtgaagttaatgctcctatacaaggcagcagaaacctactgcagggtgaagaattactcagagctttggatcaagttaactgagctttttcttaatttcattcctttttttggacactggtggctcactacctaaagcagtctatttatattttctacatctaattttagaagcctggctacaatactgcacaaacttggttagttcaatttttgatcccctttctacttaatttacattaatgctcttttttagtatgttctttaatgctggatcacagacagctcattttctcagttttttggtatttaaaccattgcattgcagtagcatcattttaaaaaatgcacctttttatttatttatttttggctagggagtttatccctttttcgaattatttttaagaagatgccaatataatttttgtaagaaggcagtaacctttcatcatgatcataggcagttgaaaaatttttacaccttttttttcacattttacataaataataatgctttgccagcagtacgtggtagccacaattgcacaatatattttcttaaaaaataccagcagttactcatggaatatattctgcgtttataaaactagtttttaagaagaaattttttttggcctatgaaattgttaaacctggaacatgacattgttaatcatataataatgattcttaaatgctgtatggtttattatttaaatgggtaaagccatttacataatatagaaagatatgcatatatctagaaggtatgtggcatttatttggataaaattctcaattcagagaaatcatctgatgtttctatagtcactttgccagctcaaaagaaaacaataccctatgtagttgtggaagtttatgctaatattgtgtaactgatattaaacctaaatgttctgcctaccctgttggtataaagatattttgagcagactgtaaacaagaaaaaaaaaatcatgcattcttagcaaaattgcctagtatgttaatttgctcaaaatacaatgtttgattttatgcactttgtcgctattaacatcctttttttcatgtagatttcaataattgagtaattttagaagcattattttaggaatatatagttgtcacagtaaatatcttgttttttctatgtacattgtacaaatttttcattccttttgctctttgtggttggatctaacactaactgtattgttttgttacatcaaataaacatcttctgtggaccagg

SEQ ID NO: 361060 - DNA, 3597 bp, Homo sapiens
cgccccctgacgctgcctcagctcctcagtgcacagtgctgcctcgtctgaggggacaggaggatcaccctcttcgtcgcttcggccagtgtgtcgggctgggccctgacaagccacctgaggagaggctcggagccgggcccggaccccggcgattgccgcccgcttctctctagtctcacgaggggtttcccgcctcgcacccccacctctggacttgcctttccttctcttctccgcgtgtggagggagccagcgcttaggccggagcgagcctgggggccgcccgccgtgaagacatcgcggggaccgattcaccatggagggcgccggcggcgcgaacgacaagaaaaagataagttctgaacgtcgaaaagaaaagtctcgagatgcagccagatctcggcgaagtaaagaatctgaagttttttatgagcttgctcatcagttgccacttccacataatgtgagttcgcatcttgataaggcctctgtgatgaggcttaccatcagctatttgcgtgtgaggaaacttctggatgctggtgatttggatattgaagatgacatgaaagcacagatgaattgcttttatttgaaagccttggatggttttgttatggttctcacagatgatggtgacatgatttacatttctgataatgtgaacaaatacatgggattaactcagtttgaactaactggacacagtgtgtttgattttactcatccatgtgaccatgaggaaatgagagaaatgcttacacacagaaatggccttgtgaaaaagggtaaagaacaaaacacacagcgaagcttttttctcagaatgaagtgtaccctaactagccgaggaagaactatgaacataaagtctgcaacatggaaggtattgcactgcacaggccacattcacgtatatgataccaacagtaaccaacctcagtgtgggtataagaaaccacctatgacctgcttggtgctgatttgtgaacccattcctcacccatcaaatattgaaattcctttagatagcaagactttcctcagtcgacacagcctggatatgaaattttcttattgtgatgaaagaattaccgaattgatgggatatgagccagaagaacttttaggccgctcaatttatgaatattatcatgctttggactctgatcatctgaccaaaactcatcatgatatgtttactaaaggacaagtcaccacaggacagtacaggatgcttgccaaaagaggtggatatgtctgggttgaaactcaagcaactgtcatatataacaccaagaattctcaaccacagtgcattgtatgtgtgaattacgttgtgagtggtattattcagcacgacttgattttctcccttcaacaaacagaatgtgtccttaaaccggttgaatcttcagatatgaaaatgactcagctattcaccaaagttgaatcagaagatacaagtagcctctttgacaaacttaagaaggaacctgatgctttaactttgctggccccagccgctggagacacaatcatatctttagattttggcagcaacgacacagaaactgatgaccagcaacttgaggaagtaccattatataatgatgtaatgctcccctcacccaacgaaaaattacagaatataaatttggcaatgtctccattacccaccgctgaaacgccaaagccacttcgaagtagtgctgaccctgcactcaatcaagaagttgcattaaaattagaaccaaatccagagtcactggaactttcttttaccatgccccagattcaggatcagacacctagtccttccgatggaagcactagacaaagttcacctgagcctaatagtcccagtgaatattgtttttatgtggatagtgatatggtcaatgaattcaagttggaattggtagaaaaactttttgctgaagacacagaagcaaagaacccattttctactcaggacacagatttagacttggagatgttagctccctatatcccaatggatgatgacttccagttacgttccttcgatcagttgtcaccattagaaagcagttccgcaagccctgaaagcgcaagtcctcaaagcacagttacagtattccagcagactcaaatacaagaacctactgctaatgccaccactaccactgccaccactgatgaattaaaaacagtgacaaaagaccgtatggaagacattaaaatattgattgcatctccatctcctacccacatacataaagaaactactagtgccacatcatcaccatatagagatactcaaagtcggacagcctcaccaaacagagcaggaaaaggagtcatagaacagacagaaaaatctcatccaagaagccctaacgtgttatctgtcgctttgagtcaaagaactacagttcctgaggaagaactaaatccaaagatactagctttgcagaatgctcagagaaagcgaaaaatggaacatgatggttcactttttcaagcagtaggaattggaacattattacagcagccagacgatcatgcagctactacatcactttcttggaaacgtgtaaaaggatgcaaatctagtgaacagaatggaatggagcaaaagacaattattttaataccctctgatttagcatgtagactgctggggcaatcaatggatgaaagtggattaccacagctgaccagttatgattgtgaagttaatgctcctatacaaggcagcagaaacctactgcagggtgaagaattactcagagctttggatcaagttaactgagctttttcttaatttcattcctttttttggacactggtggctcactacctaaagcagtctatttatattttctacatctaattttagaagcctggctacaataaaaaataccagcagttactcatggaatatattctgcgtttataaaactagtttttaagaagaaattttttttggcctatgaaattgttaaacctggaacatgacattgttaatcatataataatgattcttaaatgctgtatggtttattatttaaatgggtaaagccatttacataatatagaaagatatgcatatatctagaaggtatgtggcatttatttggataaaattctcaattcagagaaatcatctgatgtttctatagtcactttgccagctcaaaagaaaacaataccctatgtagttgtggaagtttatgctaatattgtgtaactgatattaaacctaaatgttctgcctaccctgttggtataaagatattttgagcagactgtaaacaagaaaaaaaaaatcatgcattcttagcaaaattgcctagtatgttaatttgctcaaaatacaatgtttgattttatgcactttgtcgctattaacatcctttttttcatgtagatttcaataattgagtaattttagaagcattattttaggaatatatagttgtcacagtaaatatcttgttttttctatgtacattgtacaaatttttcattccttttgctctttgtggttggatctaacactaactgtattgttttgttacatcaaataaacatcttctgtggaccagg

SEQ ID NO: 361061 - DNA, 3847 bp, Homo sapiens
cgccccctgacgctgcctcagctcctcagtgcacagtgctgcctcgtctgaggggacaggaggatcaccctcttcgtcgcttcggccagtgtgtcgggctgggccctgacaagccacctgaggagaggctcggagccgggcccggaccccggcgattgccgcccgcttctctctagtctcacgaggggtttcccgcctcgcacccccacctctggacttgcctttccttctcttctccgcgtgtggagggagccagcgcttaggccggagcgagcctgggggccgcccgccgtgaagacatcgcggggaccgattcaccatggagggcgccggcggcgcgaacgacaagaaaaagataagttctgaacgtcgaaaagaaaagtctcgagatgcagccagatctcggcgaagtaaagaatctgaagttttttatgagcttgctcatcagttgccacttccacataatgtgagttcgcatcttgataaggcctctgtgatgaggcttaccatcagctatttgcgtgtgaggaaacttctggatgctggtgatttggatattgaagatgacatgaaagcacagatgaattgcttttatttgaaagccttggatggttttgttatggttctcacagatgatggtgacatgatttacatttctgataatgtgaacaaatacatgggattaactcagtttgaactaactggacacagtgtgtttgattttactcatccatgtgaccatgaggaaatgagagaaatgcttacacacagaaatggccttgtgaaaaagggtaaagaacaaaacacacagcgaagcttttttctcagaatgaagtgtaccctaactagccgaggaagaactatgaacataaagtctgcaacatggaaggtattgcactgcacaggccacattcacgtatatgataccaacagtaaccaacctcagtgtgggtataagaaaccacctatgacctgcttggtgctgatttgtgaacccattcctcacccatcaaatattgaaattcctttagatagcaagactttcctcagtcgacacagcctggatatgaaattttcttattgtgatgaaagaattaccgaattgatgggatatgagccagaagaacttttaggccgctcaatttatgaatattatcatgctttggactctgatcatctgaccaaaactcatcatgatatgtttactaaaggacaagtcaccacaggacagtacaggatgcttgccaaaagaggtggatatgtctgggttgaaactcaagcaactgtcatatataacaccaagaattctcaaccacagtgcattgtatgtgtgaattacgttgtgagtggtattattcagcacgacttgattttctcccttcaacaaacagaatgtgtccttaaaccggttgaatcttcagatatgaaaatgactcagctattcaccaaagttgaatcagaagatacaagtagcctctttgacaaacttaagaaggaacctgatgctttaactttgctggccccagccgctggagacacaatcatatctttagattttggcagcaacgacacagaaactgatgaccagcaacttgaggaagtaccattatataatgatgtaatgctcccctcacccaacgaaaaattacagaatataaatttggcaatgtctccattacccaccgctgaaacgccaaagccacttcgaagtagtgctgaccctgcactcaatcaagaagttgcattaaaattagaaccaaatccagagtcactggaactttcttttaccatgccccagattcaggatcagacacctagtccttccgatggaagcactagacaaagttcacctgagcctaatagtcccagtgaatattgtttttatgtggatagtgatatggtcaatgaattcaagttggaattggtagaaaaactttttgctgaagacacagaagcaaagaacccattttctactcaggacacagatttagacttggagatgttagctccctatatcccaatggatgatgacttccagttacgttccttcgatcagttgtcaccattagaaagcagttccgcaagccctgaaagcgcaagtcctcaaagcacagttacagtattccagcagactcaaatacaagaacctactgctaatgccaccactaccactgccaccactgatgaattaaaaacagtgacaaaagaccgtatggaagacattaaaatattgattgcatctccatctcctacccacatacataaagaaactactagtgccacatcatcaccatatagagatactcaaagtcggacagcctcaccaaacagagcaggaaaaggagtcatagaacagacagaaaaatctcatccaagaagccctaacgtgttatctgtcgctttgagtcaaagaactacagttcctgaggaagaactaaatccaaagatactagctttgcagaatgctcagagaaagcgaaaaatggaacatgatggttcactttttcaagcagtaggaattatttagcatgtagactgctggggcaatcaatggatgaaagtggattaccacagctgaccagttatgattgtgaagttaatgctcctatacaaggcagcagaaacctactgcagggtgaagaattactcagagctttggatcaagttaactgagctttttcttaatttcattcctttttttggacactggtggctcactacctaaagcagtctatttatattttctacatctaattttagaagcctggctacaatactgcacaaacttggttagttcaatttttgatcccctttctacttaatttacattaatgctcttttttagtatgttctttaatgctggatcacagacagctcattttctcagttttttggtatttaaaccattgcattgcagtagcatcattttaaaaaatgcacctttttatttatttatttttggctagggagtttatccctttttcgaattatttttaagaagatgccaatataatttttgtaagaaggcagtaacctttcatcatgatcataggcagttgaaaaatttttacaccttttttttcacattttacataaataataatgctttgccagcagtacgtggtagccacaattgcacaatatattttcttaaaaaataccagcagttactcatggaatatattctgcgtttataaaactagtttttaagaagaaattttttttggcctatgaaattgttaaacctggaacatgacattgttaatcatataataatgattcttaaatgctgtatggtttattatttaaatgggtaaagccatttacataatatagaaagatatgcatatatctagaaggtatgtggcatttatttggataaaattctcaattcagagaaatcatctgatgtttctatagtcactttgccagctcaaaagaaaacaataccctatgtagttgtggaagtttatgctaatattgtgtaactgatattaaacctaaatgttctgcctaccctgttggtataaagatattttgagcagactgtaaacaagaaaaaaaaaatcatgcattcttagcaaaattgcctagtatgttaatttgctcaaaatacaatgtttgattttatgcactttgtcgctattaacatcctttttttcatgtagatttcaataattgagtaattttagaagcattattttaggaatatatagttgtcacagtaaatatcttgttttttctatgtacattgtacaaatttttcattccttttgctctttgtggttggatctaacactaactgtattgttttgttacatcaaataaacatcttctgtggaccagg

SEQ ID NO: 361062 - DNA, 2577 bp, Homo sapiens
tagtagatcagggactttcattgacaatttttttttttttttgagacggagtctggctctgtcgcccaggctggagtgcagtggcacaatctcagctcactgcaagctccgcctccctggttcacgccattctcctgcctcagccttccgactgggattacaggcgtttgccaccatgcctagctaatttttgtatttttagtagagacgaggtttcaccatgttggccaggatggtctcgatctcttgacctcattatccctccaccttggcttcccaaagtgctgggattacaggcgtgagccactgagcccggcctagttaaataaaatttgataaacacgatggacttggttgtgtgttttctggtttttctgagatctagtttgaaaattctgacaactagcaaagtatatggaagcttcttcaggaaatagtaaacatatttctttttacagcctaatagtcccagtgaatattgtttttatgtggatagtgatatggtcaatgaattcaagttggaattggtagaaaaactttttgctgaagacacagaagcaaagaacccattttctactcaggacacagatttagacttggagatgttagctccctatatcccaatggatgatgacttccagttacgttccttcgatcagttgtcaccattagaaagcagttccgcaagccctgaaagcgcaagtcctcaaagcacagttacagtattccagcagactcaaatacaagaacctactgctaatgccaccactaccactgccaccactgatgaattaaaaacagtgacaaaagaccgtatggaagacattaaaatattgattgcatctccatctcctacccacatacataaagaaactactagtgccacatcatcaccatatagagatactcaaagtcggacagcctcaccaaacagagcaggaaaaggagtcatagaacagacagaaaaatctcatccaagaagccctaacgtgttatctgtcgctttgagtcaaagaactacagttcctgaggaagaactaaatccaaagatactagctttgcagaatgctcagagaaagcgaaaaatggaacatgatggttcactttttcaagcagtaggaattggaacattattacagcagccagacgatcatgcagctactacatcactttcttggaaacgtgtaaaaggatgcaaatctagtgaacagaatggaatggagcaaaagacaattattttaataccctctgatttagcatgtagactgctggggcaatcaatggatgaaagtggattaccacagctgaccagttatgattgtgaagttaatgctcctatacaaggcagcagaaacctactgcagggtgaagaattactcagagctttggatcaagttaactgagctttttcttaatttcattcctttttttggacactggtggctcactacctaaagcagtctatttatattttctacatctaattttagaagcctggctacaatactgcacaaacttggttagttcaatttttgatcccctttctacttaatttacattaatgctcttttttagtatgttctttaatgctggatcacagacagctcattttctcagttttttggtatttaaaccattgcattgcagtagcatcattttaaaaaatgcacctttttatttatttatttttggctagggagtttatccctttttcgaattatttttaagaagatgccaatataatttttgtaagaaggcagtaacctttcatcatgatcataggcagttgaaaaatttttacaccttttttttcacattttacataaataataatgctttgccagcagtacgtggtagccacaattgcacaatatattttcttaaaaaataccagcagttactcatggaatatattctgcgtttataaaactagtttttaagaagaaattttttttggcctatgaaattgttaaacctggaacatgacattgttaatcatataataatgattcttaaatgctgtatggtttattatttaaatgggtaaagccatttacataatatagaaagatatgcatatatctagaaggtatgtggcatttatttggataaaattctcaattcagagaaatcatctgatgtttctatagtcactttgccagctcaaaagaaaacaataccctatgtagttgtggaagtttatgctaatattgtgtaactgatattaaacctaaatgttctgcctaccctgttggtataaagatattttgagcagactgtaaacaagaaaaaaaaaatcatgcattcttagcaaaattgcctagtatgttaatttgctcaaaatacaatgtttgattttatgcactttgtcgctattaacatcctttttttcatgtagatttcaataattgagtaattttagaagcattattttaggaatatatagttgtcacagtaaatatcttgttttttctatgtacattgtacaaatttttcattccttttgctctttgtggttggatctaacactaactgtattgttttgttacatcaaataaacatcttctgtggaccagg

SEQ ID NO: 361063 - DNA, 1889 bp, Homo sapiens
ctcctacccacatacataaagaaactactagtgccacatcatcaccatatagagatacaatcaatatgctaatgccaccactaccactgccaccactgatgaattaaaaacagtgacaaaagaccgtatggaagacattaaaatattgattgcatctccatctcctacccacatacataaagaaactactagtgccacatcatcaccatatagagatactcaaagtcggacagcctcaccaaacagagcaggaaaaggagtcatagaacagacagaaaaatctcatccaagaagccctaacgtgttatctgtcgctttgagtcaaagaactacagttcctgaggaagaactaaatccaaagatactagctttgcagaatgctcagagaaagcgaaaaatggaacatgatggttcactttttcaagcagtaggaattggaacattattacagcagccagacgatcatgcagctactacatcactttcttggaaacgtgtaaaaggatgcaaatctagtgaacagaatggaatggagcaaaagacaattattttaataccctctgatttagcatgtagactgctggggcaatcaatggatgaaagtggattaccacagctgaccagttatgattgtgaagttaatgctcctatacaaggcagcagaaacctactgcagggtgaagaattactcagagctttggatcaagttaactgagctttttcttaatttcattcctttttttggacactggtggctcactacctaaagcagtctatttatattttctacatctaattttagaagcctggctacaatactgcacaaacttggttagttcaatttttgatcccctttctacttaatttacattaatgctcttttttagtatgttctttaatgctggatcacagacagctcattttctcagttttttggtatttaaaccattgcattgcagtagcatcattttaaaaaatgcacctttttatttatttatttttggctagggagtttatccctttttcgaattatttttaagaagatgccaatataatttttgtaagaaggcagtaacctttcatcatgatcataggcagttgaaaaatttttacaccttttttttcacattttacataaataataatgctttgccagcagtacgtggtagccacaattgcacaatatattttcttaaaaaataccagcagttactcatggaatatattctgcgtttataaaactagtttttaagaagaaattttttttggcctatgaaattgttaaacctggaacatgacattgttaatcatataataatgattcttaaatgctgtatggtttattatttaaatgggtaaagccatttacataatatagaaagatatgcatatatctagaaggtatgtggcatttatttggataaaattctcaattcagagaaatcatctgatgtttctatagtcactttgccagctcaaaagaaaacaataccctatgtagttgtggaagtttatgctaatattgtgtaactgatattaaacctaaatgttctgcctaccctgttggtataaagatattttgagcagactgtaaacaagaaaaaaaaaatcatgcattcttagcaaaattgcctagtatgttaatttgctcaaaatacaatgtttgattttatgcactttgtcgctattaacatcctttttttcatgtagatttcaataattgagtaattttagaagcattattttaggaatatatagttgtcacagtaaatatcttgttttttctatgtacattgtacaaatttttcattccttttgctctttgtggttggatctaacactaactgtattgttttgttacatcaaataaacatcttctgtggaccagg

SEQ ID NO: 361064 - DNA, 1783 bp, Homo sapiens
gtctgagtccacaaggaccagactgcacccggcacacaacacgtggaagctcaacaaagccaaagcatacataaagaaactactagtgccacatcatcaccatatagagatactcaaagtcggacagcctcaccaaacagagcaggaaaaggagtcatagaacagacagaaaaatctcatccaagaagccctaacgtgttatctgtcgctttgagtcaaagaactacagttcctgaggaagaactaaatccaaagatactagctttgcagaatgctcagagaaagcgaaaaatggaacatgatggttcactttttcaagcagtaggaattggaacattattacagcagccagacgatcatgcagctactacatcactttcttggaaacgtgtaaaaggatgcaaatctagtgaacagaatggaatggagcaaaagacaattattttaataccctctgatttagcatgtagactgctggggcaatcaatggatgaaagtggattaccacagctgaccagttatgattgtgaagttaatgctcctatacaaggcagcagaaacctactgcagggtgaagaattactcagagctttggatcaagttaactgagctttttcttaatttcattcctttttttggacactggtggctcactacctaaagcagtctatttatattttctacatctaattttagaagcctggctacaatactgcacaaacttggttagttcaatttttgatcccctttctacttaatttacattaatgctcttttttagtatgttctttaatgctggatcacagacagctcattttctcagttttttggtatttaaaccattgcattgcagtagcatcattttaaaaaatgcacctttttatttatttatttttggctagggagtttatccctttttcgaattatttttaagaagatgccaatataatttttgtaagaaggcagtaacctttcatcatgatcataggcagttgaaaaatttttacaccttttttttcacattttacataaataataatgctttgccagcagtacgtggtagccacaattgcacaatatattttcttaaaaaataccagcagttactcatggaatatattctgcgtttataaaactagtttttaagaagaaattttttttggcctatgaaattgttaaacctggaacatgacattgttaatcatataataatgattcttaaatgctgtatggtttattatttaaatgggtaaagccatttacataatatagaaagatatgcatatatctagaaggtatgtggcatttatttggataaaattctcaattcagagaaatcatctgatgtttctatagtcactttgccagctcaaaagaaaacaataccctatgtagttgtggaagtttatgctaatattgtgtaactgatattaaacctaaatgttctgcctaccctgttggtataaagatattttgagcagactgtaaacaagaaaaaaaaaatcatgcattcttagcaaaattgcctagtatgttaatttgctcaaaatacaatgtttgattttatgcactttgtcgctattaacatcctttttttcatgtagatttcaataattgagtaattttagaagcattattttaggaatatatagttgtcacagtaaatatcttgttttttctatgtacattgtacaaatttttcattccttttgctctttgtggttggatctaacactaactgtattgttttgttacatcaaataaacatcttctgtggaccagg

SEQ ID NO: 361065 - DNA, 1524 bp, Homo sapiens
gtaggaataggaacattattacagcttgaaaaagtgaaccatcatgttccatttttcaagcagtaggaattggaacattattacagcagccagacgatcatgcagctactacatcactttcttggaaacgtgtaaaaggatgcaaatctagtgaacagaatggaatggagcaaaagacaattattttaataccctctgatttagcatgtagactgctggggcaatcaatggatgaaagtggattaccacagctgaccagttatgattgtgaagttaatgctcctatacaaggcagcagaaacctactgcagggtgaagaattactcagagctttggatcaagttaactgagctttttcttaatttcattcctttttttggacactggtggctcactacctaaagcagtctatttatattttctacatctaattttagaagcctggctacaatactgcacaaacttggttagttcaatttttgatcccctttctacttaatttacattaatgctcttttttagtatgttctttaatgctggatcacagacagctcattttctcagttttttggtatttaaaccattgcattgcagtagcatcattttaaaaaatgcacctttttatttatttatttttggctagggagtttatccctttttcgaattatttttaagaagatgccaatataatttttgtaagaaggcagtaacctttcatcatgatcataggcagttgaaaaatttttacaccttttttttcacattttacataaataataatgctttgccagcagtacgtggtagccacaattgcacaatatattttcttaaaaaataccagcagttactcatggaatatattctgcgtttataaaactagtttttaagaagaaattttttttggcctatgaaattgttaaacctggaacatgacattgttaatcatataataatgattcttaaatgctgtatggtttattatttaaatgggtaaagccatttacataatatagaaagatatgcatatatctagaaggtatgtggcatttatttggataaaattctcaattcagagaaatcatctgatgtttctatagtcactttgccagctcaaaagaaaacaataccctatgtagttgtggaagtttatgctaatattgtgtaactgatattaaacctaaatgttctgcctaccctgttggtataaagatattttgagcagactgtaaacaagaaaaaaaaaatcatgcattcttagcaaaattgcctagtatgttaatttgctcaaaatacaatgtttgattttatgcactttgtcgctattaacatcctttttttcatgtagatttcaataattgagtaattttagaagcattattttaggaatatatagttgtcacagtaaatatcttgttttttctatgtacattgtacaaatttttcattccttttgctctttgtggttggatctaacactaactgtattgttttgttacatcaaataaacatcttctgtggaccagg

SEQ ID NO: 361066 - DNA, 1597 bp, Homo sapiens
acttaagaaagaattcaaaataatttagggtagtatttaagaaactgcctataatgttattaaatttacaccaatttcaaggtttttggttgtttaaaaaaaaaattcaacaaactaaacttgaaataactttactgtttatagggaacattattacagcagccagacgatcatgcagctactacatcactttcttggaaacgtgtaaaaggatgcaaatctagtgaacagaatggaatggagcaaaagacaattattttaataccctctgatttagcatgtagactgctggggcaatcaatggatgaaagtggattaccacagctgaccagttatgattgtgaagttaatgctcctatacaaggcagcagaaacctactgcagggtgaagaattactcagagctttggatcaagttaactgagctttttcttaatttcattcctttttttggacactggtggctcactacctaaagcagtctatttatattttctacatctaattttagaagcctggctacaatactgcacaaacttggttagttcaatttttgatcccctttctacttaatttacattaatgctcttttttagtatgttctttaatgctggatcacagacagctcattttctcagttttttggtatttaaaccattgcattgcagtagcatcattttaaaaaatgcacctttttatttatttatttttggctagggagtttatccctttttcgaattatttttaagaagatgccaatataatttttgtaagaaggcagtaacctttcatcatgatcataggcagttgaaaaatttttacaccttttttttcacattttacataaataataatgctttgccagcagtacgtggtagccacaattgcacaatatattttcttaaaaaataccagcagttactcatggaatatattctgcgtttataaaactagtttttaagaagaaattttttttggcctatgaaattgttaaacctggaacatgacattgttaatcatataataatgattcttaaatgctgtatggtttattatttaaatgggtaaagccatttacataatatagaaagatatgcatatatctagaaggtatgtggcatttatttggataaaattctcaattcagagaaatcatctgatgtttctatagtcactttgccagctcaaaagaaaacaataccctatgtagttgtggaagtttatgctaatattgtgtaactgatattaaacctaaatgttctgcctaccctgttggtataaagatattttgagcagactgtaaacaagaaaaaaaaaatcatgcattcttagcaaaattgcctagtatgttaatttgctcaaaatacaatgtttgattttatgcactttgtcgctattaacatcctttttttcatgtagatttcaataattgagtaattttagaagcattattttaggaatatatagttgtcacagtaaatatcttgttttttctatgtacattgtacaaatttttcattccttttgctctttgtggttggatctaacactaactgtattgttttgttacatcaaataaacatcttctgtggaccagg

SEQ ID NO: 361067 - DNA, 2116 bp, Homo sapiens
cgccccctgacgctgcctcagctcctcagtgcacagtgctgcctcgtctgaggggacaggaggatcaccctcttcgtcgcttcggccagtgtgtcgggctgggccctgacaagccacctgaggagaggctcggagccgggcccggaccccggcgattgccgcccgcttctctctagtctcacgaggggtttcccgcctcgcacccccacctctggacttgcctttccttctcttctccgcgtgtggagggagccagcgcttaggccggagcgagcctgggggccgcccgccgtgaagacatcgcggggaccgattcaccatggagggcgccggcggcgcgaacgacaagaaaaagataagttctgaacgtcgaaaagaaaagtctcgagatgcagccagatctcggcgaagtaaagaatctgaagttttttatgagcttgctcatcagttgccacttccacataatgtgagttcgcatcttgataaggcctctgtgatgaggcttaccatcagctatttgcgtgtgaggaaacttctggatgctggtgatttggatattgaagatgacatgaaagcacagatgaattgcttttatttgaaagccttggatggttttgttatggttctcacagatgatggtgacatgatttacatttctgataatgtgaacaaatacatgggattaactcagtttgaactaactggacacagtgtgtttgattttactcatccatgtgaccatgaggaaatgagagaaatgcttacacacagaaatggccttgtgaaaaagggtaaagaacaaaacacacagcgaagcttttttctcagaatgaagtgtaccctaactagccgaggaagaactatgaacataaagtctgcaacatggaaggtattgcactgcacaggccacattcacgtatatgataccaacagtaaccaacctcagtgtgggtataagaaaccacctatgacctgcttggtgctgatttgtgaacccattcctcacccatcaaatattgaaattcctttagatagcaagactttcctcagtcgacacagcctggatatgaaattttcttattgtgatgaaagaattaccgaattgatgggatatgagccagaagaacttttaggccgctcaatttatgaatattatcatgctttggactctgatcatctgaccaaaactcatcatgatatgtttactaaaggacaagtcaccacaggacagtacaggatgcttgccaaaagaggtggatatgtctgggttgaaactcaagcaactgtcatatataacaccaagaattctcaaccacagtgcattgtatgtgtgaattacgttgtgagtggtattattcagcacgacttgattttctcccttcaacaaacagaatgtgtccttaaaccggttgaatcttcagatatgaaaatgactcagctattcaccaaagttgaatcagaagatacaagtagcctctttgacaaacttaagaaggaacctgatgctttaactttgctggccccagccgctggagacacaatcatatctttagattttggcagcaacgacacagaaactgatgaccagcaacttgaggaagtaccattatataatgatgtaatgctcccctcacccaacgaaaaattacagaatataaatttggcaatgtctccattacccaccgctgaaacgccaaagccacttcgaagtagtgctgaccctgcactcaatcaagaagttgcattaaaattagaaccaaatccagagtcactggaactttcttttaccatgccccagattcaggatcagacacctagtccttccgatggaagcactagacaaagttcacctgagcctaatagtcccagtgaatattgtttttatgtggatagtgatatggtcaatgaattcaagttggaattggtagaaaaactttttgctgaagacacagaagcaaagaacccattttctactcaggacacagatttagacttggagatgttagctccctatatcccaatggatgatgacttccagttccgccgcttggttcatcgccaacatttcaacccatcgccactgcctcgaatctccaatccctatacacacctcccg

SEQ ID NO: 361068 - DNA, 2043 bp, Homo sapiens
  misc_feature (2036)..(2036): n is a, c, g, or t
cgccccctgacgctgcctcagctcctcagtgcacagtgctgcctcgtctgaggggacaggaggatcaccctcttcgtcgcttcggccagtgtgtcgggctgggccctgacaagccacctgaggagaggctcggagccgggcccggaccccggcgattgccgcccgcttctctctagtctcacgaggggtttcccgcctcgcacccccacctctggacttgcctttccttctcttctccgcgtgtggagggagccagcgcttaggccggagcgagcctgggggccgcccgccgtgaagacatcgcggggaccgattcaccatggagggcgccggcggcgcgaacgacaagaaaaagataagttctgaacgtcgaaaagaaaagtctcgagatgcagccagatctcggcgaagtaaagaatctgaagttttttatgagcttgctcatcagttgccacttccacataatgtgagttcgcatcttgataaggcctctgtgatgaggcttaccatcagctatttgcgtgtgaggaaacttctggatgctggtgatttggatattgaagatgacatgaaagcacagatgaattgcttttatttgaaagccttggatggttttgttatggttctcacagatgatggtgacatgatttacatttctgataatgtgaacaaatacatgggattaactcagtttgaactaactggacacagtgtgtttgattttactcatccatgtgaccatgaggaaatgagagaaatgcttacacacagaaatggccttgtgaaaaagggtaaagaacaaaacacacagcgaagcttttttctcagaatgaagtgtaccctaactagccgaggaagaactatgaacataaagtctgcaacatggaaggtattgcactgcacaggccacattcacgtatatgataccaacagtaaccaacctcagtgtgggtataagaaaccacctatgacctgcttggtgctgatttgtgaacccattcctcacccatcaaatattgaaattcctttagatagcaagactttcctcagtcgacacagcctggatatgaaattttcttattgtgatgaaagaattaccgaattgatgggatatgagccagaagaacttttaggccgctcaatttatgaatattatcatgctttggactctgatcatctgaccaaaactcatcatgatatgtttactaaaggacaagtcaccacaggacagtacaggatgcttgccaaaagaggtggatatgtctgggttgaaactcaagcaactgtcatatataacaccaagaattctcaaccacagtgcattgtatgtgtgaattacgttgtgagtggtattattcagcacgacttgattttctcccttcaacaaacagaatgtgtccttaaaccggttgaatcttcagatatgaaaatgactcagctattcaccaaagttgaatcagaagatacaagtagcctctttgacaaacttaagaaggaacctgatgctttaactttgctggccccagccgctggagacacaatcatatctttagattttggcagcaacgacacagaaactgatgaccagcaacttgaggaagtaccattatataatgatgtaatgctcccctcacccaacgaaaaattacagaatataaatttggcaatgtctccattacccaccgctgaaacgccaaagccacttcgaagtagtgctgaccctgcactcaatcaagaagttgcattaaaattagaaccaaatccagagtcactggaactttcttttaccatgccccagattcaggatcagacacctagtccttccgatggaagcactagacaaagttcacctgagcctaatagtcccagtgaatattgtttttatgtggatagtgatatggtcaatgaattcaagttggaattggtagaaaaactttttgctgaagacacagaagcaaagaacccattttctactcaggacacagatttagacttggagatgttagctccctatatcccagcccacgtagcggggncctctag

SEQ ID NO: 361069 - DNA, 254 bp, Homo sapiens
tgtttactaaaggacaagtcaccacaggacagtacaggatgcttgccaaaagaggtggatatgtctgggttgaaactcaagcaactgtcatatataacaccaagaattctcaaccacagtgcattgtatgtgtgaattacgttgtgaggtaagtaagtttgagaaataaacatttttggggaacaaatagtaattctttttggatactctgttcatttataggaagataagataataaatattaactaaatttt

SEQ ID NO: 361070 - DNA, 952 bp, Homo sapiens
  misc_feature (713)..(713): n is a, c, g, or t
  misc_feature (722)..(722): n is a, c, g, or t
cgccccctgacgctgcctcagctcctcagtgcacagtgctgcctcgtctgaggggacaggaggatcaccctcttcgtcgcttcggccagtgtgtcgggctgggccctgacaagccacctgaggagaggctcggagccgggcccggaccccggcgattgccgcccgcttctctctagtctcacgaggggtttcccgcctcgcacccccacctctggacttgcctttccttctcttctccgcgtgtggagggagccagcgcttaggccggagcgagcctgggggccgcccgccgtgaagacatcgcggggaccgattcaccatggagggcgccggcggcgcgaacgacaagaaaaagataagttctgaacgtcgaaaagaaaagtctcgagatgcagccagatctcggcgaagtaaagaatctgaagttttttatgagcttgctcatcagttgccacttccacataatgtgagttcgcatcttgataaggcctctgtgatgaggcttaccatcagctatttgcgtgtgaggaaacttctggatgctggtgatttggatattgaagatgacatgaaagcacagatgaattgcttttatttgaaagccttggatggttttgttatggttctcacagatgatggtgacatgatttacatttctgataatgtgaacaaatacatgggattaactcagtttgaacctaactggacacagngtgttgatnttactccctcgcttgtgacatcgaggcaatgagagaactggctctccccagaagggcctgtgaaaccggtcagccacacacccaccaggagtttcctcacaaagagatggccctaaatgcgagacgaacatacctaagtggaccgggagggctggcggaggggcactcacatatgagcccacgaacgccagcgggtaaacctcaatcggggcgttggacctccaccacag

SEQ ID NO: 361071 - DNA, 4035 bp, Homo sapiens
cgccccctgacgctgcctcagctcctcagtgcacagtgctgcctcgtctgaggggacaggaggatcaccctcttcgtcgcttcggccagtgtgtcgggctgggccctgacaagccacctgaggagaggctcggagccgggcccggaccccggcgattgccgcccgcttctctctagtctcacgaggggtttcccgcctcgcacccccacctctggacttgcctttccttctcttctccgcgtgtggagggagccagcgcttaggccggagcgagcctgggggccgcccgccgtgaagacatcgcggggaccgattcaccatggagggcgccggcggcgcgaacgacaagaaaaagataagttctgaacgtcgaaaagaaaagtctcgagatgcagccagatctcggcgaagtaaagaatctgaagttttttatgagcttgctcatcagttgccacttccacataatgtgagttcgcatcttgataaggcctctgtgatgaggcttaccatcagctatttgcgtgtgaggaaacttctggatgctggtgatttggatattgaagatgacatgaaagcacagatgaattgcttttatttgaaagccttggatggttttgttatggttctcacagatgatggtgacatgatttacatttctgataatgtgaacaaatacatgggattaactcagtttgaactaactggacacagtgtgtttgattttactcatccatgtgaccatgaggaaatgagagaaatgcttacacacagaaatggccttgtgaaaaagggtaaagaacaaaacacacagcgaagcttttttctcagaatgaagtgtaccctaactagccgaggaagaactatgaacataaagtctgcaacatggaaggtattgcactgcacaggccacattcacgtatatgataccaacagtaaccaacctcagtgtgggtataagaaaccacctatgacctgcttggtgctgatttgtgaacccattcctcacccatcaaatattgaaattcctttagatagcaagactttcctcagtcgacacagcctggatatgaaattttcttattgtgatgaaagaattaccgaattgatgggatatgagccagaagaacttttaggccgctcaatttatgaatattatcatgctttggactctgatcatctgaccaaaactcatcatgatatgtttactaaaggacaagtcaccacaggacagtacaggatgcttgccaaaagaggtggatatgtctgggttgaaactcaagcaactgtcatatataacaccaagaattctcaaccacagtgcattgtatgtgtgaattacgttgtgagtggtattattcagcacgacttgattttctcccttcaacaaacagaatgtgtccttaaaccggttgaatcttcagatatgaaaatgactcagctattcaccaaagttgaatcagaagatacaagtagcctctttgacaaacttaagaaggaacctgatgctttaactttgctggccccagccgctggagacacaatcatatctttagattttggcagcaacgacacagaaactgatgaccagcaacttgaggaagtaccattatataatgatgtaatgctcccctcacccaacgaaaaattacagaatataaatttggcaatgtctccattacccaccgctgaaacgccaaagccacttcgaagtagtgctgaccctgcactcaatcaagaagttgcattaaaattagaaccaaatccagagtcactggaactttcttttaccatgccccagattcaggatcagacacctagtccttccgatggaagcactagacaaagttcacctgagcctaatagtcccagtgaatattgtttttatgtggatagtgatatggtcaatgaattcaagttggaattggtagaaaaactttttgctgaagacacagaagcaaagaacccattttctactcaggacacagatttagacttggagatgttagctccctatatcccaatggatgatgacttccagttacgttccttcgatcagttgtcaccattagaaagcagttccgcaagccctgaaagcgcaagtcctcaaagcacagttacagtattccagcagactcaaatacaagaacctactgctaatgccaccactaccactgccaccactgatgaattaaaaacagtgacaaaagaccgtatggaagacattaaaatattgattgcatctccatctcctacccacatacataaagaaactactagtgccacatcatcaccatatagagatactcaaagtcggacagcctcaccaaacagagcaggaaaaggagtcatagaacagacagaaaaatctcatccaagaagccctaacgtgttatctgtcgctttgagtcaaagaactacagttcctgaggaagaactaaatccaaagatactagctttgcagaatgctcagagaaagcgaaaaatggaacatgatggttcactttttcaagcagtaggaattggaacattattacagcagccagacgatcatgcagctactacatcactttcttggaaacgtgtaaaaggatgcaaatctagtgaacagaatggaatggagcaaaagacaattattttaataccctctgatttagcatgtagactgctggggcaatcaatggatgaaagtggattaccacagctgaccagttatgattgtgaagttaatgctcctatacaaggcagcagaaacctactgcagggtgaagaattactcagagctttggatcaagttaactgagctttttcttaatttcattcctttttttggacactggtggctcactacctaaagcagtctatttatattttctacatctaattttagaagcctggctacaatactgcacaaacttggttagttcaatttttgatcccctttctacttaatttacattaatgctcttttttagtatgttctttaatgctggatcacagacagctcattttctcagttttttggtatttaaaccattgcattgcagtagcatcattttaaaaaatgcacctttttatttatttatttttggctagggagtttatccctttttcgaattatttttaagaagatgccaatataatttttgtaagaaggcagtaacctttcatcatgatcataggcagttgaaaaatttttacaccttttttttcacattttacataaataataatgctttgccagcagtacgtggtagccacaattgcacaatatattttcttaaaaaataccagcagttactcatggaatatattctgcgtttataaaactagtttttaagaagaaattttttttggcctatgaaattgttaaacctggaacatgacattgttaatcatataataatgattcttaaatgctgtatggtttattatttaaatgggtaaagccatttacataatatagaaagatatgcatatatctagaaggtatgtggcatttatttggataaaattctcaattcagagaaatcatctgatgtttctatagtcactttgccagctcaaaagaaaacaataccctatgtagttgtggaagtttatgctaatattgtgtaactgatattaaacctaaatgttctgcctaccctgttggtataaagatattttgagcagactgtaaacaagaaaaaaaaaatcatgcattcttagcaaaattgcctagtatgttaatttgctcaaaatacaatgtttgattttatgcactttgtcgctattaacatcctttttttcatgtagatttcaataattgagtaattttagaagcattattttaggaatatatagttgtcacagtaaatatcttgttttttctatgtacattgtacaaatttttcattccttttgctctttgtggttggatctaacactaactgtattgttttgttacatcaaataaacatcttctgtggaccaggaaacaacaacacaaatcataatcataccacatcaccaaccgataacaaacagaaagaggtg

SEQ ID NO: 361072 - DNA, 3251 bp, Homo sapiens
  misc_feature (8)..(8): n is a, c, g, or t
  misc_feature (10)..(10): n is a, c, g, or t
  misc_feature (12)..(12): n is a, c, g, or t
cccaattngncnttggccgggggaaatgagagaaatgcttacacacagaaatggccttgtgaaaaagggtaaagaacaaaacacacagcgaagcttttttctcagaatgaagtgtaccctaactagccgaggaagaactatgaacataaagtctgcaacatggaaggtattgcactgcacaggccacattcacgtatatgataccaacagtaaccaacctcagtgtgggtataagaaaccacctatgacctgcttggtgctgatttgtgaacccattcctcacccatcaaatattgaaattcctttagatagcaagactttcctcagtcgacacagcctggatatgaaattttcttattgtgatgaaagaattaccgaattgatgggatatgagccagaagaacttttaggccgctcaatttatgaatattatcatgctttggactctgatcatctgaccaaaactcatcatgatatgtttactaaaggacaagtcaccacaggacagtacaggatgcttgccaaaagaggtggatatgtctgggttgaaactcaagcaactgtcatatataacaccaagaattctcaaccacagtgcattgtatgtgtgaattacgttgtgagtggtattattcagcacgacttgattttctcccttcaacaaacagaatgtgtccttaaaccggttgaatcttcagatatgaaaatgactcagctattcaccaaagttgaatcagaagatacaagtagcctctttgacaaacttaagaaggaacctgatgctttaactttgctggccccagccgctggagacacaatcatatctttagattttggcagcaacgacacagaaactgatgaccagcaacttgaggaagtaccattatataatgatgtaatgctcccctcacccaacgaaaaattacagaatataaatttggcaatgtctccattacccaccgctgaaacgccaaagccacttcgaagtagtgctgaccctgcactcaatcaagaagttgcattaaaattagaaccaaatccagagtcactggaactttcttttaccatgccccagattcaggatcagacacctagtccttccgatggaagcactagacaaagttcacctgagcctaatagtcccagtgaatattgtttttatgtggatagtgatatggtcaatgaattcaagttggaattggtagaaaaactttttgctgaagacacagaagcaaagaacccattttctactcaggacacagatttagacttggagatgttagctccctatatcccaatggatgatgacttccagttacgttccttcgatcagttgtcaccattagaaagcagttccgcaagccctgaaagcgcaagtcctcaaagcacagttacagtattccagcagactcaaatacaagaacctactgctaatgccaccactaccactgccaccactgatgaattaaaaacagtgacaaaagaccgtatggaagacattaaaatattgattgcatctccatctcctacccacatacataaagaaactactagtgccacatcatcaccatatagagatactcaaagtcggacagcctcaccaaacagagcaggaaaaggagtcatagaacagacagaaaaatctcatccaagaagccctaacgtgttatctgtcgctttgagtcaaagaactacagttcctgaggaagaactaaatccaaagatactagctttgcagaatgctcagagaaagcgaaaaatggaacatgatggttcactttttcaagcagtaggaattggaacattattacagcagccagacgatcatgcagctactacatcactttcttggaaacgtgtaaaaggatgcaaatctagtgaacagaatggaatggagcaaaagacaattattttaataccctctgatttagcatgtagactgctggggcaatcaatggatgaaagtggattaccacagctgaccagttatgattgtgaagttaatgctcctatacaaggcagcagaaacctactgcagggtgaagaattactcagagctttggatcaagttaactgagctttttcttaatttcattcctttttttggacactggtggctcactacctaaagcagtctatttatattttctacatctaattttagaagcctggctacaatactgcacaaacttggttagttcaatttttgatcccctttctacttaatttacattaatgctcttttttagtatgttctttaatgctggatcacagacagctcattttctcagttttttggtatttaaaccattgcattgcagtagcatcattttaaaaaatgcacctttttatttatttatttttggctagggagtttatccctttttcgaattatttttaagaagatgccaatataatttttgtaagaaggcagtaacctttcatcatgatcataggcagttgaaaaatttttacaccttttttttcacattttacataaataataatgctttgccagcagtacgtggtagccacaattgcacaatatattttcttaaaaaataccagcagttactcatggaatatattctgcgtttataaaactagtttttaagaagaaattttttttggcctatgaaattgttaaacctggaacatgacattgttaatcatataataatgattcttaaatgctgtatggtttattatttaaatgggtaaagccatttacataatatagaaagatatgcatatatctagaaggtatgtggcatttatttggataaaattctcaattcagagaaatcatctgatgtttctatagtcactttgccagctcaaaagaaaacaataccctatgtagttgtggaagtttatgctaatattgtgtaactgatattaaacctaaatgttctgcctaccctgttggtataaagatattttgagcagactgtaaacaagaaaaaaaaaatcatgcattcttagcaaaattgcctagtatgttaatttgctcaaaatacaatgtttgattttatgcactttgtcgctattaacatcctttttttcatgtagatttcaataattgagtaattttagaagcattattttaggaatatatagttgtcacagtaaatatcttgttttttctatgtacattgtacaaatttttcattccttttgctctttgtggttggatctaacactaactgtattgttttgttacatcaaataaacatcttctgtggaccagg

SEQ ID NO: 361073 - DNA, 3851 bp, Homo sapiens
cgccccctgacgctgcctcagctcctcagtgcacagtgctgcctcgtctgaggggacaggaggatcaccctcttcgtcgcttcggccagtgtgtcgggctgggccctgacaagccacctgaggagaggctcggagccgggcccggaccccggcgattgccgcccgcttctctctagtctcacgaggggtttcccgcctcgcacccccacctctggacttgcctttccttctcttctccgcgtgtggagggagccagcgcttaggccggagcgagcctgggggccgcccgccgtgaagacatcgcggggaccgattcaccatggagggcgccggcggcgcgaacgacaagaaaaagataagttctgaacgtcgaaaagaaaagtctcgagatgcagccagatctcggcgaagtaaagaatctgaagttttttatgagcttgctcatcagttgccacttccacataatgtgagttcgcatcttgataaggcctctgtgatgaggcttaccatcagctatttgcgtgtgaggaaacttctggatgctggtgatttggatattgaagatgacatgaaagcacagatgaattgcttttatttgaaagccttggatggttttgttatggttctcacagatgatggtgacatgatttacatttctgataatgtgaacaaatacatgggattaactcagtttgaactaactggacacagtgtgtttgattttactcatccatgtgaccatgaggaaatgagagaaatgcttacacacagaaatggccttgtgaaaaagggtaaagaacaaaacacacagcgaagcttttttctcagaatgaagtgtaccctaactagccgaggaagaactatgaacataaagtctgcaacatggaaggtattgcactgcacaggccacattcacgtatatgataccaacagtaaccaacctcagtgtgggtataagaaaccacctatgacctgcttggtgctgatttgtgaacccattcctcacccatcaaatattgaaattcctttagatagcaagactttcctcagtcgacacagcctggatatgaaattttcttattgtgatgaaagaattaccgaattgatgggatatgagccagaagaacttttaggccgctcaatttatgaatattatcatgctttggactctgatcatctgaccaaaactcatcatgatatgtttactaaaggacaagtcaccacaggacagtacaggatgcttgccaaaagaggtggatatgtctgggttgaaactcaagcaactgtcatatataacaccaagaattctcaaccacagtgcattgtatgtgtgaattacgttgtgagtggtattattcagcacgacttgattttctcccttcaacaaacagaatgtgtccttaaaccggttgaatcttcagatatgaaaatgactcagctattcaccaaagttgaatcagaagatacaagtagcctctttgacaaacttaagaaggaacctgatgctttaactttgctggccccagccgctggagacacaatcatatctttagattttggcagcaacgacacagaaactgatgaccagcaacttgaggaagtaccattatataatgatgtaatgctcccctcacccaacgaaaaattacagaatataaatttggcaatgtctccattacccaccgctgaaacgccaaagccacttcgaagtagtgctgaccctgcactcaatcaagaagttgcattaaaattagaaccaaatccagagtcactggaactttcttttaccatgccccagattcaggatcagacacctagtccttccgatggaagcactagacaaagttcacctgaggacacagatttagacttggagatgttagctccctatatcccaatggatgatgacttccagttacgttccttcgatcagttgtcaccattagaaagcagttccgcaagccctgaaagcgcaagtcctcaaagcacagttacagtattccagcagactcaaatacaagaacctactgctaatgccaccactaccactgccaccactgatgaattaaaaacagtgacaaaagaccgtatggaagacattaaaatattgattgcatctccatctcctacccacatacataaagaaactactagtgccacatcatcaccatatagagatactcaaagtcggacagcctcaccaaacagagcaggaaaaggagtcatagaacagacagaaaaatctcatccaagaagccctaacgtgttatctgtcgctttgagtcaaagaactacagttcctgaggaagaactaaatccaaagatactagctttgcagaatgctcagagaaagcgaaaaatggaacatgatggttcactttttcaagcagtaggaattggaacattattacagcagccagacgatcatgcagctactacatcactttcttggaaacgtgtaaaaggatgcaaatctagtgaacagaatggaatggagcaaaagacaattattttaataccctctgatttagcatgtagactgctggggcaatcaatggatgaaagtggattaccacagctgaccagttatgattgtgaagttaatgctcctatacaaggcagcagaaacctactgcagggtgaagaattactcagagctttggatcaagttaactgagctttttcttaatttcattcctttttttggacactggtggctcactacctaaagcagtctatttatattttctacatctaattttagaagcctggctacaatactgcacaaacttggttagttcaatttttgatcccctttctacttaatttacattaatgctcttttttagtatgttctttaatgctggatcacagacagctcattttctcagttttttggtatttaaaccattgcattgcagtagcatcattttaaaaaatgcacctttttatttatttatttttggctagggagtttatccctttttcgaattatttttaagaagatgccaatataatttttgtaagaaggcagtaacctttcatcatgatcataggcagttgaaaaatttttacaccttttttttcacattttacataaataataatgctttgccagcagtacgtggtagccacaattgcacaatatattttcttaaaaaataccagcagttactcatggaatatattctgcgtttataaaactagtttttaagaagaaattttttttggcctatgaaattgttaaacctggaacatgacattgttaatcatataataatgattcttaaatgctgtatggtttattatttaaatgggtaaagccatttacataatatagaaagatatgcatatatctagaaggtatgtggcatttatttggataaaattctcaattcagagaaatcatctgatgtttctatagtcactttgccagctcaaaagaaaacaataccctatgtagttgtggaagtttatgctaatattgtgtaactgatattaaacctaaatgttctgcctaccctgttggtataaagatattttgagcagactgtaaacaagaaaaaaaaaatcatgcattcttagcaaaattgcctagtatgttaatttgctcaaaatacaatgtttgattttatgcactttgtcgctattaacatcctttttttcatgtagatttcaataattgagtaattttagaagcattattttaggaatatatagttgtcacagtaaatatcttgttttttctatgtacattgtacaaatttttcattccttttgctctttgtggttggatctaacactaactgtattgttttgttacatcaaataaacatcttctgtggaccagg

SEQ ID NO: 361074 - DNA, 3687 bp, Homo sapiens
cgccccctgacgctgcctcagctcctcagtgcacagtgctgcctcgtctgaggggacaggaggatcaccctcttcgtcgcttcggccagtgtgtcgggctgggccctgacaagccacctgaggagaggctcggagccgggcccggaccccggcgattgccgcccgcttctctctagtctcacgaggggtttcccgcctcgcacccccacctctggacttgcctttccttctcttctccgcgtgtggagggagccagcgcttaggccggagcgagcctgggggccgcccgccgtgaagacatcgcggggaccgattcaccatggagggcgccggcggcgcgaacgacaagaaaaagataagttctgaacgtcgaaaagaaaagtctcgagatgcagccagatctcggcgaagtaaagaatctgaagttttttatgagcttgctcatcagttgccacttccacataatgtgagttcgcatcttgataaggcctctgtgatgaggcttaccatcagctatttgcgtgtgaggaaacttctggatgctggtgatttggatattgaagatgacatgaaagcacagatgaattgcttttatttgaaagccttggatggttttgttatggttctcacagatgatggtgacatgatttacatttctgataatgtgaacaaatacatgggattaactcagtttgaactaactggacacagtgtgtttgattttactcatccatgtgaccatgaggaaatgagagaaatgcttacacacagaaatggccttgtgaaaaagggtaaagaacaaaacacacagcgaagcttttttctcagaatgaagtgtaccctaactagccgaggaagaactatgaacataaagtctgcaacatggaaggtattgcactgcacaggccacattcacgtatatgataccaacagtaaccaacctcagtgtgggtataagaaaccacctatgacctgcttggtgctgatttgtgaacccattcctcacccatcaaatattgaaattcctttagatagcaagactttcctcagtcgacacagcctggatatgaaattttcttattgtgatgaaagaattaccgaattgatgggatatgagccagaagaacttttaggccgctcaatttatgaatattatcatgctttggactctgatcatctgaccaaaactcatcatgatatgtttactaaaggacaagtcaccacaggacagtacaggatgcttgccaaaagaggtggatatgtctgggttgaaactcaagcaactgtcatatataacaccaagaattctcaaccacagtgcattgtatgtgtgaattacgttgtgagtggtattattcagcacgacttgattttctcccttcaacaaacagaatgtgtccttaaaccggttgaatcttcagatatgaaaatgactcagctattcaccaaagttgaatcagaagatacaagtagcctctttgacaaacttaagaaggaacctgatgctttaactttgctggccccagccgctggagacacaatcatatctttagattttggcagcaacgcctaatagtcccagtgaatattgtttttatgtggatagtgatatggtcaatgaattcaagttggaattggtagaaaaactttttgctgaagacacagaagcaaagaacccattttctactcaggacacagatttagacttggagatgttagctccctatatcccaatggatgatgacttccagttacgttccttcgatcagttgtcaccattagaaagcagttccgcaagccctgaaagcgcaagtcctcaaagcacagttacagtattccagcagactcaaatacaagaacctactgctaatgccaccactaccactgccaccactgatgaattaaaaacagtgacaaaagaccgtatggaagacattaaaatattgattgcatctccatctcctacccacatacataaagaaactactagtgccacatcatcaccatatagagatactcaaagtcggacagcctcaccaaacagagcaggaaaaggagtcatagaacagacagaaaaatctcatccaagaagccctaacgtgttatctgtcgctttgagtcaaagaactacagttcctgaggaagaactaaatccaaagatactagctttgcagaatgctcagagaaagcgaaaaatggaacatgatggttcactttttcaagcagtaggaattggaacattattacagcagccagacgatcatgcagctactacatcactttcttggaaacgtgtaaaaggatgcaaatctagtgaacagaatggaatggagcaaaagacaattattttaataccctctgatttagcatgtagactgctggggcaatcaatggatgaaagtggattaccacagctgaccagttatgattgtgaagttaatgctcctatacaaggcagcagaaacctactgcagggtgaagaattactcagagctttggatcaagttaactgagctttttcttaatttcattcctttttttggacactggtggctcactacctaaagcagtctatttatattttctacatctaattttagaagcctggctacaatactgcacaaacttggttagttcaatttttgatcccctttctacttaatttacattaatgctcttttttagtatgttctttaatgctggatcacagacagctcattttctcagttttttggtatttaaaccattgcattgcagtagcatcattttaaaaaatgcacctttttatttatttatttttggctagggagtttatccctttttcgaattatttttaagaagatgccaatataatttttgtaagaaggcagtaacctttcatcatgatcataggcagttgaaaaatttttacaccttttttttcacattttacataaataataatgctttgccagcagtacgtggtagccacaattgcacaatatattttcttaaaaaataccagcagttactcatggaatatattctgcgtttataaaactagtttttaagaagaaattttttttggcctatgaaattgttaaacctggaacatgacattgttaatcatataataatgattcttaaatgctgtatggtttattatttaaatgggtaaagccatttacataatatagaaagatatgcatatatctagaaggtatgtggcatttatttggataaaattctcaattcagagaaatcatctgatgtttctatagtcactttgccagctcaaaagaaaacaataccctatgtagttgtggaagtttatgctaatattgtgtaactgatattaaacctaaatgttctgcctaccctgttggtataaagatattttgagcagactgtaaacaagaaaaaaaaaatcatgcattcttagcaaaattgcctagtatgttaatttgctcaaaatacaatgtttgattttatgcactttgtcgctattaacatcctttttttcatgtagatttcaataattgagtaattttagaagcattattttaggaatatatagttgtcacagtaaatatcttgttttttctatgtacattgtacaaatttttcattccttttgctctttgtggttggatctaacactaactgtattgttttgttacatcaaataaacatcttctgtggaccagg

SEQ ID NO: 361075 - DNA, 3649 bp, Homo sapiens
cgccccctgacgctgcctcagctcctcagtgcacagtgctgcctcgtctgaggggacaggaggatcaccctcttcgtcgcttcggccagtgtgtcgggctgggccctgacaagccacctgaggagaggctcggagccgggcccggaccccggcgattgccgcccgcttctctctagtctcacgaggggtttcccgcctcgcacccccacctctggacttgcctttccttctcttctccgcgtgtggagggagccagcgcttaggccggagcgagcctgggggccgcccgccgtgaagacatcgcggggaccgattcaccatggagggcgccggcggcgcgaacgacaagaaaaagataagttctgaacgtcgaaaagaaaagtctcgagatgcagccagatctcggcgaagtaaagaatctgaagttttttatgagcttgctcatcagttgccacttccacataatgtgagttcgcatcttgataaggcctctgtgatgaggcttaccatcagctatttgcgtgtgaggaaacttctggatgctggtgatttggatattgaagatgacatgaaagcacagatgaattgcttttatttgaaagccttggatggttttgttatggttctcacagatgatggtgacatgatttacatttctgataatgtgaacaaatacatgggattaactcagtttgaactaactggacacagtgtgtttgattttactcatccatgtgaccatgaggaaatgagagaaatgcttacacacagaaatggccttgtgaaaaagggtaaagaacaaaacacacagcgaagcttttttctcagaatgaagtgtaccctaactagccgaggaagaactatgaacataaagtctgcaacatggaaggtattgcactgcacaggccacattcacgtatatgataccaacagtaaccaacctcagtgtgggtataagaaaccacctatgacctgcttggtgctgatttgtgaacccattcctcacccatcaaatattgaaattcctttagatagcaagactttcctcagtcgacacagcctggatatgaaattttcttattgtgatgaaagaattaccgaattgatgggatatgagccagaagaacttttaggccgctcaatttatgaatattatcatgctttggactctgatcatctgaccaaaactcatcatgatatgtttactaaaggacaagtcaccacaggacagtacaggatgcttgccaaaagaggtggatatgtctgggttgaaactcaagcaactgtcatatataacaccaagaattctcaaccacagtgcattgtatgtgtgaattacgttgtgagtggtattattcagcacgacttgattttctcccttcaacaaacagaatgtgtccttaaaccggttgaatcttcagatatgaaaatgactcagctattcaccaaagttgaatcagaagatacaagtagcctctttgacaaacttaagaaggaacctgatgctttaactttgctggccccagccgctggagacacaatcatatctttagattttggcagcaacgtgatatggtcaatgaattcaagttggaattggtagaaaaactttttgctgaagacacagaagcaaagaacccattttctactcaggacacagatttagacttggagatgttagctccctatatcccaatggatgatgacttccagttacgttccttcgatcagttgtcaccattagaaagcagttccgcaagccctgaaagcgcaagtcctcaaagcacagttacagtattccagcagactcaaatacaagaacctactgctaatgccaccactaccactgccaccactgatgaattaaaaacagtgacaaaagaccgtatggaagacattaaaatattgattgcatctccatctcctacccacatacataaagaaactactagtgccacatcatcaccatatagagatactcaaagtcggacagcctcaccaaacagagcaggaaaaggagtcatagaacagacagaaaaatctcatccaagaagccctaacgtgttatctgtcgctttgagtcaaagaactacagttcctgaggaagaactaaatccaaagatactagctttgcagaatgctcagagaaagcgaaaaatggaacatgatggttcactttttcaagcagtaggaattggaacattattacagcagccagacgatcatgcagctactacatcactttcttggaaacgtgtaaaaggatgcaaatctagtgaacagaatggaatggagcaaaagacaattattttaataccctctgatttagcatgtagactgctggggcaatcaatggatgaaagtggattaccacagctgaccagttatgattgtgaagttaatgctcctatacaaggcagcagaaacctactgcagggtgaagaattactcagagctttggatcaagttaactgagctttttcttaatttcattcctttttttggacactggtggctcactacctaaagcagtctatttatattttctacatctaattttagaagcctggctacaatactgcacaaacttggttagttcaatttttgatcccctttctacttaatttacattaatgctcttttttagtatgttctttaatgctggatcacagacagctcattttctcagttttttggtatttaaaccattgcattgcagtagcatcattttaaaaaatgcacctttttatttatttatttttggctagggagtttatccctttttcgaattatttttaagaagatgccaatataatttttgtaagaaggcagtaacctttcatcatgatcataggcagttgaaaaatttttacaccttttttttcacattttacataaataataatgctttgccagcagtacgtggtagccacaattgcacaatatattttcttaaaaaataccagcagttactcatggaatatattctgcgtttataaaactagtttttaagaagaaattttttttggcctatgaaattgttaaacctggaacatgacattgttaatcatataataatgattcttaaatgctgtatggtttattatttaaatgggtaaagccatttacataatatagaaagatatgcatatatctagaaggtatgtggcatttatttggataaaattctcaattcagagaaatcatctgatgtttctatagtcactttgccagctcaaaagaaaacaataccctatgtagttgtggaagtttatgctaatattgtgtaactgatattaaacctaaatgttctgcctaccctgttggtataaagatattttgagcagactgtaaacaagaaaaaaaaaatcatgcattcttagcaaaattgcctagtatgttaatttgctcaaaatacaatgtttgattttatgcactttgtcgctattaacatcctttttttcatgtagatttcaataattgagtaattttagaagcattattttaggaatatatagttgtcacagtaaatatcttgttttttctatgtacattgtacaaatttttcattccttttgctctttgtggttggatctaacactaactgtattgttttgttacatcaaataaacatcttctgtggaccagg

SEQ ID NO: 361076 - DNA, 2685 bp, Homo sapiens
catcagaatgtaagaaattaaaatgataaggatgtgaaccacaggcgaacagcgcggttggtattattcagcacgacttgattttctcccttcaacaaacagaatgtgtccttaaaccggttgaatcttcagatatgaaaatgactcagctattcaccaaagttgaatcagaagatacaagtagcctctttgacaaacttaagaaggaacctgatgctttaactttgctggccccagccgctggagacacaatcatatctttagattttggcagcaacgacacagaaactgatgaccagcaacttgaggaagtaccattatataatgatgtaatgctcccctcacccaacgaaaaattacagaatataaatttggcaatgtctccattacccaccgctgaaacgccaaagccacttcgaagtagtgctgaccctgcactcaatcaagaagttgcattaaaattagaaccaaatccagagtcactggaactttcttttaccatgccccagattcaggatcagacacctagtccttccgatggaagcactagacaaagttcacctgagcctaatagtcccagtgaatattgtttttatgtggatagtgatatggtcaatgaattcaagttggaattggtagaaaaactttttgctgaagacacagaagcaaagaacccattttctactcaggacacagatttagacttggagatgttagctccctatatcccaatggatgatgacttccagttacgttccttcgatcagttgtcaccattagaaagcagttccgcaagccctgaaagcgcaagtcctcaaagcacagttacagtattccagcagactcaaatacaagaacctactgctaatgccaccactaccactgccaccactgatgaattaaaaacagtgacaaaagaccgtatggaagacattaaaatattgattgcatctccatctcctacccacatacataaagaaactactagtgccacatcatcaccatatagagatactcaaagtcggacagcctcaccaaacagagcaggaaaaggagtcatagaacagacagaaaaatctcatccaagaagccctaacgtgttatctgtcgctttgagtcaaagaactacagttcctgaggaagaactaaatccaaagatactagctttgcagaatgctcagagaaagcgaaaaatggaacatgatggttcactttttcaagcagtaggaattggaacattattacagcagccagacgatcatgcagctactacatcactttcttggaaacgtgtaaaaggatgcaaatctagtgaacagaatggaatggagcaaaagacaattattttaataccctctgatttagcatgtagactgctggggcaatcaatggatgaaagtggattaccacagctgaccagttatgattgtgaagttaatgctcctatacaaggcagcagaaacctactgcagggtgaagaattactcagagctttggatcaagttaactgagctttttcttaatttcattcctttttttggacactggtggctcactacctaaagcagtctatttatattttctacatctaattttagaagcctggctacaatactgcacaaacttggttagttcaatttttgatcccctttctacttaatttacattaatgctcttttttagtatgttctttaatgctggatcacagacagctcattttctcagttttttggtatttaaaccattgcattgcagtagcatcattttaaaaaatgcacctttttatttatttatttttggctagggagtttatccctttttcgaattatttttaagaagatgccaatataatttttgtaagaaggcagtaacctttcatcatgatcataggcagttgaaaaatttttacaccttttttttcacattttacataaataataatgctttgccagcagtacgtggtagccacaattgcacaatatattttcttaaaaaataccagcagttactcatggaatatattctgcgtttataaaactagtttttaagaagaaattttttttggcctatgaaattgttaaacctggaacatgacattgttaatcatataataatgattcttaaatgctgtatggtttattatttaaatgggtaaagccatttacataatatagaaagatatgcatatatctagaaggtatgtggcatttatttggataaaattctcaattcagagaaatcatctgatgtttctatagtcactttgccagctcaaaagaaaacaataccctatgtagttgtggaagtttatgctaatattgtgtaactgatattaaacctaaatgttctgcctaccctgttggtataaagatattttgagcagactgtaaacaagaaaaaaaaaatcatgcattcttagcaaaattgcctagtatgttaatttgctcaaaatacaatgtttgattttatgcactttgtcgctattaacatcctttttttcatgtagatttcaataattgagtaattttagaagcattattttaggaatatatagttgtcacagtaaatatcttgttttttctatgtacattgtacaaatttttcattccttttgctctttgtggttggatctaacactaactgtattgttttgttacatcaaataaacatcttctgtggaccagg

SEQ ID NO: 361077 - DNA, 2007 bp, Homo sapiens
agtgaacgcgtgagagagacatccacatatatcccaaataggaatgatagacttcacaagataacataaccttacaaatcaaatatgatcaaccagttaggaccagcagttccgcaagccctgaaagcgcaagtcctcaaagcacagttacagtattccagcagactcaaatacaagaacctactgctaatgccaccactaccactgccaccactgatgaattaaaaacagtgacaaaagaccgtatggaagacattaaaatattgattgcatctccatctcctacccacatacataaagaaactactagtgccacatcatcaccatatagagatactcaaagtcggacagcctcaccaaacagagcaggaaaaggagtcatagaacagacagaaaaatctcatccaagaagccctaacgtgttatctgtcgctttgagtcaaagaactacagttcctgaggaagaactaaatccaaagatactagctttgcagaatgctcagagaaagcgaaaaatggaacatgatggttcactttttcaagcagtaggaattggaacattattacagcagccagacgatcatgcagctactacatcactttcttggaaacgtgtaaaaggatgcaaatctagtgaacagaatggaatggagcaaaagacaattattttaataccctctgatttagcatgtagactgctggggcaatcaatggatgaaagtggattaccacagctgaccagttatgattgtgaagttaatgctcctatacaaggcagcagaaacctactgcagggtgaagaattactcagagctttggatcaagttaactgagctttttcttaatttcattcctttttttggacactggtggctcactacctaaagcagtctatttatattttctacatctaattttagaagcctggctacaatactgcacaaacttggttagttcaatttttgatcccctttctacttaatttacattaatgctcttttttagtatgttctttaatgctggatcacagacagctcattttctcagttttttggtatttaaaccattgcattgcagtagcatcattttaaaaaatgcacctttttatttatttatttttggctagggagtttatccctttttcgaattatttttaagaagatgccaatataatttttgtaagaaggcagtaacctttcatcatgatcataggcagttgaaaaatttttacaccttttttttcacattttacataaataataatgctttgccagcagtacgtggtagccacaattgcacaatatattttcttaaaaaataccagcagttactcatggaatatattctgcgtttataaaactagtttttaagaagaaattttttttggcctatgaaattgttaaacctggaacatgacattgttaatcatataataatgattcttaaatgctgtatggtttattatttaaatgggtaaagccatttacataatatagaaagatatgcatatatctagaaggtatgtggcatttatttggataaaattctcaattcagagaaatcatctgatgtttctatagtcactttgccagctcaaaagaaaacaataccctatgtagttgtggaagtttatgctaatattgtgtaactgatattaaacctaaatgttctgcctaccctgttggtataaagatattttgagcagactgtaaacaagaaaaaaaaaatcatgcattcttagcaaaattgcctagtatgttaatttgctcaaaatacaatgtttgattttatgcactttgtcgctattaacatcctttttttcatgtagatttcaataattgagtaattttagaagcattattttaggaatatatagttgtcacagtaaatatcttgttttttctatgtacattgtacaaatttttcattccttttgctctttgtggttggatctaacactaactgtattgttttgttacatcaaataaacatcttctgtggaccagg

SEQ ID NO: 361078 - DNA, 3665 bp, Homo sapiens
cgccccctgacgctgcctcagctcctcagtgcacagtgctgcctcgtctgaggggacaggaggatcaccctcttcgtcgcttcggccagtgtgtcgggctgggccctgacaagccacctgaggagaggctcggagccgggcccggaccccggcgattgccgcccgcttctctctagtctcacgaggggtttcccgcctcgcacccccacctctggacttgcctttccttctcttctccgcgtgtggagggagccagcgcttaggccggagcgagcctgggggccgcccgccgtgaagacatcgcggggaccgattcaccatggagggcgccggcggcgcgaacgacaagaaaaagataagttctgaacgtcgaaaagaaaagtctcgagatgcagccagatctcggcgaagtaaagaatctgaagttttttatgagcttgctcatcagttgccacttccacataatgtgagttcgcatcttgataaggcctctgtgatgaggcttaccatcagctatttgcgtgtgaggaaacttctggatgctggtgatttggatattgaagatgacatgaaagcacagatgaattgcttttatttgaaagccttggatggttttgttatggttctcacagatgatggtgacatgatttacatttctgataatgtgaacaaatacatgggattaactcagtttgaactaactggacacagtgtgtttgattttactcatccatgtgaccatgaggaaatgagagaaatgcttacacacagaaatggccttgtgaaaaagggtaaagaacaaaacacacagcgaagcttttttctcagaatgaagtgtaccctaactagccgaggaagaactatgaacataaagtctgcaacatggaaggtattgcactgcacaggccacattcacgtatatgataccaacagtaaccaacctcagtgtgggtataagaaaccacctatgacctgcttggtgctgatttgtgaacccattcctcacccatcaaatattgaaattcctttagatagcaagactttcctcagtcgacacagcctggatatgaaattttcttattgtgatgaaagaattaccgaattgatgggatatgagccagaagaacttttaggccgctcaatttatgaatattatcatgctttggactctgatcatctgaccaaaactcatcatgatatgtttactaaaggacaagtcaccacaggacagtacaggatgcttgccaaaagaggtggatatgtctgggttgaaactcaagcaactgtcatatataacaccaagaattctcaaccacagtgcattgtatgtgtgaattacgttgtgagtggtattattcagcacgacttgattttctcccttcaacaaacagaatgtgtccttaaaccggttgaatcttcagatatgaaaatgactcagctattcaccaaagttgaatcagaagatacaagtagcctctttgacaaacttaagaaggaacctgatgctttaactttgctggccccagccgctggagacacaatcatatctttagattttggcagcaacgacacagaaactgatgaccagcaacttgaggaagtaccattatataatgatgtaatgctcccctcacccaacgaaaaattacagaatataaatttggcaatgtctccattacccaccgctgaaacgccaaagccacttcgaagtagtgctgaccctgcactcaatcaagaagttgcattaaaattagaaccaaatccagagtcactggaactttcttttaccatgccccagattcaggatcagacacctagtccttccgatggaagcactagacaaagttcacctgagcctaatagtcccagtgaatattgtttttatgtggatagtgatatggtcaatgaattcaagttggaattggtagaaaaactttttgctgaagacacagaagcaaagaacccattttctactcaggacacagatttagacttggagatgttagctccctatatcccaatggatgatgacttccagttacgttccttcgatcagttgtcaccattagaaagcagttccgcaagccctgaaagcgcaagtcctcaaagcacagttacagtattccagcagactcaaatacaagaacctactgctaatgccaccactaccactgccaccactgatgaattaaaaacagtgacaaaagaccgtatggaagacattaaaatattgattgcatctccatctcctacccacatacataaagaaactactagtgccacatcatcaccatatagagatactcaaagtcggacagcctcaccaaacagagcaggaaaaggagtcatagaacagacagaaaaatctcatccaagaagccctaacgtgttatctgtcgctttgagtcaaagaactacagttcctgaggaagaactaaatccaaagatactagctttgcagaatgtcagagctttggatcaagttaactgagctttttcttaatttcattcctttttttggacactggtggctcactacctaaagcagtctatttatattttctacatctaattttagaagcctggctacaatactgcacaaacttggttagttcaatttttgatcccctttctacttaatttacattaatgctcttttttagtatgttctttaatgctggatcacagacagctcattttctcagttttttggtatttaaaccattgcattgcagtagcatcattttaaaaaatgcacctttttatttatttatttttggctagggagtttatccctttttcgaattatttttaagaagatgccaatataatttttgtaagaaggcagtaacctttcatcatgatcataggcagttgaaaaatttttacaccttttttttcacattttacataaataataatgctttgccagcagtacgtggtagccacaattgcacaatatattttcttaaaaaataccagcagttactcatggaatatattctgcgtttataaaactagtttttaagaagaaattttttttggcctatgaaattgttaaacctggaacatgacattgttaatcatataataatgattcttaaatgctgtatggtttattatttaaatgggtaaagccatttacataatatagaaagatatgcatatatctagaaggtatgtggcatttatttggataaaattctcaattcagagaaatcatctgatgtttctatagtcactttgccagctcaaaagaaaacaataccctatgtagttgtggaagtttatgctaatattgtgtaactgatattaaacctaaatgttctgcctaccctgttggtataaagatattttgagcagactgtaaacaagaaaaaaaaaatcatgcattcttagcaaaattgcctagtatgttaatttgctcaaaatacaatgtttgattttatgcactttgtcgctattaacatcctttttttcatgtagatttcaataattgagtaattttagaagcattattttaggaatatatagttgtcacagtaaatatcttgttttttctatgtacattgtacaaatttttcattccttttgctctttgtggttggatctaacactaactgtattgttttgttacatcaaataaacatcttctgtggaccagg

SEQ ID NO: 361079 - DNA, 2464 bp, Homo sapiens
  misc_feature (2413)..(2413): n is a, c, g, or t
  misc_feature (2417)..(2417): n is a, c, g, or t
  misc_feature (2453)..(2453): n is a, c, g, or t
cgccccctgacgctgcctcagctcctcagtgcacagtgctgcctcgtctgaggggacaggaggatcaccctcttcgtcgcttcggccagtgtgtcgggctgggccctgacaagccacctgaggagaggctcggagccgggcccggaccccggcgattgccgcccgcttctctctagtctcacgaggggtttcccgcctcgcacccccacctctggacttgcctttccttctcttctccgcgtgtggagggagccagcgcttaggccggagcgagcctgggggccgcccgccgtgaagacatcgcggggaccgattcaccatggagggcgccggcggcgcgaacgacaagaaaaagataagttctgaacgtcgaaaagaaaagtctcgagatgcagccagatctcggcgaagtaaagaatctgaagttttttatgagcttgctcatcagttgccacttccacataatgtgagttcgcatcttgataaggcctctgtgatgaggcttaccatcagctatttgcgtgtgaggaaacttctggatgctggtgatttggatattgaagatgacatgaaagcacagatgaattgcttttatttgaaagccttggatggttttgttatggttctcacagatgatggtgacatgatttacatttctgataatgtgaacaaatacatgggattaactcagtttgaactaactggacacagtgtgtttgattttactcatccatgtgaccatgaggaaatgagagaaatgcttacacacagaaatggccttgtgaaaaagggtaaagaacaaaacacacagcgaagcttttttctcagaatgaagtgtaccctaactagccgaggaagaactatgaacataaagtctgcaacatggaaggtattgcactgcacaggccacattcacgtatatgataccaacagtaaccaacctcagtgtgggtataagaaaccacctatgacctgcttggtgctgatttgtgaacccattcctcacccatcaaatattgaaattcctttagatagcaagactttcctcagtcgacacagcctggatatgaaattttcttattgtgatgaaagaattaccgaattgatgggatatgagccagaagaacttttaggccgctcaatttatgaatattatcatgctttggactctgatcatctgaccaaaactcatcatgatatgtttactaaaggacaagtcaccacaggacagtacaggatgcttgccaaaagaggtggatatgtctgggttgaaactcaagcaactgtcatatataacaccaagaattctcaaccacagtgcattgtatgtgtgaattacgttgtgagtggtattattcagcacgacttgattttctcccttcaacaaacagaatgtgtccttaaaccggttgaatcttcagatatgaaaatgactcagctattcaccaaagttgaatcagaagatacaagtagcctctttgacaaacttaagaaggaacctgatgctttaactttgctggccccagccgctggagacacaatcatatctttagattttggcagcaacgacacagaaactgatgaccagcaacttgaggaagtaccattatataatgatgtaatgctcccctcacccaacgaaaaattacagaatataaatttggcaatgtctccattacccaccgctgaaacgccaaagccacttcgaagtagtgctgaccctgcactcaatcaagaagttgcattaaaattagaaccaaatccagagtcactggaactttcttttaccatgccccagattcaggatcagacacctagtccttccgatggaagcactagacaaagttcacctgagcctaatagtcccagtgaatattgtttttatgtggatagtgatatggtcaatgaattcaagttggaattggtagaaaaactttttgctgaagacacagaagcaaagaacccattttctactcaggacacagatttagacttggagatgttagctccctatatcccaatggatgatgacttccagttacgttccttcgatcagttgtcaccattagaaagcagttccgcaagccctgaaagcgcaagtcctcaaagcacagttacagtattccagcagactcaaatacaagaacctactgctaatgccaccactaccactgccaccactgatgaattaaaaacagtgacaaaagaccgtatggaagacattaaaatattgattgcatctccatctcctacccacatacataaagaaactactagtgccacatcatcaccatatagagatactcaaagtcggacagcctcaccaaacagagcaggaaaaggagtcatagaacagacagaaaaatctcatccaagaagccctaacgtgttatctgtcgctttgagtcaaagnaacntaccaggtttttccccccttttgggaaaaggggggnaaaaaaaaagg

SEQ ID NO: 361080 - DNA, 1742 bp, Homo sapiens
cgccccctgacgctgcctcagctcctcagtgcacagtgctgcctcgtctgaggggacaggaggatcaccctcttcgtcgcttcggccagtgtgtcgggctgggccctgacaagccacctgaggagaggctcggagccgggcccggaccccggcgattgccgcccgcttctctctagtctcacgaggggtttcccgcctcgcacccccacctctggacttgcctttccttctcttctccgcgtgtggagggagccagcgcttaggccggagcgagcctgggggccgcccgccgtgaagacatcgcggggaccgattcaccatggagggcgccggcggcgcgaacgacaagaaaaagataagttctgaacgtcgaaaagaaaagtctcgagatgcagccagatctcggcgaagtaaagaatctgaagttttttatgagcttgctcatcagttgccacttccacataatgtgagttcgcatcttgataaggcctctgtgatgaggcttaccatcagctatttgcgtgtgaggaaacttctggatgctggtgatttggatattgaagatgacatgaaagcacagatgaattgcttttatttgaaagccttggatggttttgttatggttctcacagatgatggtgacatgatttacatttctgataatgtgaacaaatacatgggattaactcagtttgaactaactggacacagtgtgtttgattttactcatccatgtgaccatgaggaaatgagagaaatgcttacacacagaaatggccttgtgaaaaagggtaaagaacaaaacacacagcgaagcttttttctcagaatgaagtgtaccctaactagccgaggaagaactatgaacataaagtctgcaacatggaaggtattgcactgcacaggccacattcacgtatatgataccaacagtaaccaacctcagtgtgggtataagaaaccacctatgacctgcttggtgctgatttgtgaacccattcctcacccatcaaatattgaaattcctttagatagcaagactttcctcagtcgacacagcctggatatgaaattttcttattgtgatgaaagaattaccgaattgatgggatatgagccagaagaacttttaggccgctcaatttatgaatattatcatgctttggactctgatcatctgaccaaaactcatcatgatatgtttactaaaggacaagtcaccacaggacagtacaggatgcttgccaaaagaggtggatatgtctgggttgaaactcaagcaactgtcatatataacaccaagaattctcaaccacagtgcattgtatgtgtgaattacgttgtgagtggtattattcagcacgacttgattttctcccttcaacaaacagaatgtgtccttaaaccggttgaatcttcagatatgaaaatgactcagctattcaccaaagttgaatcagaagatacaagtagcctctttgacaaacttaagaaggaacctgatgctttaactttgctggccccagccgctggagacacaatcatatctttagattttggcagcaacggtgagtagttatttttgttaatcccctaaattgtgtctgttgctacaagccccatttcaactaaacattactttacggtttttgttggtaatcatttggacattacaagctaatatatgtttatagttttcttaaatgtatttgcttaaatatttttgcccccgtaatttctta

SEQ ID NO: 361081 - DNA, 3128 bp, Homo sapiens
gaccctggagtttctgtccccaaacacaggcctcacgggattctttctgtcctcatgcactgggcagaggttccttaacttcctttgttgcacattgccattctctcacatcccgtgcggtcaggaagcccttcctgaactctgacttcagttcttgctgcggtttctgcccatttttttcatatcctctgacagctgcgaggtcatctctgctctggcttttctccaagcagaacaagtgggggctctggaaaggttaagggacctcagtggccaccattatactttgcatctttcctgagaagtgagagttgaaagggaagcaggaaggcccatggtcagattgaaggaaggactttttagtttcttttttttttttttgaaatggagtctcgctctgtcattcaggctggagtgcagtggtgcgatctcagctcactgcagcctccacttcctgggttcacatgattctcctgcctcagcctcccaagtagctgagactacaggcacatgccactacacccagctaacttttgtatttttagtagagacggggtttcaccatgttggccaggctggtctcaaactgctaacatcaagtgatctgctcccctcagcctcccaaagtgctgggattaccggtatgaaccaccacaacctgccaggaatttttagtttttagcttttgcaggagacttcaaggaaaggagacattcctctgtccaggaaacgggtaaggggaccatttctgcattgctggtttcccctcttggcagggtgggcatgaggcatcactgttcctgctccctcactcctgctcctcatgctcagcctgccagctcggcctcaactttgtgtgtctaaagtggaactgaatagtaggctgtgagaagataggaaagaggtagtgccaatctccttgcccagatcataaatccagactcagcagggtaaccacatgggcaagcacaaggtaggtgcttggggaaaggggaagtaattggcattctgtgtgataccaaggagaccatttggattttggcttctaccaaagagaatggagaattggttgacctaaatggaaccagtccctttaagtaaggggaggaaagggggtgctggaagatggccctcttcccaccacctagatcatagcttgaactgaagccaaggacagagtgctgcccccttcggcatttactgatgtgccctctttaaatcatgatgttatctaacccaaacccagacccaggacctagtcacagctccaacctacacttcctattaatcttaaaacaaagcaaaacaaaacaaaaagatatcagcattgtagcctccaatctgagcccatttcccttctctggctaccatacctccttctcctatatgataccattcactactttgttcaattatccagtctagacctgcatcttgaggccacacccagccttctcactccccacacccctctttcctctctcactgctccttcctggtctcttctcatctggccccacctctaaggagtcctcctgccttctgggttgccctggaaaacagactatcccccctcctagtgaagggagtgggtaggggtttcagccccaccctcaggaagatgcgtcttccctgtcctctgctctgtggtacttcctctctggctgatttagcaaacagcacctagacctggggccaggcctttggcagtgggacagatccagggataggctacaccaccctgccctgaccctgggattggcatcagcttccaaccagttcctgccaaagcttgtaagtcctcccgacggccatgaacactacatcttctgcagcacccccctcactaggtgtagagttcatctctctgctggctatcatcctgctgtcagtggcgctggctgtggggcttcccggcaacagctttgtggtgtggagtatcctgaaaaggatgcagaagcgctctgtcactgccctgatggtgctgaacctggccctggccgacctggccgtattgctcactgctccctttttccttcacttcctggcccaaggcacctggagttttggactggctggttgccgcctgtgtcactatgtctgcggagtcagcatgtacgccagcgtcctgcttatcacggccatgagtctagaccgctcactggcggtggcccgcccctttgtgtcccagaagctacgcaccaaggcgatggcccggcgggtgctggcaggcatctgggtgttgtcctttctgctggccacacccgtcctcgcgtaccgcacagtagtgccctggaaaacgaacatgagcctgtgcttcccgcggtaccccagcgaagggcaccgggccttccatctaatcttcgaggctgtcacgggcttcctgctgcccttcctggctgtggtggccagctactcggacatagggcgtcggctacaggcccggcgcttccgccgcagccgccgcaccggccgcctggtggtgctcatcatcctgaccttcgccgccttctggctgccctaccacgtggtgaacctggctgaggcgggccgcgcgctggccggccaggccgccgggttagggctcgtggggaagcggctgagcctggcccgcaacgtgctcatcgcactcgccttcctgagcagcagcgtgaaccccgtgctgtacgcgtgcgccggcggcggcctgctgcgctcggcgggcgtgggcttcgtcgccaagctgctggagggcacgggctccgaggcgtccagcacgcgccgcgggggcagcctgggccagaccgctaggagcggccccgccgctctggagcccggcccttccgagagcctcactgcctccagccctctcaagttaaacgaactgaactaggcctggtggaaggaggcgcactttcctcctggcagaatgctagctctgagccagttcagtacctggaggaggagcaggggcgtggagggcgtggagggcgtgggagcgtgggaggcgggagtggagtggaagaagagggagaggtggagcaaagtgagggccgagtgagagcgtgctccagcctggctcccacaggcagctttaaccattaaaactgaagtctgaaatttggtcaacacaagtgagtggggtacat

SEQ ID NO: 361082 - DNA, 8312 bp, Homo sapiens
tccatacagggacaatatgtggctctggcctgtagtcgccatggcagccgtgtgctagatgccatctggagtggagcagccttgagggcccggaaggaaattgctgctgagcttggggagcagaaccaggagctgataagagaccctttcggccaccatgtggctcgaaatgtggccttgactaccttcctaaagcggcgagaggcttgggaacagcagcagggtgcggtggccaagcggaggcgggcattgaactccatacttgaagactgaggctttggatctgggactgggtgttgatgggggagggcaaaatggggtatccaccccatccctttcctggtttaaattggagtcagaagtcttagtggtaaatatttgatatttttattggaaatgtttttgttagtttgaggggaagggtatgaagacagatctcaaggtaaagtcagagagggctgtcatcagtatgctggggagtttagggacaggaggcattggtaggggattagatgtagcagcagtcaggctgggatcaagatgcctgggggacatcttgatcttggcctttcagggcaagtgggaggctagaaaggtggctaggaaagaacagcattcttcaggtaagggtatagacttgggatgtgaggcgttatgctgaaaggttctgtcacgaggggatcagaggacagtggggaaattgggtgggttatctagcctgtactgtctgcaggtcctgaaatttgatgctgtcatagtctttgcagtgggtcggttggaatgattctgggggcagaagctcagagccccttagtaggaatggaggcggcccttctgctgccactgctcagccccctccactgcatgacgaagggtggaggaaattcccagcaacatatggcccaggccttgcagcagtgtggaggtccaacgaaggagctccctgaatggcagagacaagaggaaatcagatgatttggaaaacttgggaggaagccatcaagctgggagatgaggactttccacaagcaagagctaactaggggtaggtgggtgcaagaggacgaattatggggactatccaactgtaggggatggggcagtatgacatgttgatttctgacctgagtactttctttgggccaagtccttgaaagtcacaactcatagagtagagcccgtagaatgtggctttgacattcaggctgccaaagaggtctcgagggttttgcttgtacacgtcaaaggtgaatcgggcgatgtccttgctgtgcttgggcctctcccgtcccaggccatatgacagcactccactctgtaggacacccttgtcagtgcagtagatcctcataccagacacccaccactaatctccatcagcactgggtcagaccctccctcgcttggactttctgtccactgtgtgacatccttgacaattccacaactcctcctgcacctggtccccaggatcagggttaagctagagaggaagcccgggaaagctctaaaggacaggcattggaagcagccccagtataggcctcttacccttgtagggctccagctctgaccagactgcaacaccatcaggcacgtgtcatcctccagcagctggaagaagtcctcactgtccactgcagttccatcctcctctagcaccagggttagcactccattcagcagtagggtctccaatgcctgcccaatggcaagaagcaagaagggcaggtcttatcccatgccccttccctctttagctgcccaacatccatcagttggctctagacattggtcgatgtcccactttgactttctggcactttgatacctcctaaaggttgcagctctccgtgttcttcagtttttgggggatcctagctagaggctgacctttttcctctttgctcctaccatgtcattggcatctccccttgctcccctccaagtcacttctggtttggaattggaaagcaagccaggttctcacgaagtccacccttctgtcttatctacaatgctgcacctcacttcccacaccctcaagagttctccagaagtgttttcagtaatagtgtttaacctttttgagtccttactctgtgccaggtatgaggactttacctacattatcctcttactcctttcaacaaccctaggaggtgatgtattattattgcctttttatagttgaagaaactgaggttttggtaggttgaacaacttcccaaggtttgacaggcaggaagtggcagaatcagaatttgaacttgatttgtcacacaaatcacctttccatactagcttctgaattccgtccctcgaactctccctatctcctgctaacccctgctcccatagaaaagctcactaggtggaaaatgaacaaattgaccagagctcattaggcccactccgctgcttttagccctcagagggaggggcagctgtgtgacttcagccctctgctccatcatcacaagttgccactgttgtggagccccttggctacccctgctataggaaccgaggaacttggcctacttactttggctagcagctcctggcgggtggcagctgtcaggcctttccggatggtccgcttgtgatcacagacacggaaaggtcgctggggtggtggagctgaggtccagaccctccgtccaaactccgagcttatattagatactgacctggtagttgagaagaaaagtcaagaaggggcgaggaggggcttggtgagtgtaaagggcatgatgagggtagagtggctagagggctagggagggagagatctaggtttatcgattagggatgagggagagaccatggagtgcaggtgggggcgggtggctcaggagcttgacaagcccactgtggagtggggagcaggagaggaaggggtactggttagtctcctaggggctgagtggagtattgttgccctgcctatatcccctaaaggtggagggtagagcggagggttagcagtcacctgagtaagtcactggggttcagagctgagaggtactccatggtggaccggagagttccttccctggaacttctgggctgggtggttctctcctgtgctggggctttagtggtgttttctgttacaaacctgggatctcagcccaggacaaggtgggaatgagtcaagcctggactctggcccccctgcctggccagtaagaagggcaaagtccaaggggagggatgagggaggggccagatggggtcctggaggaagaattgcctggcaaaagccattggagcttgtatgtgtgtctttggtgatgacatgtgttgtgagggtagatgggaaccatgtaaaaggatgaaatgtgacttctggtgtttttttatttctatggagggactttctggggacggtttctggctctcaggctctgagaagctgcagtttatgagtggctctgtgtgtgctgccacctactggagaagccataagctgcagctttaggaaaagggaacccggggcagagtgtggggaagtgggatggcagcatggcagggctttggaaaatgagaggtgagagtgtgtccaggaagggtgtaaggagaggatggatcctgatacatggattcaggatcattagggtcctgtctgggacactggccttcctgcttacctgctctttccttcctccttggtcggaggaggggctggctcactgctctggcttcattttccagagctgcctgctgcagtcacacttaggtcatcttctctcacttttctccttttgccgattagtggacgtgacagagatgtgaatggggcagggatgtcctttgatggcatcaagactttagcttctggtgcgctgtgtcccagctctgatttcagttgcagccgtgatggacagttgcatggaagctgagactctcactgacagtgaaaccctcaaatgaacacaatccctgctttcctgccaaggatccttgtagggtcccccagcttccccactttttttctgtgtcctgacaaagaaacacagagtaacttgattgccctgtgacctggccagttgcatttcccctgcaggcttgagcccaagccagagccttgaaaaggtattcaggttgttgcccaaaacactgaaaaaaactggccctggccctgaaccaaataccttgaaccctcgtaaactccataccctgacccccttgttttggatatacccaggtagaacaactctctctcactgtctgttgtgaggatacgctgtagcccactcattaagtacattctcctaataaatgctttggactgatcaccctgccagtcttttgtcttgggcaatctatacttttctcagaggttcccaaggcctactgaagggacttaacatactcttaatggctttcctctctcttgttttaccttatgccctcacttcctgagttaacctcccaaatacaggatcacctgtacccaagcccttagctcaagaatacaggatcacctgtacccaagcccttagctcaagctctgctttggaagaacccaaactaagacagtgctcctggtgccctccccaagcaacctcaagttctggctgttacttgagcagaggcctttcttttcccttcccccagctctatccatctgccaggcccccctcaaatctcttcatttccaagttttgcttgacttttccaagaggagagggctgcttcttagtatgtccctactcatcctttcctttcttgtcttgtatcctggtgcagcctggtaatggggcctcttcatggttgtgtgtcatgactccctaaccattatgcctccatgcatcccctgttcctcctggaacctagcaccatgccttacatggaaaagctgtcattgacagcccggtgagagccctgagggtggagtgactggggcagggcctgaggcaagaggtgggaggaggtaggaggccaggggctcagccggaccaggagactggaaacaggcaaggataaggcaggtgggggactgagttgtttgggtcacctctgcaggccagagagaccaggcaacatacacactgcagaaggtgggctgggaggattggggccagagctgggggagggatgagaacagaagcaggaccaggattcagcagagtcctcctatttccttccaccaccagggaatcttactgccccacttcagcttgtgctgtttcctggcaaggcaggctctcacatgcctggacgcctgggtgcgttggtgatgggaaggagcagggtgagggaggggccccaggagaggcccaggatgagcctcatcttgtccctccccattcttgtcttaccctctgcaaatgtgataggcacaggacaggagtaggcacctcgcctactgctgcttaacctttcagcttctccaggcccccaatcctgcttgctcccagcttggtaagtagatctgtgcacgtccctttacaccccaccatccagttttgcccagatgtgctagaatggggctggacaaagaaggaggggccagactagaggagtggtggtagagatagtgacagcctggggtgaggactttatgcctgtttaccactgagctctgggaaggaggccaggagtggggcaggtcaactgactgggagcaggggatctgggttccaagaaggagttgtgtttgaggtggggtctgggtcctcgtggaagtcaggactcccaggcagaaaagaggcaggctgcagggaagtaaggaggaggcatggcaccttctcatcgggcatcacaggtggggttttgccccacccctgaacgccctctgtggcgccttccacccacctgtaggcccagaaggatgtcggtctgctaccgtcccccagggaacgagacactgctgagctggaagacttcgcgggccacaggcacagccttcctgctgctggcggcgctgctggggctgcctggcaacggcttcgtggtgtggagcttggcgggctggcggcctgcacgggggcgaccgctggcggccacgcttgtgctgcacctggcgctggccgacggcgcggtgctgctgctcacgccgctctttgtggccttcctgacccggcaggcctggccgctgggccaggcgggctgcaaggcggtgtactacgtgtgcgcgctcagcatgtacgccagcgtgctgctcaccggcctgctcagcctgcagcgctgcctcgcagtcacccgccccttcctggcgcctcggctgcgcagcccggccctggcccgccgcctgctgctggcggtctggctggccgccctgttgctcgccgtcccggccgccgtctaccgccacctgtggagggaccgcgtatgccagctgtgccacccgtcgccggtccacgccgccgcccacctgagcctggagactctgaccgctttcgtgcttcctttcgggctgatgctcggctgctacagcgtgacgctggcacggctgcggggcgcccgctggggctccgggcggcacggggcgcgggtgggccggctggtgagcgccatcgtgcttgccttcggcttgctctgggccccctaccacgcagtcaaccttctgcaggcggtcgcagcgctggctccaccggaaggggccttggcgaagctgggcggagccggccaggcggcgcgagcgggaactacggccttggccttcttcagttctagcgtcaacccggtgctctacgtcttcaccgctggagatctgctgccccgggcaggtccccgtttcctcacgcggctcttcgaaggctctggggaggcccgagggggcggccgctctagggaagggaccatggagctccgaactacccctcagctgaaagtggtggggcagggccgcggcaatggagacccggggggtgggatggagaaggacggtccggaatgggacctttgacagcagaccctacaacctgctgcccttccctgtccctttccaccccccacccaccctccagaggtcctcccgacggccatgaacactacatcttctgcagcacccccctcactaggtgtagagttcatctctctgctggctatcatcctgctgtcagtggcgctggctgtggggcttcccggcaacagctttgtggtgtggagtatcctgaaaaggatgcagaagcgctctgtcactgccctgatggtgctgaacctggccctggccgacctggccgtattgctcactgctccctttttccttcacttcctggcccaaggcacctggagttttggactggctggttgccgcctgtgtcactatgtctgcggagtcagcatgtacgccagcgtcctgcttatcacggccatgagtctagaccgctcactggcggtggcccgcccctttgtgtcccagaagctacgcaccaaggcgatggcccggcgggtgctggcaggcatctgggtgttgtcctttctgctggccacacccgtcctcgcgtaccgcacagtagtgccctggaaaacgaacatgagcctgtgcttcccgcggtaccccagcgaagggcaccgggccttccatctaatcttcgaggctgtcacgggcttcctgctgcccttcctggctgtggtggccagctactcggacatagggcgtcggctacaggcccggcgcttccgccgcagccgccgcaccggccgcctggtggtgctcatcatcctgaccttcgccgccttctggctgccctaccacgtggtgaacctggctgaggcgggccgcgcgctggccggccaggccgccgggttagggctcgtggggaagcggctgagcctggcccgcaacgtgctcatcgcactcgccttcctgagcagcagcgtgaaccccgtgctgtacgcgtgcgccggcggcggcctgctgcgctcggcgggcgtgggcttcgtcgccaagctgctggagggcacgggctccgaggcgtccagcacgcgccgcgggggcagcctgggccagaccgctaggagcggccccgccgctctggagcccggcccttccgagagcctcactgcctccagccctctcaagttaaacgaactgaactaggcctggtggaaggaggcgcactttcctcctggcagaatgctagctctgagccagttcagtacctggaggaggagcaggggcgtggagggcgtggagggcgtgggagcgtgggaggcgggagtggagtggaagaagagggagaggtggagcaaagtgagggccgagtgagagcgtgctccagcctggctcccacaggcagctttaaccattaaaactgaagtctgaaatttggtcaacacaagtgagtggggtacat
